United States Patent Application Publication US 2005/0118625 A1 - sequence listing, part 3

SEQ ID NO: 2997 - DNA, 700 bp, Homo sapiens
tttttttttttttttttgagacaaagtattgttctgtcacccaggctggaatacagtggcaccatcatggctcactgcagcctcaatttcccaggttcaagcaatccttccacctcagcctcctgagtagctgagactatagatgtgtgccaccatgcccagctaacttttgttcttgcttcctgtagagatggcatctcaccatgttgcccacattggtctcgaactcctgggctcaagtgatccgcccaccttggcctcccaaagtgctggaattacaagcttgagccactgtgcccagactataaaactcttaaaagcaaatgggagaaaattttatgacattagatttggtataggtatattgaacttcattaaaatggaaaatttttaggcatcaaaggacaccatcaacagagtcccacaggatgtgagaaaatacctgccaattatatatctgataagggattaatatctagtatatataaagaactcctataactcaacaacaatagcagaaacaacaataccccacaaagaccccaattctaaaatgggaaaaggggctggcacggtggctcatgccctgtaatcccaacactttgggaggacaagcaggagggtcacctgaggtcaggaattcaagccagcctgcccacatggtgaaacccgtctctactaaaaatacaaaattaactgc

SEQ ID NO: 2998 - DNA, 730 bp, Homo sapiens
tttttttttttttagtagagatggggtttcaccatgttggccaggctggtcatgaactcctgacctcgtgatttgcccgcctcggcctcccaaagtgctaggattacaagcgtgagctaccgtgcccggtgctgctctgaatattcttaaatgattatttctgtggatatatcttttgatttatttcaggtaatacttaggactggaattgctgagttgtagggtagatgcctgtttatctttatgagaaactgccagttttccaaaggggttgaatcattccaaatccttaaatctgtaacatctaactctacaccagcaagaatccttttgtgtcaggtccatgtcttttaccaactctaaaaggattcctaggccaagaaaaataaattaaaaaaaaaagatatggatgtaaatggcaacagatgaatttagacttgtctgatggtagaatgtgccaagtcagaacagcaagagagccttcccctgctgattcagacctcgaaataaatcatatttaagaatacgacttgggtaaagtgtgagcccaaatcatatgttctccagctgggtggatgtccctttctgctcttggcctcagcagccacactgaataatcttttcgggaatgggtgggtgaccgatggtagggacattaattgccttccattggctggttgatttggctggtaagagaatgctgtgccattccagagaggcttctctgttt

SEQ ID NO: 2999 - DNA, 749 bp, Homo sapiens
  misc_feature (666)..(666): n is a, c, g, or t
tttttttttttttttttaatctcaaaggcaattgagtgggtcttctgggccagacctatttaatttacgaaacatagtaccttgcagagaataggcattgaaatattatttaaacaatcaaaccaaagatgttcttctatcttcagctgtcagtgatctaatgccctcatctctcttatcctcaggacccagaatggtatattccacataaaagatgctttgtttatcaaatgaatcaaaaagcacgcctgaggcatttatttttactcctttacttctgtaggccaggtcaaggtgggtctaattcacttttatcatcagcacttaagaaactggatggaagaccacaacaccttgttttttgcaaaaattttccatctcctcaatcaggccaggaagcatgtatcttctggacaggactttatctctctactcagcttagtacactgccttatattagtccatttgtcccatgttttcatcactgaataaacttgttaaatgacttttggtctggatctcacacctatattacttcatttccttctgtgagcactctataatgataacatcatttttatatcctagggcatgtagttccgagccccacagaaagtatcaccattcagtaagccataggtcattcctatctgttagaactgctangcttcgtaaatctacacatagaatctcgggtgctaggttcatactgatcattatggttgtgcccccgtggttccctaggctag

SEQ ID NO: 3000 - DNA, 675 bp, Homo sapiens
  misc_feature (522)..(522): n is a, c, g, or t
cacatacatattttccagtgtctaattctcatcgtgtcttttccattccagacttccctgtctctttcccagagctctgttcctcttctcactgtttctggaaggcagttgcactcaaaagtgaagtcaccagtctgccgacaggtgcctccattgacacaaggcgagggtgcacagggcacatacaggctgtcacagtactggcctgtgaagccctgaaggcactggcactggtaggaaccaggcaggttgaggcaggtgccaccatgctggcagtgtcctggaatgtcacactcattgacatcagtctcacacttctgccctgtgaagcctgtgaggcatttgcaggagaactggttggccacagtggtacaggtacttccatttgcacagggatgagacaggcaggcatcggtccattggcactccttacctgttaaacccgacttgacaggtgcactcataggtatcccggctgagcatatggcatgtgccgccattcaggcaaggtcgagacacaanagcatggatgagatgtcgagtactggcagtcctctcctgtaaaccctgaggcacatcggcacgtggcttcccagcatggcctggccacacagtcccacaattctggcaagcggttcttctcacaggcgtctcgatgttgacatattcccccaa

SEQ ID NO: 3001 - DNA, 84 bp, Homo sapiens
gtgtgccttgctgaactggacttttcacttttttttttttttttgagacagagtctcactctgtcacccaggctggagtgcaat

SEQ ID NO: 3002 - DNA, 695 bp, Homo sapiens
gccggccggcataagcccagtacatgacctatggactttcctacttggcagtacatctacgtattagtcatcgctattaccatggtgatgcggttttggcagtacatcaatgggcgtggatagcggtttgactcacggggatttccaagtctccaccccattgacgtcaatgggagtttgttttggcaccaaaatcaacgggactttccaaaatgtcgtaacaactccgccccattgacgcaaatgggcggtaggcgtgtacggtgggaggtctatataagcagagctcgtttagtgaaccgtcagatcgcctggagacgccatccacgctgttttgacctccatagaagacaccgggaccgatccagcctccggactctagcctaggccgcgggacggataacaatttcacacaggaaacagctatgaccattaggcctatttaggtgacactatagaacaagtttgtacaaaaaagcaggctggtaccggtccggaattcccgggatggtctgtggggttagagcccagagcaagatggagagggtatctatgcagggaagggggcagcagtggcaatggaagactggttacatggaggggattgatcaaataagtatatatattaagaataattgtagtcaggattattactgtagttgaaaggagttaaaaatttggaaaaaaaaaaaaaa

SEQ ID NO: 3003 - DNA, 152 bp, Homo sapiens
cagaatagacaaaaataaatatgtcaacctgcccgaccctctggggtgaactggatgtggacactggagggagggcgtcctttattacatacgcgatctctgaagtcatataaatatagaataccttatagtagatcagcattaaataccag

SEQ ID NO: 3004 - DNA, 720 bp, Homo sapiens
tttttttttttgaaggaggaggaggaagacatcatttgtggtccacaaagcataaaatatttactatctgaccctttattgcaacactttgccaagccctggtctatacttaagaaaatgttaataatgcaaattaaacttaatgtacattgtgtctgtaactattacattataaatagcacagaaaattgagaaaatattctcccagtgttgaaaactattacctcatcagcaaagaagtctctcatgtgattaatgaacaagtaaaattccaacatacatcttcattgttttactttcatgttatctgttaatgtaaatgaaaatatcaaccaacattcatgttgaaactacattcatgggtcaatgactgaatttggacagtagtcaagcatttatttgtagactgattttgtcaaatcatggttgaattgcagccctaggttaactacagacaaaagagttcagcaaaaatgcaggaaagcattacctgagactcaagttgcaggagagcattctataataaagagtattgtatattctcattattatttgtaagttgtataccatacatccttttcatcagtaaaattataataaatttatctacatgtatacatgaacactggttttccagagagctggttattaaacttttaccagcacatacttaagcctactcctagagattcgctttaaatgttctgggatgtgaccttg

SEQ ID NO: 3005 - DNA, 727 bp, Homo sapiens
tttttttttttttttttttttcctaactaatgttggtgaggatgtggataaaagggaaccttcgtatgctcttggtgggaatgtaaactggtacagccactatggagaacattatggagtttccttaaaaaactaaaaatagtactactatataatccagcaatcccattcctgggtacatatccaaaagaaaggaaatcagtatattgaagagatatctgctctctcatgtttatttcagcactattcaaatagccaaatatggaatcaaccaaagtgtctatcaacggacgaatggataattaaactgtggtacacatacacagtgaaatatttttcagctatacaaatgatgaaatcctgttatttgcaaaagcatggatggaactgaaggacatcatgttaagtgaagtaaatcaggcatgaaaagacaactatcacatgttctcactcaatttctcatatctcagctaaacaataattgaactcatggagagagaacagtagaatgatggctactggagcactagcgaagggtagtggggagggacgatataccgacggactatggttaacgggtacaaaaataccgttagaacgaataaggtctagtattcggtagccaatagggtgactatagttaacaatacttatgtatatttcaaataacttaacagttgaactggagtgctcctaacacaaagaatgataaagcttgaggtataat

SEQ ID NO: 3006 - DNA, 82 bp, Homo sapiens
agcagtctggtaccggtccggaattcccgggatgggtcacatggtgaaaccccatctctacaaaaaatacaaaaattagcca

SEQ ID NO: 3007 - DNA, 693 bp, Homo sapiens
gttttggcagtacatcattgggcgtggatagcggtttgactcacggggatgtccaagtctccaccccattgacgtcaatgggagtttgttttggcaccaaaatcaacgggactttccgaaatgtcgtaacaactccgccccattgacgcaaatgggcggtaggcgtgtacggtgggaggtctatataagcagagctcgtttagtgaaccgtcagatcgcctggagacgccatccacgctgttttgacctccatagaagacaccgggaccgatccagcctccggactctagcctaggccgcgggacggataacaatttcacacaggaaacagctatgaccattaggcctatttaggtgacactatagaacaagtttgtacaaaaaagcaggctggtaccggtccggaattcccgggatgccttggttggtttctctctgccccgtgtggtcatcaagtcctgggggatgtgctctgcccagccgccctcggggagagcagcgccgcctcccatggggccgtggggctgctgttctcactgcactggctgaagcaacccgccagcctccgtgccccaccccacccagcacgcactcattcagtccattgccttaacacaagcctgatggggctgttttctcacaatataaacgaataaagtgtcttctggcctacttctgaaaaaaaaaaaaaaa

SEQ ID NO: 3008 - DNA, 689 bp, Homo sapiens
ttttttttttttttttgtttttttttttttttttgaccacaaaatggaactttattcacgtcacagacactgaccctccaatagccccagaagcaagagcctagggcccagcaatgccatacccagtccttggagttgggcagggtaggacgctggccaagggccagtgctgtctcttgcttacagcctgaggactacgggagcagcagctgtggcctggccgcatcccaatgctgggggcttggcttggtgccccatccccttcctgagctgagctctatgaaggactcttaaaaaaataaaataaatatgcagagtcaacagtgcttgtgaaaagaagggaggacaccctattcctgctaagggggtagaggaagaaggtgaaggcggctacggtgcccataagagaaggctggcacaatcttcattcccgccagtgtgatttcagtctcaaagacgatgagtatttggctgagaaatggaacggatactccaggctccctacggagttgtgctggggccatgctgagctgcccttgcaggcagccctgggtgctgggggcagacatgcaggacatctgggaagagtcagaaccacaggtgggagggaatctcagagcccaggctccccactgagcttggccagcagcctttgaactccgttcagaggacccttaaacgtgaaacga

SEQ ID NO: 3009 - DNA, 636 bp, Homo sapiens
agattgcaggcatagagaacgacgagggcttcggggcacctgccggcagccatgcggcccccgcgcagccgggccccacgagtggggctggttcttgaggacatggggaccacagtcaatggagatgtgtttcaggaggccaacggtcctgctgatggctacgcagccattgcccaggctgacaggctgacccaggagcctgagagcatccgcaagtggcgagaggagcagaggaaacggctgcaagagctggatgctgcatctaaggtcacggaacaggaatggcgggagaaggccaagaaggacctggaggagtggaaccagcgccagagtgaacaagtagagaagaacaagatcaacaaccgggcatccgaggaggctttcgtgaaggaatccaaggaggagaccccaggcacagagtgggagaaggtggcccagctatgtgacttcaaccccaagagcagcaagcagtgcaaagatgtgtcccgcctgcgctcggtgctcatgtccctgaagcagacgccactgtcccgctaggtgcctgctaggtgcatggccacagagcatgggctgggcctgggcacaggaggagcagctgcttggtccggtggagactcgcagcagtggtacccacaa

SEQ ID NO: 3010 - DNA, 727 bp, Homo sapiens
tttttttttttttttgtagagaaaaagtatttaatcaacaactttaatgtaagagcaagagtgagtaatggaaatccagctctggtagtagagagcatctacttgtggcagccaaagatttctttgcagtaacttttagctaggtttagggataaaaagaagaatgagatgaacacattacaatatgatgtaaaccactggtatggttttcacaaaagtggaaaagatttaatcagtgaataaatgctacaaatttgccaatcgatttttaacttcccctaaatttatatttcgataagcaatctctaagatttcaactctacaatatttgatgcacaaaaacacagaaaaatgttttaagggaagaataaattattttaagttagtcagactgttaagatatatttaaaaacctgtattccagaacaaaagtcacagatgactaacagaaaaaaaagaacgcacctatatctgggtaaacaaagctatgtaatacacaattacaataaattattatggtataactttggatactgttatatatttagcccagttttccaaataacaagtgcatgctttctctctagaaagtggaagatgcactattgtacaaagcaaagatagcacaggagaactgggcactgtaagaatcggaggataaaggttaaatcattcattcaatctttgaatctattccatcaactcaaagttagaagggcttagcttt

SEQ ID NO: 3011 - DNA, 693 bp, Homo sapiens
ttttttttttttttttttttttttttcacattcaagactcaagtttattttttaaaagatctcttctgcattagattctaggtttcttttttggtttcaaaactgggtctacaatccataaaaatgacattaatggagatcttaaaaacaatctgattataccagcagtttggtaacatatcggtagagctgttctgtaaatgcttcaggggaaaatttttccttcactctggctcttccagccaggcccatggtggcttttaaggaaggttcacggatgaacttttctattgcttctgagaagtgcaccgggtcaggctcacacagaaaccctgtgacactgtggtcaatggactccaagggtccacccgaattaacagcaatgactgggcactgcatgtacatggcttccagagggacaatgccaaagtgctcattgcttggtgtgtaaagcacacacgtgcagctgtggaggagggagattttctgtttgtctgagaaagacctcaagaaggtcacatactggccaaggtcggactgttggaccattttcttcaattcctgataatgttccacattctccaggactctctcgtcataaccacctgccacgatcagatgaaccctctcccaatcttgggatgtcaatcttccacgcagctgtactagggcttccagtgccaaagtcaagat

SEQ ID NO: 3012 - DNA, 761 bp, Homo sapiens
aaaaacagtgcttcattaccatgtgcaaaggctgaggcagtgctcctccttcgcttagagtttataaaagccagcaacatgatcaataatttatacacatggagagtaatacaaaaaaataaggaataaaagctaaagatctaactactccgaccttcacaattccagctacttgataataataggagtaacccaatgaatactgtatggtctgaaagctactatacaatatgattcttaacgagaagggaagggaattagagactgtcacaaagccctgggatgcttctctggagttagcagggaaacaggaccctgggcaagcagctcgggtgtcctaggaagtgattctgggggaggacgggaggggagagagaaggctaggtggtcgattacacaagcatcccatgtaatgcccccatgccccaaaggtacctgttttgccatggcaatgggaggggctggaggaacagcatgttgcatgtagggatggtccggtccctgccatggggagtggggagaagaggagaggttctgtggcattttgagccttgcaaagatttggactgaaaagctcagagactcaggtaggtcagcctgtcagggacaagtacactccaccggctctcttctcgctttgcaggccctagcttacgcgtgtcagccccaggtttgtccagctaatcaccaagcagaatataacacagaaaaacaattcatatcccttagggacaaaacgaggtccattcctcactcaatat

SEQ ID NO: 3013 - DNA, 746 bp, Homo sapiens
agccgcggacggataacaatttcacacaggaacagctatgaccattaggcctatttaggtgacactatagaacaagttgtacaaaaagcaggctggtaccggtccggaattcccgggatggccgccctttttttttttttttgagatgggtttataatgttgaatttctgtaaaataaactgtatttgcaaatccaacattgagcttctggactacgctgactccactgctgaatcctcaatggaaagggtcgactggttgcagttgaaatgacctgaaatgtagcctctgtccttgtaagtcagttgacttgccgcacatctctttgtgtacttgtacggtactggcagaaaagtcatttttcaaaagccataggcttttccttgcccttagctgtaataatgcatctgattttgatttcctccagagctgtgtttctgtccatcacctgtgtattggccctgtgtttaccactctggcccactcctcacccccttgctcccctggtcttctggagtttgtgacattgatttgaaatggatggtgttctcttgagagcaagtgagattgttagaattaagttccaactatacagttttctaacatagctataaggtccttgttgctgtttgtgataactgatagataactcattggaaacgtgcatacatttatattcagatgaaattatggtttgcactgtctattaaatatctcgattaattttcaaaaaaaaaaaaaaaaaa

SEQ ID NO: 3014 - DNA, 705 bp, Homo sapiens
  misc_feature (705)..(705): n is a, c, g, or t
tttttttttttttttttttttcaggcttgttgatgcattttattgtgagatgggagtctggtaaaaaactagaaaatgaccatgatgtaacaaggaacttaaaaatgaagagtcagatctgtaacttacatacatgaatacaggaacaaattggcacaaaatgttaaacattgttcccaacactgtttatagaagttaatcctaatttggcttactaaggaaatgagagttgtatggttaggctgatttcttaataaaactgcagagcatcatgctattagtcacacagtgaatttcaaaatttaagttttatattaaaaactgggtaaaggtaaaatgacttgattgtagttgtaaaactaatacattcccatttaagttctgttctacagtccaaggcaagtataaatgttaacataacactgttaaatcaaatctcaatgcaggagaaccaattgcatctctactttaaatcttatcaactttccaaattttcatactaaaatatattattgtattaatacaaactacagtattatacactacactgtgtaataaataaagaaatataaaaataagacacataaatataaaagttttctaaaactaaaagtacatatgtcagtaagaagggtattaatactgccaggtttgaagacatacagtacaaaaatgttgcacagatctataaactgaaagaaatan

SEQ ID NO: 3015 - DNA, 659 bp, Homo sapiens
tttttttttttttttttttttttttttaacaattataaacatttattaagcaccaagaatatactgtggtggttgctatatgaaaacataattaccaatatagtatccctgccattgagcttacaatctaaaacgaaatacaaggctatgagcctatctaaaaacttccttaacttagaaatggctactttggcaaatgagtgaggcaaaatgacctattattcaggtgcagtgctaataaggctttgaatatcatccaaagaatgttttacttgtacccattgttcctgattatgttacacttgctaagaaaaacagtacttagaattttggcatgaacaatgaattatttcaaattgtcttgtaggactttaaacaaagagatgcttactggcctaagttttccagcagccagggaaagccctattaaaaatattatgaactagaccaagtttctcttttaatccacttacacttttttttttttttttgagacggagtcttggctctgtcgcccagctggagtgcagtggtgcaatctcggctcactggaagctccggctcctggggttcaagccattctctctatactcagactcccgaatagactgggacattcaagcggccggcaacaagcctggcttaatggtaaaggaata

SEQ ID NO: 3016 - DNA, 574 bp, Homo sapiens
tttttttttttttttttttttttttttttttcaaacctttgtttttcactttattatacaaaaaagggaaaacaaaacttccacagttggctttaagcataggcagacacctctaagccactccctcccacctcccatgatacaaattcaagttgtggtggttgttgaatcctacaaaacactccttaaatattagaaaagaagttgggggtggggatgggggtcttcccaccccagccatcccatcccagtgccaaaatgcactcaagagtgacctcttacagcaccaacacccccaccctgacagtcctgtttgtactgtaagaatttttcaatttttaaaacaggaaagaaaaagtgccccattcaaagttgtttttaaatgaaaatacattccactgaaacacaacagtgtaggggcatccaaataggaaactggggttctttgcagggctcttgggaagaaatagaacctataaacccctgtacttaattccaggattaggacaaaggaaggggaatgggagtggggagtgtcccccccaggcctccccacccccagcaccaaggtcca

SEQ ID NO: 3017 - DNA, 720 bp, Homo sapiens
tttttttttttttttttaacactctatccttttattccttcccaggctattgcaggaaaagtcttgtttcccaaacgctgtgcctttctcctcttgccttcaaccctggaggggcccaactacacaagtggcttatttggagaagggaatgaggttgaataaagaaagctcagcttccagaacaccacactctcttggttttctctgaccttaaggtaactccttctcagtcctttggctgatttcccatttcccagagagcccaagggctccatccatggctcttttctgttgcttctcagtaatactcagagacaatctcagtggcccctccagctgcatggctttaaatgccactgacatgctgatggttcagtagggggcgctgtggtgccctgccagatcccttcacacagccagtgcccaggacccccaaccccaacacactaccatgcatggtagctgccagatgcctacagcctcttttccagagacttgccctcaactgaagtcacttgccttcaaatgtacccacactcccagagaacttctcacagccaataaatgactgataaaggctttcacaggttccttctgagagcacccccaacaataaaccaagtgcattcagatccctgtctcgagctctgctgcagacctgacctgagagaactctccactttgattgcaggcagaaactcccatttcaaacacagacag

SEQ ID NO: 3018 - DNA, 715 bp, Homo sapiens
ggaagacaccgggaccgatccagctccggactctagctaggccgcgggacggataacaatttcacaacaggaaacagctatgaccattaggcctatttaggtgacactatagaacaagtttgtacaaaaaagcaggctggtaccggtccggaattcccgggatgttaacctacctaccattgcgctgtgtaacacagattctcctctgcgctatgtggacattgccatcccatgcaacaacaagggagctcactcagtgggtttgatgtggtggatgctggctcgggaagttctgcgcatgcgtggcaccatttcccgtgaacacccatgggaggtcatgcctgatctgtacttctacagagatcctgaagagattgaaaaagaagagcaggctgctgctgagaaggcagtgaccaaggaggaatttcagggtgaatggactgctcccgctcctgagttcactgctactcagcctgaggttgcagactggtctgaaggtgtacaggtgccctctgtgcctattcagcaattccctactgaagactggagcgctcagcctgccacggaagactggtctgcagctcccactgctcaggccactgaatgggtaggagcaaccactgactggtcttaagctgttcttgcataggctcttaagcagcatggaaaaatggttgatggaaaataaacatcagtttctaaaaaaaaaaaaaaa

SEQ ID NO: 3019 - DNA, 718 bp, Homo sapiens
  misc_feature (562)..(562): n is a, c, g, or t
ttttttttttttttttttttttttttttttttttttttagcacatggttctctttattgtgatgctcagtggaaaacatctgtaaaccagcttactgtagtggtgacagctgcaacacatgctaaggcacttttattatataaaaaagggggtagggtgggagtttcactcactcctttgtgacagcaactgggacctgaattcagagctttgtaggcatatgcagcttttatatcacttcatgatttgagagtttgtttcctttaaaaaaaaaaaatgccttcttgccgtaagtctcaatgcagcatatacaaaacagttaggaatacaagtaaattcggcaaccagtgtagaccagtgaggacgagctactctcttctaaacaaaggcagtgagaaagactcggaattttatcatttattacaagaaaggggaaaaaagaaaaccttatttggctttcaaaaatacctgtgcaggtggcagatttttaaactatactgagtcaacggtgcaggtaaaccaccctcgggcccagtcctagagtagacacaagatcgcctgngagggccgctggcccctctaacgctctggctgtcagacttgggacaagtcccttaaccattaagtatatatggtccccaagagtgttgggagaaagcactgggaaggctgctggcctttccagcttgaccccgacagccttgctgtggcaaagcag

SEQ ID NO: 3020 - DNA, 195 bp, Homo sapiens
  misc_feature (86)..(87): n is a, c, g, or t
  misc_feature (103)..(103): n is a, c, g, or t
tgagccaagactgcaccactgcactccagcctgggtgacagagtgagactccatctcaaaaaaaaacaaaaaaaagtgtgtgcttnnaattttgtgcatattnttatcaagtttccctaagtttgtccttctgttaatgaagtttcatagttttagtaccaatgtgtgtttcgggaaaagtattactttgattta

SEQ ID NO: 3021 - DNA, 571 bp, Homo sapiens
tttttttttttagagacaaacgtgacaggctagtcttgtctctctcatatgctaggtagcaaatggggtgatatttttatagaagtgggcaaaaattattttctcaattttactgagtaggcacagaagaaaagtacagataggctgatggttattgccttattttgactgcatttctcttaaatggatcatttaaattagttcttcaagtaacagtttactggttgttccattcctgaatatgcaggctaatttgtacagatagggattaaggaatacagactattagagaagatccttatatttacatctagtatatatgtggtaaggaaatgccgattcttcattataaacaagttttaaaattgttctttcttagttcaaatgatagcaatacccctatagcattaggtagaaacaaattattcattacatcgtaaatctctttactatgtcctagctctgtcctgctacctaaaggatataaagaaatactattgctctagaatgtattactttgttctcccatgaaagaattcagtttgttagtacctatatttttaaactggtc

SEQ ID NO: 3022 - DNA, 633 bp, Homo sapiens
ttttttttttttttttttttttttttttttttttttttttttttttttttagtggacttcctttttaatggattgtatagaatatcatgaagaaaaatagatgtaaagttcaatgagttaaatacacaaaattaatgctaaccatttgtaatttgttacttcttagatatagattatattgtatagtcacttgggataaaataccattttggatatacattgatcatctagtgcctgtatttttagcagatgttaaatacagctttttaggaaaggattaaaaagcgatttaaaactttgggaactttatactaatgaaattcttagagtaagcctgaaaaaagtaataaatggttatttaacatattaagagtaaaacaaaatgactagtcagggtgggaataatattttacaaatatatgcatttaagatatggcccaatatcttaaaagaacagataatcttgataaatgtcttcagggtcctttttttcctttcttttaaggtttccctttaaattcaaaaatacaaagtttatagaagatctttagcaaacaaatcctaggctaaaagtttcattaccccaaagcttatatacagtttttcccctaggtggggcagaaccaccctttt

SEQ ID NO: 3023 - DNA, 715 bp, Homo sapiens
ttttttttttttttaatcagtgcagaacatttcatgtcttgaaattgttcttgatggtttttttttttttaagacctttctcttctgcacttctacttttttttttttcttgagttggagtctcgctctgtcacccaggctggagtgcagtggcatgatctcagttcactgtaacctcctcctcctgggttcaagcaattcttgtaccttagtctcccaagtagctgggattacaggtgcctgctgcctcacccagttaatttttatatttttagtagagacgaggtttctccatgttgcccaagctggtctcaaactcctgacctcaagtgatcctcccacctcggcctctcaaagtgctgggattacaggcatgagccactgcgcctggtcttccccttctacttggaatccaatctttgtggctttcttggcctggcttcctgaccctcaagctaccacaggacctccccttccattcccactgatacacaacgtgggctctctatttctagtggaaccaagagaggggagaaccatattccagatcctcccttttattaaggaaaaaacaagaagtgaatgttttttccggatttctgtcctgtctggactcagagcatctttttttttttttctggggtccacacaggacaagaaaaaccaaagttcagctggaggtagactgagtctgttcagccactttaaactgggg

SEQ ID NO: 3024 - DNA, 729 bp, Homo sapiens
  misc_feature (380)..(380): n is a, c, g, or t
tttttttttttttttttttttttttttttttttgtcataatttcatattatattctcaatgctttcaaagcccaacagtgattttaaaaagaaattaaacaacatgctttcattgaatttttaaaaatctatacaattcaagctaatgaaatattttattgtacataataaaagtggtgtttttctaaaaaaaaaaacaataaaataaaataaaaaaaaaatttccaggcccagacgtctgtgggagtacgtgaggaaaggattccactcaagtataatcagcaatactctattggaatggaaacccattaacctcccacttccacctccccttatgggttaaattaccttaaccattccacccaacagggccttggaanattccctggttagagccattcagagttagagaaccttttttttggaaaatttttcacaaaacatgtgcctaattgatatgcatgaggaaggaatgaaaaaatttataaactggtaaccgcacaccattatgtgttaactccccagctttctctaattttacaaccgagtttaagaaatttacaatactccaagagaaaagtattttcaaaaaaatagtattatgcctcacgtggctaagctgcatttgtcatacctccaatataaattaggacaaattgtgcattcttaactgtcacattgaatttcagtacttttcaattcccaagcaaaaaaaacaaataaactgag

SEQ ID NO: 3025 - DNA, 535 bp, Homo sapiens
  misc_feature (427)..(427): n is a, c, g, or t
  misc_feature (435)..(435): n is a, c, g, or t
caggggctcggtgcccaccgtggcggtcttcatgctcaaaattttcatgtcactggtggtggggatcaccagcggcgtctgggtgtggagctccaagactttccagacctggcagagcctgtgctaccgcaagatagcagctggccgggcccgggccaaggcctgccgcgcccccgggagctacggacgtggcacgcactgccactataaggctcccaccgtggtcttgcacatgactaagacggacccctctttggagaaccccacacacctctagccacacaggcctggcgcggggtggctgctggcccctccttggcctccaagccctggcccctggattccctaaaaaacgctgaataaccactggcccacgtgtgctcaaggctcagcgcaattagacccccggggactagagagactcagnggggggcngccggggaagaccccgtgagcgctcattaggggagatgggggtctccccctaatgcgggggctggaccaggctgagtccccacagggtcctagtgggagg

SEQ ID NO: 3026 - DNA, 448 bp, Homo sapiens
tttttttttttttttgatagtgagctctttttttcttgaataagtttttggggaacaggtggtgttcagttacgtgaataagttccgtagtggtgatttctgagattttgttacacccatcacccaagcagtgtacactgtaccaaatgtgtagtcttttatccctcaccccactcccactctttcccccaagtccccaaagtctattgtatcattcttatgcctttatgtcctcatagcttagttcccgcttatgagtgagaacatacaatatttggttttccatccctgagttagaataacggtctccaattccatccagtttgctgcaaatgtcattatttcatttctttttatagctgagtagttttttgtatatggtgtaagaaaggggttcagtttcaatcctctgcacatggctagccaattctcccaaccccctgaaaaa

SEQ ID NO: 3027 - DNA, 632 bp, Homo sapiens
  misc_feature (205)..(205): n is a, c, g, or t
  misc_feature (207)..(207): n is a, c, g, or t
  misc_feature (449)..(449): n is a, c, g, or t
tttttttttttttttttttttttttttttttcgatctagtattatttaatgaagacggacagcaattttaatacaatcttcttttccaagacctttgacagaccttaggcccattttccacctttatgtctaggaaagtataagtaaaacacttttgagggcataaaaaacacaagcttcttgttaaggtgtatcagtagccagngnaaatctgctgtgcccctttgagggtcatctaactaaggcatggagaaagaaactggcctcaagtcagtttctatcacctctgcagggaagctggccatgcaaaccaggacatggttcaaacgtgaacaaagagtgtggttaataatcatgccagaacaccaggtataagatgtaagggcaagtcaggcattctgtacattgcttctcccttcagtttggaaaactcactgcagtagggtttngacttatcgtttcaccaagacagctaggaaggccaggcacagtggctcacacctgtaatcccagcactttgggaggccaagacgggtggatcacgaggtcagatcgagaccatcctggttaacacgggtgaaaccctgtctctacttaaattacaaaaatagccggggttttggttggccggg

SEQ ID NO: 3028 - DNA, 679 bp, Homo sapiens
  misc_feature (639)..(639): n is a, c, g, or t
  misc_feature (648)..(648): n is a, c, g, or t
ttgacgctccatagaagacaccgggccgatccagcctccggactctagctagccgcgggacggataacaatttcaacacaggggacagctatgacccctagcccattagggacactatagaacaaggttgtacacaaaagcaggctggtaccgggtcccggaattccccgggatctcaccccccatccccaccccattaaattctaacccagggcatggggttggggcggaaacctggagagagggacatagcccctcgccacggctagagaatctggtggtgtcccaaaatgtctgtcaggtgtgggcagttgggcaagcaccaagcccctctggacctttcatagcagcagaaaaggcagagcctggggcagggcagggccaggaatgctttggggacaccgaggggactgccccccacccccaccatggtgctattctggggctggggcagtcttttcctggcttgcctctggccagctcctggcctctggtagagtgagacttcagacgttctgatgccttccggatgtcatctctccctgccccaggaatggaagatgtgaggacttctaatttaaatgtgggactcggagggattttgtaaactgggggtatattttggggaaaaataaaaantggtttttntcccttttgtaaaaaaaaaaaaaaaaaaaaa

SEQ ID NO: 3029 - DNA, 697 bp, Homo sapiens
tctacgtattagtcatcgctatcaccatgttgatcgcgtttttggcagtacatcaatgggcgtgaatagcgttttgactcacggggatttccaagtctccaccccattgacgtcaatgggagtttgttttggcaccaaaatcaacgggactttccaaaatgtcgtaacaactccgccccattgacgcaaatggccgttaggcgtgtacggtgggaggtcaatataagcagagctcgtttagtgaaccgtcagatcgcctggagacgcgatccacgctgttttgacctccatagaagacaccgggaccgatccagcctccggactctagcctaggccgcgggacggataacaatttcacacaggaaacagctatgaccattaggcctatttaggtgacactatagaacaagtttgtacaaaaaagcaggctggtaccggtccggaattcccgggatgaaaagagaaggggaaagtacccagcaagatctcagctaaattctatttttggtctcatctggagtggggaaggaggcttggaatgttccaatcgtattacagagttgtcatgccttgaagcaagtaaggaaaacacaaaggctgaggaactgttccatataagagagactaaacagaagtgagcactaaattcaatacataattctggtttggatcctgaagaacgaaaaaaaaaaaaaaa

SEQ ID NO: 3030 - DNA, 360 bp, Homo sapiens
  misc_feature (160)..(160): n is a, c, g, or t
  misc_feature (269)..(269): n is a, c, g, or t
  misc_feature (275)..(275): n is a, c, g, or t
tttttttttttttttaagacggagtctcgctctgtcacccaggctagagtgcagtggtgcgatcttggctcactgcaacctccgacttccgggttcacaccattctcctgactcagcctcccgagtagctgggactacagctgcccaccaccacgcccgngctaattttttatatttttagtagaggtggggtttcacagtgttagccaggatggtcgcgacctcctgacctcatgatctggctgccttggcctcccaaagtgctgggnattacnaggcgtgagccaccgcgcccagccaatttttatatttttttaatagagatagggtctcaccatggttacccaggcctgtgtctgg

SEQ ID NO: 3031 - DNA, 731 bp, Homo sapiens
tttttttttttttttaggttagcacatctcagttgttctcttttatttttattctgcctcaatatcattcacaaacacaacataaccccatcatttacatctctcattttctataatgattcttggaagggataaacataatcctagaagaaaagtgtttacggtttcaaaatgtaccccagatcacaatttaggttacggcaagttcgccaaataggggcatataagctctacttctcccaatttagtaaagacatacactagggaatttctggtttgaactagagtccatttggaaaagttatcagaaattaatttgtctctttgatatcttatcttctcagcaaagtattactggtatgacaccatcaaggagagctttctttatccttagtcttggaacaggcccccagttatgctcccatatttccctctactactattacaacatacatcattcttttcttgcttctaccatttaatgtctgctatcaactaattttaaactgtaagagttgtagaataaaggaagtaaaatggtatctatgcagataactgggcaggaaagctttcaggcactggaagaaagtattaccttgaaaggttaaatacctgttatgttcaagggaataaaaacatggttgtgttgctggagtgaataagaaaagaaggcaagcatgagatcagagaggtatgtagagtcgcaacatgtagagtccacaggtgttgta

SEQ ID NO: 3032 - DNA, 148 bp, Homo sapiens
tttttttttttttttttttttttttgaattttaatatgatattttattatgggtgtctgtaaggaaacaaaaaggcgagcggccgcggccgctcgatcccgggaattccggaccggtaccagcctgctttttgtgtacaacacttgtg

SEQ ID NO: 3033 - DNA, 703 bp, Homo sapiens
tttttttttttttttttttttttttttttttttttttttttgctgccaaaagcctttaatatgccctggtcccaggctgtgttcatgaaagcggacacagcagtgcttccagcttcatggttcccaggttcaggttcctcccagcggaggtgggagggcagccctcacacctggcacccctgagtgccatactcctggaggaagtcgttgagctgggcacaggctgcccgctggcgggtgctccggcacaggcgttcagagggcatctcctcgatccagctattcgagtccagcaggtactgggggtgtccctcgaggtcataggtggccccatctagacccatgatcaaatattctttcccaggttccaagcgaaggcggcaggaggctcgaaccaggaagttgcgcatctgattagcagcggccttgacatccttggtgaagtgcaggacttgggtgatcttggtctcaaagaggcggaaagcagctctgctgtcttctcggagaaccttaacctggaagccgtactccacacgggggtagtagcaggcaaacttcatcctgtagccatcctcgtcctgcagaccccgcctccagggcgcgacgctggcgagggcacttcccctcagaacacgtggcagacttcagcagaacacaaggtggccaagagtctgtcttacttggtgccccgaaaaaccaggac

SEQ ID NO: 3034 - DNA, 703 bp, Homo sapiens; identical to SEQ ID NO: 3033

SEQ ID NO: 3035 - DNA, 668 bp, Homo sapiens
gaaacatccatgctgtgcttggcggggctgcgtttccccgtggcacagagctcccaggaagggctctcctgccctctcgtggcggcctcggggcagtggcctgtgggggccgccagcccctccttcgctgtgtgagccgctggtcacagaagactgcggtgcagggaaaggggccacttcctgatactcagggacagattttcttctcttgaggaaagcctcataagacctcttccgggtcattcctgattaggactttaatccaggggtcaaccaaagactccccaacctgaaggaggctgcccaggcagggagaagaaaggtcagagcccacggagaggcagaggggcgccagcctggagtgccccctgctgcggcgcccggcacgtggctcgcctgctctcccgcctctgtcacctgggaagaaacggtgggcagggggagcagggggagcgcgcccggggcctgaagcaaggccgggccttcgccatggacaagtgacttgggcctgctggagacagggcatggaccgtggcctctaggtgagcacagtactgcccgtaggacccgggtctgtggaccccggctgtgaaagccactgagcccagcagagctccacctgagtcctcaacatagagccagtggggtccaagcaggcctggcctgag

SEQ ID NO: 3036 - DNA, 657 bp, Homo sapiens
tttttttttttttttcgaaccttgtggttttttatttgacggggcagatggagtcagtacacaataaataacatgaatataggaactgcgccgtatcgcggctggcggggtggggcaagacattggccagacctttagtctgcagcaggacagaaggacagccggacccctgatcttgaggcaactggcgacccgcggctgggaaccggggctaactcttccctcagagttccacgcgcgcatcgcggaaggcccggtccagagcccactcgggactgtgagtcggatgcccccttctcgggcaaggcgggccatctcctgttggaacagcgcttgccgacgctcggctggaggtccacattaatccagttgtaggcaatccactatggtgccgcagcgtgaccaggcagcaccccgtgcagcgagtagtcgtctacgtcaaccagcacaacacttgacccatcaggcaggtagttgtaccagaagactgcagtgcaccatgtggggcttgacacgcaggtttcccttgtcacagagcctccgtgtgtcacggaggtccacgtcatacctgaatcagactcataacatcgtaagacctgttatcctgctacaggcaaaacaagtctcgcaccaacagtgaccgtacaagataaaaac

SEQ ID NO: 3037 - DNA, 716 bp, Homo sapiens
  misc_feature (176)..(176): n is a, c, g, or t
ttttttttttttttttttttttttttttttgggtgctcatcttcgctcgtttaatttcagtcagatattaaacatttacaatttttttatataacaaaacaagaacatgcaaagttacaaatatagaaaatataaagtacatgcatatttcaaagacctgttaatggtgtccactntggattcttacatgaaacgattcagtgcacattgtaagcctaaggaccacgcaaaagggtttcccacatattaagtattcagtaccttacaaaagttaatgcattagacacttcagatgttaactgctctaaacaaaactcctaagtctgtcctatgcaatatatattttatatacatatatttttacatagaatactcacaaagtgcaagccaataataacattgcagaaaagtaatacatatctgctaggtgacaatatcaaacaattcagggaataattttactttaattaaccattaacagaatttctttttccacttcaaatcaatcatatttctgtcatctccaacctaagatattttcagatggtctccctattctttgattcaaaagccaattacagaaactatgaacttgacctaattctggttttgacaattatgagacacgaaatacagaatgcaagcagttcttttctttggcacactgaccattttaattacatcatcctctatgatgatggtgctttcacaactgc

SEQ ID NO: 3038 - DNA, 716 bp, Homo sapiens; identical to SEQ ID NO: 3037
  misc_feature (176)..(176): n is a, c, g, or t

SEQ ID NO: 3039 - DNA, 587 bp, Homo sapiens
ttttttttttttttttttttttgaactggtacaaagtttactaggtcatacgacacggctcacaaagcggtgggaaattccagtgatggcatgtttgttggttggttccttttatccaaatggagacaagacacatttccgcaggactgtccaccatccccccacgagacaaacagaatgcaagactgtcacacgcggctaggactggttccacggacacacgatatgtggcattgacacaccacgatgcgatgccaggccacagatgggtgccaggaggggaggaagcagctaatgctatgcccacactcgaccttacaggcagtgcccccgggatgggaggcccgtgcagtgtctgctggtgataatacatttcacacagggagggggaaccccaaggatggagattaggaggcccagaaggcctgtcaggtggtgtgatttatccatctacagaacaataaataactctgtaggatgaatgcatacatcagaaatggatgccactaacactaacacacgatgggggaccagagtcaaaatcaaaccatgcaaagtggcagggcaagtgaggagggatacgagtg

SEQ ID NO: 3040 - DNA, 587 bp, Homo sapiens; identical to SEQ ID NO: 3039

SEQ ID NO: 3041 - DNA, 697 bp, Homo sapiens
catccacctgtttgacttccatagaagacaccgggaccgatccagctcggaactctagcttagtccgcggacggataacatttcacacaggaacagctatgaccattaggcctatctaggtgacactatagaacaagtttgtacaaaaaagcaggctggtaccggtccggaattcccgggatatcttcttcatcagcactaccataaccagtttgcgagtcaaatggcatttcctaacggcaggcatggcggcgcctgaaagacaaacagctccctttctgcttcggacaccactcaaacatttagacgcagctctatcccttttcctagctagagaaggtgatgccttcttccattactcagagatgttgagacgttttcagaatttcttgttgaaatgaaaaacatcaagataaaggacgcctttcaggcattagctaaacttccacttcataactttcggcgagacatggtgagcctcctggtgtagagttcttttgtctttgtatggaatgactttttgctgtgatggttttgaatgttgggtttctgctgtctgcttagtacccatgcctgaattttttgagattgtaaatatcaaaggagttagattgtgttctgacatggttgtagactttcacctggattattgatattctacttctaataaatttttaataggcaaaaaaaaaaaaaa

SEQ ID NO: 3042 - DNA, 732 bp, Homo sapiens
  misc_feature (562)..(562): n is a, c, g, or t
tttttttttttttttgaaaatgtactaaaatttaatcatccataaaagctgtaatttaatctgacagtaaaacacaagaagcaatattagagttggtttagtatattatatattttagctttgaaagccatagaaatcagttatcccagtttttttcctataaaagacccatttttccaaagcattatgcacaattttaattagaatataatgacagatgatattccataattttttaaatataaaatgaagtcaatgactcaaaaaagttatctgctgcaatgagtttgaggggacatttcataatcagtatcattacagatataaagtataatggttcaactttttagtgcttgatagggaggatcatgataaaaagatcaatatgaaatcatttgattatagtagcaatatctaacatttgaaatgcatccatgctctttgtataatcatattagagtcaagtatattttcacatctgttataactgctattgcaaaggagaaatactatcgtcttattttccaagagatatacacagagcaatttttttctccagggnaacttgtgcaaaccaatataagatctaaattcttcacataatatataaaacaggagaagcctcttcagatttatctctgaggtctggaatgctggccactttccaattaggccacagttcttcattcctgttaatctggctcagagctgctgtgactatggggcctagag

SEQ ID NO: 3043 - DNA, 732 bp, Homo sapiens; identical to SEQ ID NO: 3042
  misc_feature (562)..(562): n is a, c, g, or t

SEQ ID NO: 3044 - DNA, 689 bp, Homo sapiens
ttttttttttttttttcccaatagcactttcattgccagtgtctttctttggtgcctttcctgttcagcattcttagcctgtggcagtaaagagaaactttgtgctacatgacgacaaagctgctaaatctcctatttttttaaaatcactaacattatattgcaatgaaggaaataaaaaagtctctatttaaattcttttttaaattttcttcagttggtgtgtttttgggatgtcttatttttagatggttacactgttagaacactattttcagaatctgaatgtaatttgtgtaataaagtgttttcagagcaaaaaaaaaaaaaaaaaaaaacaaagggcggccatcccgggaattccggaccggtaccagcctgcttttttgtacaaacttgttctatagtgtcacctaaataggcctaatggtcatagctgtttcctgtgtgaaattgttatccgtcccgcggcctaggctaagtccggaggctggatcggctcccggtgtcttctatggaggtcaaaacagcgtggataggcgtctccaggcgatctgacggtcactaacgagctctgcttatatagacctcccaccgtacacgcctaccgccatttgcgtcatggggcggagttgttacaacattggaaagtcccgtcgatttaggtgcaaaacaactcccttgacgtc

SEQ ID NO: 3045 - DNA, 171 bp, Homo sapiens
aggtcgactggatctccatttaagtgattttcagccaatgcttaatgatatgtacactttcatatgtggattaatttataatcttcatatctcaatggtttagcatcctccatggctaatttattttctgagccacttaacaaagttggcaatacactttctggtttatct

SEQ ID NO: 3046 - DNA, 754 bp, Homo sapiens
gccagtacgccccctatgacgtcaatgcgggtaaaatggccgcctggcattatgccccagtacatgacttatgggactttccctacttgccagtacattctacgtattaagtcatcgctattaccatggtgatcggttttggcagtacatcaatgggcgtggatagcggtttgactcacggggatttccaagtctccaccccattgacgtcaatgggagtttgttttggcaccaaatcaacgggactttccaaatgtcgtaacaactccgccccattgacgcaaatgggcggtaggcgtgtacggtgggaggtctatataagcagagctcgtttagtgaaccgtcagatcgcctggagacgccatccacgctgttttgacctccatagaagacaccgggaccgatccagcctccggactctagcctaggccgcgggacggataacaatttcacacaggaaacagctatgacccattaggcctatttaggtgacactatagaacaagtttgtacaaaaagcaggctggtaccggtccggaattcccgggatggccgctaaatagctcacgttaggcatgaaacaggacaacacaaggtaagtgctgtgaggggagcatgaaaagaatggttcaccgaagtgactctatgacccagtttaggagcaccttggaagattgagaagatgttagaaatgattgtgtttttcatattgcattgcattaaaaaaatctcaattctaaaaaaaaaaaaaaaa

SEQ ID NO: 3047 - DNA, 711 bp, Homo sapiens
tccaagttccaccccttgacgtcaatggagtttgtttggcaccaaatcaaggggactttccaaatgtcgtaacaactccgccccattgacgcaaaatggcggtaggcgtgtacggtgggaggtctatataagcagagctcgtttagtgaaccgtcagatcgcctggagacgccatccacgctgttttgacctccatagaagacaccgggaccgatccagcctccggactctagcctaggccgccgggacggataacaatttcacacaggaaacagctatgaccattaggcctatttaggtgacactatagaacaagtttgtacaaaaaagcaggctggtaccggtccggaattcccgggatgtggggaaaaaaggaaaaggaaatggaaaaggtgtttcagagcttttactttaagctattctagtgtccccttctctgctttctttccactaccctgacccatacctacccacagtgagaactgagcccgcagggcagctcagaagctgggaggagagaaagagtgagaatctgagttatttttcctcagtgatcttaaaagctccaggcagaaaagaccctgcctatagaacctcccttttgcatttctcaattgcatcggagaaactcctaaattgcatcagtgatcctgaagctgttaaagtaaagaattttctgtagaagaaagaaaagagaaaaaaaaaaaaaaa

SEQ ID NO: 3048 - DNA, 775 bp, Homo sapiens
  misc_feature (609)..(609): n is a, c, g, or t
tttttttttttttttaatgttaatcatgaacctaccaaataacccatgcattccacatctaggtattcaaccaaacaaaccaaaatgtagacatgaatgtttatagtggctttatagatgccataacctggaagtaacacaaatgcccactaatagggtgaatggatgaaaaaattttggtgtagctatgtgttaaaatcctactcagcaaaataataataataataataataataataatattaaatacaataaacatgggtaattcttaagatcattatactaagtaagaactgaattgtatgtaatataaataagacaacatactacatcaccagtacagtctatagacctctaaagattgaaaagttgtttttaaatatttgaaaaaccaatcaacgtaattcgacatactattaataacaagggaaaaaaaacgagttaaaacgagttaagttaaaatgagtgcacccagtataattccatttgtaaaagtcccagaaaagctacagtgataaaaagctacttcatgactgtctggggttaggatggaagaaggaatgaattaaaaaagatgataaggaatctcttgggtgagatggcaatgtntattttcttgattatgatgatggtttcacagctgtatacataagtcacaactgatcaatggtatacttttaatatttgcagtattgtgatcaattgtacctcataatttgaaacaactccagaccagaactaatgctctagacgggtcagtgctccaggaggtccc

SEQ ID NO: 3049 - DNA, 93 bp, Homo sapiens
ggagtatgagtcttctgtaattcattgagcagttagctcatttgagataaagtcaaatgccaaacactagctctgtattaatccccatcatta

SEQ ID NO: 3050 - DNA, 335 bp, Homo sapiens
ttttttttttttttttggagaccagtttcgctcttgttgcccaggctggagtgcagtggcgtgatcttggctcactgcaacctccgcctaagaatgtggaggtttctaacagttttatatgagaaataaatattgggctaggagtgcttatttttggtgggatagaagatggtccttgttaattaggaaaagagaaggggtaatacaaagtcagaaaatccccaagtcttttgtatttaacatgaaatggaatctggcaaattacagtcccagagcagttcttatctggagttgatccccagggaggttcatgactcaaagtttaattgatcttc

SEQ ID NO: 3051 - DNA, 623 bp, Homo sapiens
tttttttttttttttttttttttttttttaatacaaaggtttttaataaaaaagtcaaagtctacattaaatcaggaaattgataaatctgaattatacaagctttctatatacttagaaaaaccaaaaacacacggtttataataaaactcttttaattcaaaatagagtctaatttaaagaaaatgtcattatgcccagttgactagatagggttttgtcatttaaattaaattattcacctgaaatatgggaaaatatataatagagaaaattcaatctcaagggtactttgcaaattatctagttaatttgcatcatgaatcaaattcttagcttctaaagggcagacacagtctttaacttgcttttagataggcacttaagcaaatgcttttgactgaggagaaaaccccaaagattgtgaactcactctattaactccagggcaagaatgagactctcaacaaagtagctttccagaactacccttccagtgccaagaaagtaaaacatatttgcaagctcttactggtaataagaatgagggaactcaaaacacaaaatgccctattaatgcacttaaaaagtaaacttaggtaaatccagataactatagaatc

SEQ ID NO: 3052 - DNA, 577 bp, Homo sapiens
ttttttttttttttttttttttttttgccttaacaaaaataatttattccacacacctcccaaggcagggggtagcgtgggaatcaagcatgtgtaaggcactgcccccgccagacccttctaacttctgcacactggaaggtgaaacctggagagagaagacactcccctccctagcttctacctggcaccctccaaagatgagcattcatcttggagaccaaaataaaaaaggacaaaagaccaggctcagagggagcagagctcaatggggggaagtgaaagcagccatcttctcctgcagctaagccagggcaaggcactagagacccacatccttcccatgccaccaactcgtcaggtcccaccaagcaagccactcaccctacagcccagcaaccatggcttgcctcacctgggagaccagcacgaattccagaagcttccaaaccccacctgaagcacaaacccaccaggaggtctgaggagctggaggctggacagagcatagagggcccggaggtggtaccttacatcccagggatgcaaaggcttcgttcatgtaccggaagggagc

SEQ ID NO: 3053 - DNA, 711 bp, Homo sapiens
tttttttttttttttttgaatctatgtatatatattttacatttttcaacatttgtgttttattccattaacataaccatttacagttattccagaaatttcagtcatacacagtgctcttgaatccaaagagtggtctagtgtgttggcattttcatcaagtacagtcctagaaaatgtcaagttgaacaataagatattgaggcacattggtcactgtgtattctgaattctttagtatggtcagaggaagtagttaatatatttcatgttgattctttggctactcttgatttttgctttgggtaacatcctcatcctgggaacattcattaccacttaatagcaagataacattaaaaaaaaatccttcattgccacatttaatagcatgtttaaaaaggcagaggttgcaatgagctgagaacgcactactgcactccagcctgggtgacagagtgagacactgtctccaaaaaaaaaatgtttaaaatgagaccaaaccctcatggagacatttctctgttctattagaaacgcaatggcattctcatagatcctctttctttttatgatcacttgtctaaccagagctgctatgtcaggcctgatgactttcaatgggctcctctggcctcccagaacttcacaaattgaacctcaggttggcagatacttccaaaattcccacctgggtccttctttgagaat

SEQ ID NO: 3054 - DNA, 702 bp, Homo sapiens
tttttttttttttttattgtttcgagttttattttttaaaaaattacacttgaggtaaggaaaaaaatacagtaaaattagattttagagattaaccaaaatccaaactatacaacttaattcatgactaattcaatcacagtttgtaacaaaaggaacagaacatttttaccttcaaattcagtgtaaacaataatttatcacatttaaaagaaggctgccaataagcagaactcagcaatttcttgacttaattgacaagcctaggaattctaaaaagtcattaaaaattttaaaacctgtaaaaattattttatctatttcaatccatatatcatttcattcagaatattctttttgacaatcagtggaattcattacatactaaaaataacaccatatttatgcacaaataaattaatttttccatcgtaaagagctaatcttcctttaagaagacttccccacatattcacaatacataatatcacagaacacccatattggcctaaatgcctctgaattgtagcattacaagatggaagttcattgtgcctaataatttgattgagtttgtccaaatgtcttccagagttggctgttacaaatagtgtgttctatgtgtccatcttgctctataaagtgagtgtaaacttagtgcctttaactatcttgcaatttttttagaccaaagggcaaacg

SEQ ID NO: 3055 - DNA, 706 bp, Homo sapiens
tttttttttttttttgtacagacagggtctcactatgttgctcaggctggtcttgaactcctggcctcaagtgaacttctcaccttggcttcccaaagtgctgatattataggcataagccaccgtgcctggcccacaaatgaaatattttaaaagaaaaatctaagcatagcctctggtttacatgaagacatctgttaaatcccactctttaacacatgtttcatctgtaagttggctctctttgtatagctgcttctctgatcttttggtatgcttctggatttcctttttctttttcctatgactatattctgcaccaacatgtatttattgagtcaggtactatgctaggcactgggagagggtgggggataggttcataggtgagcaagtcaagatcctttgacttcaaagatcttaaaatcaagtccagagatggagcaaggagggggagggacacggatgtcttcaaattcttatacatcattgtgccttttgcattcctttactactttacgtcccacttgtatatacaatagataatcattattcaagacagaatcttgactctgtcgctaggcggagtgcagggtgcgatctcggttcactgcaacctctgctcccaggttcaagcgattctcctgcctcagactcctgagtagctggactacaggcaaccgccaacatgcccagataattagat

SEQ ID NO: 3056 - DNA, 625 bp, Homo sapiens
tgttggatgtgcctctccgccagctcacagtacacatcgtccttcagcaggctcatcatgaggcggtagtagccttccgaggcatgaggggctgagatgacccatactctgttcttccctgcaaagctggcaaggatgttgggagagctggaccccgaagggaaacgcaacattcttgaccgagctgaggacccctcatctctgatcatctcacgcggagagcccctggctgctggtctttgctcaggtctcacggcggccccattgatgtccgagcgggctggcggctctgttgggcgagctagtctcaacacgggcacactcctccttctctggagaggctgaaggtttggttcctccagagtggatctctcaattccgcgagacctcccagtgtgcctcagaaaccgagctggcctactgctgtccggagaaaccaaaggcactttccgtcctccgtggctgcctctaatagtggcatgggggtggggttctgatccacacactagccacatggccaacagcatagtgaaacggggtcccattctccatgtcattgtgtaatccaatggtggctcatagagatggaatgcagagggttgcaaagaaatcagaagttacggtt

SEQ ID NO: 3057 - DNA, 706 bp, Homo sapiens
ttttttttttttttttttttttaagtgatttttctcccctttattaaaaaaagattatacaatttgggctcatattaaaaaattcaaacagtagaacagtgtgtacgtagaaggcattccccactcccactccaggagtttgggtatcattctagaagtgttctgtcaatacataagcatttttcattcaaacacacacacacacacacacacacacacacacacacacacacacacgggatcccatattctataatttttgtgttttaaaaaaccaccatatttcatagatatctttccacttaagcacattcggagctccatcatttattttattttttgagacagagttttgctcttgttgcccaggctggagtgcaatggcgctatctcacctcactgcaacctctgcctcccgggttcaagcaattctcctgcctcggcctcccaagtagctgggattacaggcatgcaccaccatgcccagctaatttagtattcttagtagagacagggtttctccatattggtcaggcttggtctcaaactcccgatctcaggtgatctgcccgactcagcctcccaaagtgctgggattacaggcgagagccacgcgccagcacggtcttttcaaagaccagattatttattacaccaactgtctaagatggccttgtgaattgatcacctatgtactatgtacatt

SEQ ID NO: 3058 - DNA, 714 bp, Homo sapiens
gtggtacaactcggccccatttgacgcaatggcggtaggcgtgttacggtgggaggtctatataagcagagctcgttttagtgaaccgtcaggttcgcctggagacgccatccacgctgttttgacctccatagcagacccggaccgatccagcctccggactctagcctaggccgcgggacggataacaatttcacacaggaaacagctatgaccacttaggcctatttaggtgacactatagaacaagtttgtacaaaaaagcaggctggtaccggtccggaattcccgggatcgagcggccggagcctgggcaacaagagcaaaagtccatatcaataaaaaatataccaacaaaaaaaaaaagcttagttacatataacccagcaaatctgtacttattataaacaataacttcccgtttccttttgtcctgacacccaccattctactttctgtctctatgatccgtgactaccctatctcatataagtggaatcattcagtatttgtccttttgtgactggcttatttcactgagtataatgttctcacagttcatccatgttatagcatgtgtcagaatttcttaaggctaatattccattgtatgcatgtgccacatttcgctttcagtagtcatttttaagctctataaaataaaatgaagaaaggacagttcacaatctagtaatagcaaaaaaaaaaaaaaaa

SEQ ID NO: 3059 - DNA, 727 bp, Homo sapiens
  misc_feature (598)..(598): n is a, c, g, or t
ttttttttttttttttttttttttttttttttttttttttttttttcttttaagcactgtattttttatttcttcattatagcacattaccctaatgtaatattcataagactggcatagatttgaaacttacctatctcccacctagaaatgggaagagcctaaagatatgggtcataagaaacaaaaaaagggctggattagggcactccttaggggaaggtagactcacatgggccactgaaataaaggaacctgggtggtcagctagggggcaggataaagttttttgacatctggagggggcaagaggatgaaccaatgaagatacttcatgtactttaaaattttggtgggaccaatcagttacagtaattcaaagaaaggtagtaagggaaggagaaatggagaagaggcagattatcagggtaaatgatggtaaaaattaatgagagactgcattatgatgtttaacaacaaaaacagaaccaaaaaagagagccaaaaccaattcaaggcatcagagcctgggcaaatatgaatcaggaaactgtgaaagttcaaagttagggcaatcctagctgaagaggatactganagctggtctttcccacattaactgtaaactgtggtagtacattcaacgtagatatgtccttatgccaattaagatggatgatgaacgggtgtttgacaacaaagcgagagattaggtggggaattaaac

SEQ ID NO: 3060 - DNA, 695 bp, Homo sapiens
ttttttttttttttttttttttttttttttttccggggcgagatgtttgtctttaaggtagggccaatggattggcaccacccagctggcccctgacctttcctcctcctccccgacaccatggagctggggaaggctcctgatttgggattcgattacaatggggcctggacaggagctagcccagtggccagggcatggggtctcttcctagtgctgctgggtgaatcaactgttcccaagagggagggggaaagatgggtgatccctcacctcccctggggttaacgctgggagaaagtgctggaagctggcttctggtctgtgaccacccttcttgggacctcagtttctccatccgaaacctgggggagtcattcctctaacaaagagtgtgtgaagatccagtgagtacccggctctgaagatggtcaacttggagtaggggctaggtcagtggcggctgagtctgactccagaccctaccaaggcttgaggggctgctactggcagcagcccagggtatatcttgtcatctgtcctccatcagccatggactgacagggtggcagtctgcttgacgtgttgcaggttgggctctcggggagtgaactctgaggtggggtctggaatgcaggatttcgattacagagcacttcagaatcaacatttgtgaggggagaagagccgacacg

SEQ ID NO: 3061 - DNA, 721 bp, Homo sapiens
ttttttttttttttttgcaaagttaacatttttattgaactgaaattggtgtagaacaggggcaaccacagctgctgagctctgtaacaactgaaaagcccctgtgacattttacctttgagagtcctaacacggtttgagtggaacagctgagaaacagcatatatatattttaacacctcaaaatagtttgaaatgagcctcacagccttgttcaatcttcagattacaaataacattgatagcatctcctgtggccttcagttagtagtgccagttaatattgtttctgaaaactttcctctcaaagtgctggctataattttttctccatccagtacacataagaaaaggatttagtaacacttgggcaagtaataaactgtagaactttaaaagtagtaaaggcatataccaagcatacgtgactccacacattgtcagaaaggcagtggactggctaacgagtttctgccaagtttcagaagcaaagaatgcactaatgaaaacgggtaaggcatccaagcagagtgtctgaaattgatggaccacttttgtctaaaactaatttcaacatcttccaatatgcaagcaggcattgtgttttacataaggtgaaacactttatacagagaaaagaaaactcctataaagcttataagatcagaaaaaattatactgaatttttattatcaatgcatggagcaatgatataactgag

SEQ ID NO: 3062 - DNA, 720 bp, Homo sapiens
cgtcaaggacggtaaatgggccgcctggccattatggcccagtacaagaccttaagggaacttcctacttggccagtacatctacgtattagtcatcgctattaccatggtgatgcgcttttgcagtacatcaatgggcgtggatagcggtttgactcacggggatttccaagtctccaccccattgacgtcaatgggagtttgttttggcaccaaaatcaacgggactttccaaaatgtcgtaacaactccgccccattgacgcaaatgggcggtaggcgtgtacggtgggaggtctatataagcagagctcgtttagtgaaccgtcagatcgcctggagacgccatccacgctgttttgacctccatagaagacaccgggaccgatccagcctccggactctagcctaggccgcgggacggataacaatttcacacaggaaacagctatgaccattaggcctatttaggtgacactatagaacaagtttgtacaaaaaagcaggctggtaccggtccggaattcccgggatgggaaagaagaccctgttgagcttgactctagtttgacattgtgaagagacatagagggtgtagaataagtgggagcttcggcgccagtgaaataccactacctttatagtttctttacttattcaatgaagcggagctggaattcattttccacgttctagcattcaaggtcccattcggggctga

SEQ ID NO: 3063 - DNA, 682 bp, Homo sapiens
tttttttttttttttgatgcttgataaatgtttattggataaacgagcgaaggataatcacctgagcaccatagttgccaaagccccctctagtcccaaacctaagcccacactctgtccccttgcaagtaaagaaatgcaccaagcagggcttatgcagcagccctcggtctggcctggctggagctataaacatgcatgctccgaaaagccgcctcgcggaaggtattcctttaactgcaggtgtttgttgcccttggcacagcaatatgtaatttcccatttttagaacaatgctccaaagaacggtcacaaaaacaaccttaagagggggtggttttcttcctggccgcttctacagtcctgcatttggggtggagactgaaactgccccggcttggctgctggcttccttctgttggtcctggtcttggcattccagtgctgatggctgtggtgtgttcagaaccacttcagagctgcaggagctgaagacttcacgggtccaggtctggccaggctcgggagagcggtcccccttgcggtgcagcttcaggcccaccgtgtggtgccccatggtgttcagcagctgggtcacctcaccgactgcggttgtcaagtagatggtggcaccacaatctggtcccctccttgaccacccagtgcggccgcaggagtctgc

SEQ ID NO: 3064 - DNA, 682 bp, Homo sapiens; identical to SEQ ID NO: 3063

SEQ ID NO: 3065 - DNA, 629 bp, Homo sapiens
tttttttttttttttctttctgtcttaaaggtacttttttattgtctactgtcatatattttttcctataagaaatcagtcataattatttacctttaaacaaggtttcttttctcacttgtggcatgcagagtactaaaattcttccttgcccctgaaatttgccatatttattctcaggactgtgaatatgatgagatatcatgccctgactttgttacattacagggcaaaagatattagtaatcttgatgatggttactaatcagttgaccttaagttaatcaatctggggattgtctgggtaagccaaatgtaaacatgtggaagaggaagtcagagagattcagtgtgagaaggagttgatgtgccattgttggtattgactatggaagggaccacatgaacaagaaatagtggtaatttctaggatcagagagcagcctctgaatgacaggccaaaaggaaacaagaatctcagacatgcaaccacaagggactggattctgccaaaaaacctgaataaacttggacacagaattattccccaagaacttccagataaaatctcagttctgccaataacttgattttgacctcttgagaccgtcagtagtgaacgcagctga

SEQ ID NO: 3066 - DNA, 707 bp, Homo sapiens
tttttttttttttttggcatttccagtaatagtttattgatttccaaatgcacagggggcaccaagtccgaacatcctgggatagcagtaaatctctcttacaaaataatttacagtatgaaaatgatatactgaaacattaacccaaacgtgtaattcccttgaaagattcagtgttcccttgtttaatgtaaagggtggaaggggaagattcctaaggagggaatgtgactgtgcacaggaaaataggcagaggacaatggattcattggttctccccattcatgcagtgtggcctgtcactgtagaaagactggtcaggtttaaccctcattaagtattaatctgctgtcccctcaaagtcatatcaagcccagtatgggctccgtggcttttattgcaccaatgtatccataagtgtctccacttattttcatttttctgctctggccctcgttctgctgtttctggtatgttctcagttccaaattatactatcttatcttaccaggcaggcctccagaatcaagaactgcctgagtcttatggtttctggaatgggacaggctagcggggcttcataagcactgctggataaaggcaataataatgagactgaagtctcccatatgggccttcttagctcttagagctgggctggactcaatccataatgagatttttaaacaataaacatcctgatgctg

SEQ ID NO: 3067 - DNA, 753 bp, Homo sapiens
cgagaatcggcttgagcccaggagttcaaaccaacctgggcaacatggcaagaccacatctctacaggatacattatccaggcatggtggcacatgcctatagtccccgcgacttgggaggttgaggaggatgccttgaggccaggagttcaaggctgcagcgagccacgatcgcgccactgcactccagcctaggcgacaaagcgagactctctaaagcaaattcgaagcagagttaagttgtctttcttcctaacaacctgcccccaccatggggtgcgaatgggactcctggagtcctcctgcacctccccttggagaccaccaagctctaggaaccccatcaccctcagctgagggtcacatgcagcaactagcaggcgggaatctgtttgcattttggccttaaagcaaataaataataggccaggcgcggtggctcatgcctgtaatcccagcactttgggaggctgaggcaggtggatcacctgaggtcaggtacgatgtgagagtaccaagcctgcaccgaactcataggatggatacacacacccctgtcttctcactaaatactacaaaatattagtctaggctatggtcgtggggcacctgtaatcccaactacccaggaggctgaggcaggagaattgcttgaacctggaaggcagaggttgcagtgagccgagaataacaccactgcactccagcctgggtgacagagcgagactccatctcaaaaaaaaaaaaaaaaaa

SEQ ID NO: 3068 - DNA, 768 bp, Homo sapiens
ttttttttttttttttatttcattttttacatttaaatccttgctttatcgggattttgacagagtaattaaatccaatttggtttcccatatatttgtccagtttgtccaacactatttatttgagtacatcagtcatctctctactaatttcaacgttgctacctttatcatatttcaaactgctcatttaatttgtgtccatttctagactctattctggactgctgatgggcctgttgataggccagagctcagttattttaattatgtaactttatgatgcacttatctgtgtagcaggactccccctcatctccattacttaagagccaataatgggaagctcattttcacaaatgcagtcaaccaggggaattcatggcatggcctaagatctaaacactcttaagatttaaacacaggattagctcttgagttagacaggaagctggggtgttgggactgaggcttcatcgtggcagctaataatgtcagggagcatgagcacttgtttcttccaaggctcacttcaaggaaggcagaatccaggtcgggggtgcacaggagttgccagcatggacccaaggaccatacacgtatacatgtatgatcatacttgtcagggccatcctggacaaaacttgaataagctaactcaatagagaaacaaaagagacaaataggcctaattccagaatttttaggaaacccgcataagaacatactctagaacttgtagaccagccctcctccatacaacacaaa

SEQ ID NO: 3069 - DNA, 719 bp, Homo sapiens
caggacatgaccttatgggacttcctaactggcagtacatctacgtattagtcatcgctattaccatggtgatcggttttgccagtacatcaatgggcgtggataacggtttgactcacggggatttccaagtctccaccccattgacgtcaatgggagttttgttttggcaccaaaatcaacgggactttccaaaatgtcgtaacaactccgccccattgacgcaaatgggcggtaggcgtgtacggtgggaggtctatataagcagagctcgtttagtgaaccgtcagatcgcctggagacgccatccacgctgttttgacctccatagaagacaccgggaccgatccagcctccggactctagcctaggccgcgggacggataacaatttcacacaggaaacagctatgaccattaggcctatttaggtgacactatagaacaagtttgtacaaaaaagcaggctggtaccggtccggaattcccgggatcgcgagcggccggccgccctttttttttttttttttttttattttggccgctcgcggcggcatgttctggctgcgcttctaggcgggaagcctatgtaagcaagagggcagggccggggtttgtggtcccccccccaccacaaacacagcacttcggctcctctaacctgtgccacaggtgaccaccaataaaatcctctgctgagaaaaaaaaaaaaaaaaaaaa

SEQ ID NO: 3070 - DNA, 736 bp, Homo sapiens
tttttttttttttttttttttttttttttttgaagaacaaaaaacagctttattgcttatacatgaccaagaaaaggaaaacatggcaaaaaaaaaaaaaaaaggcaagatgtgtattccttgcgaaagaacaagcctgctaatttgggaggaagggaaggtcaggacccaaatagagccaatttcctggagatggcctgttctactggcacattttcctgagtctgtgcttaaaacctttcaggtactttcagggcacagaaacaatgcatgctaaaaaatatatggccaaagctccttccaacaaagatttaacttgctccaggaacaaaataattgctttaggttaagaggtagtaattagagactattcttctccctttagaacccccactaatcccaaaaataaaaatacacaccatggaacactgacaattgagtaccaaagtattaaaatttaaaataaatatcccaaaaggtagcacctgctcatagttaagggatagggcacctctgtccaaccatgtattttaagaccaagcactttattagaaatctgtcccgtaaagagaacaaatttagcagttagaactaaaaataccaactcatggaatgtcatcatagttgtatctactgctggtgtcttatactgtcatgctactgtgaagtattccgtattacacatcaggaaagtaggccaggaaggttgaacttactgctctgggctctcatacca

SEQ ID NO: 3071 - DNA, 729 bp, Homo sapiens
tttttttttttttttttttttttttttttttttttttttgttactaacgtttctatttattcattaataaaaagtgcatagtacaagccctttatcccaatccaagtactcagaaaaagattaacaacagaccctggatggcacagacataatttgtttggcgtgatttaaacatataaaatcagtaattaacatttagcatatcacacgaccacttttgcttttaacaaactaatcttcacacatggtaacaaatacctatgatttttcatttagaaatattataagaagactaaacttactattgcaacaacaaaaatttaacccattaaactagaaactctcttcatttttccttcttcaaattactgtttggtgtcttaaactgagttggtcaaatttgagcacataattcatgtagagtgacagactttcatttagagtgatagacttccaaggttcctttgaaaatttaagatactggtaattccataaacactcccacaccacataccacaaaaacactaaaagtagccatagaatagctgtattcaataattatctggaaaatccacattatgaaatatgacttgctgacatggcacagtgcttggatagataactgaaacaatgaaaacatcttaaaaaacaacacagagacggaattcaatcttgtggccagctggatgcaaggcgtgactggtcaatgaactcactcccagtaaatga

SEQ ID NO: 3072 - DNA, 788 bp, Homo sapiens
tttttttttttttgagacgaagtcttgctctgaagcgcaggctggagtgcagtggcgcaatctcggctcactgcaacctccacctcctgggttcaagcgattcttctgtctcagccttctgaatagctgagactacaggtgcacaccaccatgcccagctaattggccaagcaggtctcgaactcctgaccttgtgatccgcctgccttggcctcccaaagtccctgcctcctgatttttaatatcaatttcctaaaatttttatggaaaagcaaagaatgaaaaatggcaatgttgagaaagaaccagaaagagtgatttgttccactggaaatcaagtctccttatgaagctatcttagttaaaacaatgtgaaattgacacaatttggacatgactaaaagcaataaaacaaacaacttgtgaatattctcttagattttctatgtagaaaattaggttttgaacaataatagttttattacatccttaaccttaaacattttattttattttttcttaatttttttgcacggtttggggcctcctatataatgataacaagaaaacacaatagcaatcattttttgtcatattcttgatttgaaagagaatattttcagtattttactaactaggtatgtttgctgtgggttagggggtgatatctattattacagagaatctcatttattccctagtttgctcccagtctttagaaaacttttgcatccatttcaatgtcatatgtttactcggtaatcactaatggcaaatattccaagttc

SEQ ID NO: 3073 - DNA, 88 bp, Homo sapiens
aacattggaatattacacagcttgaaggtttgcaaaggttatttgtgtcttagttatttctgcacttaatgacacatcagacgcattg

SEQ ID NO: 3074 - DNA, 88 bp, Homo sapiens; identical to SEQ ID NO: 3073

SEQ ID NO: 3075 - DNA, 634 bp, Homo sapiens
tttttttttttgagtcattgttttttcccctccattaattggaagttataagctttatttctctttattctttaggggtttttatggaaattttaaccagcaaagttaacaagatattgataaccaatattttacccttcttccaaacaatacaaggaccttaggaagcttagactgatcaaccattctgctgacatctgctattatattagttctaatctgattctttcgtgtttagattgaacatattttacacacttgtttgctttacttgccatttattatttatttcttcttatagacagtcttctgtggagtcctgttttcttctagaattacatatatattgtgtgtttatgtgtttgtgtgtgtgtgtgtgtgtgtgtaaagatctctcatcttgggatcaacattacaaataaaaacttaattgagttcacataaaatcggaagcctgtattataggaagtcacaattgtaagcaaagaacacatgtctaggtgagcctgttaattcatgtcaaatagtacaattagttttgaaaccacgacattgtcatctctgtaggctaacatgaagtgtttacacatttcaatattaacctaaactgtacatttcacctccgtcataatgt

SEQ ID NO: 3076 - DNA, 210 bp, Homo sapiens
ttttttttttagttgttggcatccttcagctgttggtaaatttaggtaaactccaactcattgactgtgcacgttggagaaacaagagacacttttttaaatctttaattagttgaagtatgaaatggtgtgattactcaagaagaaagtaaaaatatagtcattgcccaaatattacagaacctgtcagggctttgttagtgggatcca

SEQ ID NO: 3077 - DNA, 701 bp, Homo sapiens
tttttttttttttttagttgggattgaacaccggatttacctacttgatttattatttgtcttcaggtgtgaattattgttagaaaagaaagaagtcagctttcctctgtcaactactgtgctagtgaattctttttcaagtttaatctaaatcaagcaattcctttaaagaaaaggtgatacaaagccatgcattgtacaatatctgcctgcttatttgacactgagtacatagttaatatttttatttacgtttttcttcttattaagacctgaataaagacaatttgcattaacaatttagatgttatctgtagttatagagacaagtgacattaaaattgttctcctaaatcagaaaatatttctgcatgtctaatatatgccacatactgtgtgctaacgaaacgacttgactgcttctgcagtacaagcttaacaaacaacctttccttgtgacaaaatctgaagatgggcacacaaattgattttcccccaataaaaggacacacattagttcgaatcgatgatgatctttatcttccctattaataccttccttgtagataggaagacccacaattattctggtgcttcagagttgatctttatacatctatatattcatgaccagagagagatactattgccataaaggtgatgtcattccctatgtggactgggcaataactgattcttaa

SEQ ID NO: 3078 - DNA, 642 bp, Homo sapiens
tttttttttttttcctggaagaccttttattaatgcttcaatttgtgacttgttattgccctgttcaggggttggtttcctgctgggcaacaccagagccaaaggggatcttggctctaggctttgtgcagctagatattttggcctttacccacttgtgtgtttgatggaatggaaacagaggcccagtgtggagacatgcaatgactactgccccaaagaagggcaccctccagaagtgtctctggtctcaaagttgtgacaggctatagcattttggctaatgggatgggtggtgggcaaggaatacagatttttctacctaatcttgtgcagtacagatgcatgaattccttccagctctccaagttgagctcagggtttgcaagccctgtgaatttattttacagtaaggattgttgacatgtgtgattgcagtggggtctgatgtgcttcttctacttaactttcctcaccagggataatcccatgtgaatctcgagtatgaagctgcagacacagggtgcttcactattagaagcactattgggcttctaataaccacagggactctcctctccctgatatcctctacttctccctttcatcagtccagtctagtctaagcatgtaatacaacac

SEQ ID NO: 3079 - DNA, 426 bp, Homo sapiens
tttttttttttttttcaaggttttaaattttgtttttaaagaggaaaaaaaatataacatcatggttacacagaggctctggagattccctgggttcacaatcctacttctgccatttactagctgtgcgatcttgaacaaatttctgagcttctctgagcctgtttcctcatctctaaaacagagataatgacaatgttctacttacagggttgttttgggcatgcatgcaaacaaaacagattttatgatccgagtcatagttctggaaaggaagaaaaacccagatttgcgcccacaagtgttaagtaaatgtggagaccctcacctatatgtgtcatacaacatgggcgcgatgagcacacatatcatttagagcaagagataatatacacactgtagcctctcacccagagtccctctaat

SEQ ID NO: 3080 - DNA, 737 bp, Homo sapiens
tttttttttttttttaaatttttgttaggggccaggtgtggtgggccatgcctgtaatcccagcactttgggaagcctaggtgggtggatcacctgaggtcaggagttcaggagcttgagaccagtctagccaacgtggcgaaaccctgtctgtactaaaaaatacaaaaattagttgggtgtggtggcacacacctgtagtcccagctacttgggaggctgaggcaagagaattgttgaacccaggaggcagagggttgcagtgtgccgagatcatacaactgcactccagcctgggcgacagatgagactctgtcttaaaaaaaaaaaaagaaagaaaaaaaattgtggtttttatatttatagagtacatggtatatacagctcatagtaatcatatcagggctaaatggggcgtccttcacctcaagcatttatccattctttgtgttacaaacaatccaattatactcttttagttatttttaaatgtacaataaattgttgactttagtcattctatttggtataaaatagtagatcttattcattctaagtatgttttgtgcccattaaccacccccacaattcacccctaccaactacccatctcagtctctggtaaccatcattctacctccttatctcccatgagtttgatgttttaatttttagctctcaacagattagtgaaaacatgccaagttgtctttctgtgcctgcctatttcgttcata

SEQ ID NO: 3081 - DNA, 143 bp, Homo sapiens
tttttttttttttttttttttttttttgagatggaatcttgctctgtcacccaggctggagtgctagtggtgccatctcagactcactgtagacttctgcctcccaggttccagcgattctccttccttagcctcccgggtag

SEQ ID NO: 3082 - DNA, 714 bp, Homo sapiens
atcaagtgtatcatatgccccaagtacgcccccctattggacgtcactgacgggtaaatgggcccgcctggcattatgcccagtacatgacgttatgggactgtcctacttggcagtacatctacgtattagtcatcgctattaccatggtgatgcggttttggcagtacatcaatgggcgtggatagcggtttgactcacggggatttccaagtctccaccccattgacgtcaatgggagtttgttttggcaccaaaatcaacgggactttccaaaatgtcgtaacaactccgccccattgacgcaaatgggcggtaggcgtgtacggtgggaggtctatataagcagagctcgtttagtgaaccgtcagatcgcctggagacgccatccacgctgttttgacctccatagaagacaccgggaccgatccagcctccggactctagcctaggccgcgggacggataacaatttcacacaggaaacagctatgaccattaggcctatttaggtgacactatagaacaagtttgtacaaaaaagcaggctggtaccggtccggaattcccgggatcgagtcctcagtgcggggagcaggctgctgctgctgacgactctgtgcagctgcgcacctgtgtcccccacctccaccctcaacccatcttcctagtgtttgtgaaataaacttggtatttgtctgggaaaaaaaaaaaa

SEQ ID NO: 3083 - DNA, 771 bp, Homo sapiens
tttttttttttttttacttaatttataatatagagacagggtttcaccatgttgcccaggctgatctcgaactcctgagctgaagtgagccaccttccccagcctcccagagtgtagggatgacaggtgtgcgctactgtgccccaccatcagcatgaattttcaatggctgcataatattctgcctcattctcattcctttctactctatgctcaatattccatttgcaactgtttcactattgtcagacatataggaaggtttctgatttattattataaatatgaatatcttttatataaagatctatttatattttaaaatatttcttggctgggtgttacggctcacacttgtaatcccagcattttgggaagctgaggcgggaggatcttttgagctcagaagtttgagatcagcttgtagtcatcatagtgaaaccccatctctacaaaacatacaaaaattagccgagtgtggtggtgcgcctgtagtcccagctactcaaggggctgacgtgggaggatcgcttgagcccaggaggtcgaggttgtggtgagcaaagatcgcaccactgcactccagcctgggtgacagagtaagaccctccctgtcacacacaaaaaatttgttcttcggatgactctcaggggataattacttttccttttctccaatagattaggactgatcctgtatcaatacagtagacctcaaacagtatgataccttattcttgatgattcctcgttttgcctgtaccggtaggt

SEQ ID NO: 3084 - DNA, 94 bp, Homo sapiens
ccagggttgcctcgaggccggtcgtccagggagagcagcagcaggaagagcctcaggagatgaccctcagggtatggcttgtccgttctccagg

SEQ ID NO: 3085 - DNA, 131 bp, Homo sapiens
tttttttttttttttcggggtgcagtgttttatttcttaacttgaatgctaaccacccagatgttcgcttcatgcatctatgctctgggcacttttctgtaggtagattacatctcatgataaaagaaaaa

SEQ ID NO: 3086 - DNA, 727 bp, Homo sapiens
  misc_feature (35)..(35): n is a, c, g, or t
tttttttttttttttatatttgtttctcactttanaatattttcctaagtgaaagatgtgttcttattgttcaacactgtatctctgttcatttattgaacaaatatttttgagtgtttactaaatgttaggcattaatctaggaactggggatataagtaacaagaaaaatgtgtttccagccctcttgcagtttagtagtgaaagcaaataacacatacacacacacatgactgtgtaaacagaagcactgtgaaagaaataaatgagatcttgagaattagggctaactgtttgtgttaggggttagtctgcatagatatctctttggaggtgacatttaagctgagatccaaaggatgagaaagaatgagacaacagaagatagtagaattgtgattcagctttcagactgcgaaatcatatgtatgacactaaggtagaaaggagtttgaattatttcacactgtgactcctgagagaaggagtataccacacaactttgtattcattatgtacacatagcagcacatccttttgtttgtttttaacaagatagggtctacctctgtcacctaggctaggctgaagtgctatgtcactatcatgatcatactcctggactcaagtgatcctcctgactcagctcctgaatagctgtgactacagggcatgcaactccactggttaaaaattttcctttttgtagctacaggtctcactatgt

SEQ ID NO: 3087 - DNA, 708 bp, Homo sapiens
ttttttttttttgagataatgtctcactctgttacccaggctgagtgcagtagcacaatcacaactcactgcagcctcaaactcccgggcttaggtggtcctcctgcctctcggcctcccaaagtgctgggattacaggcatgagccacctcttctggccttgattcttcattaaatatagccgcctcacatagagtgcttttggtgggtatttttttgtgtacttccactggtctctgggccatgtacctactttctgctgcacatccactaagaagctctagttgcttcacacttcaacttaataatgatcagcagatcaccaagtctccggagaaaagggttagaccacttgttaagtcaacaaacacatatttagtgtttatcagattcctaaacacttttctaggcggtggagattcatcagcttaaatgcatagaattcaccctctccccagcagctttaatttggtatttatagcattcagtagttaaaaatcttcaccttggacttgtttacctaccaattactgcacactttcaaattgggctgaatttcaactggtaattaaacgttgattttgaaagcataaaaaggcagtgttaaaaatcccagtatcaactgggtggcctcagtcattttcagtgttgttgctcaagtttgtgactcaaaagcacttggtactccccagttgaaattctcgggaa

SEQ ID NO: 3088 - DNA, 185 bp, Homo sapiens
tttttttttttctcgtaagttttcggcagtttccggggagactcggggactccgcgtctcgctctctgtgttccaatcgcccggtgcggtggtgcagggtctcgggctagtcatggcgtccccgtctcggagactgcagactaaaccagtcattacttgtttcaagagcgttctgctaatctaac

SEQ ID NO: 3089 - DNA, 603 bp, Homo sapiens
tttttttttttttttagtagagactgggtttcaccgtgttagccaggatggtctccatctcctgacctcgcaattcgcccgcctcagcctcccaaagttatgggattacaggcgcgagccacggcgcccggccagctttctattattattattattattattattattattattaagacagagtcttgctctgtcggccaggctggagtgcagtggtacaagctcagctcactccaacctctgcctcccaggtgcaagcgattctcctgcctcagcctcccgagtagctgggattacaggcgcaccccaccacacctgcctaattttgtatttttagtagagacggggtttcaccatgttggccaggctggtctcgaactccagacctcaggtgatccactcacctgggcctcccaaagtgctagggattacaggtgtgagccactgcgctcagccggaagcggcttctctatgagacaggacccaccagtgtgccatgtccaatattactatcgccatggcaacaccacgagttactgccctttccacagacgaatgacccaatgattactcctccattccctagaactctctgcatgatac

SEQ ID NO: 3090 - DNA, 733 bp, Homo sapiens
tttttttttttttttccttaaaataccttaaaaaacaattagcattttttgagtctaggcacagttgttttcattaggcctcctttagtttttccaggagaagtaaacaattctgtaatcatcgtgttaatttatctcataagagagatagcgaagaaatgaacaccatgatgtaggttcttgaatgaagcggccacagcaactgcaaagtctaaatagcgtccaacgtgagcctggagaggagggggagtgaagtctaaccttacaagtgaagcccagccagtcaaaccctaagcacacaattattcatttttgttattacaattatctacaagctgttaatttatatcagaatattatttcctgactctcttatatttcaggaacaggaacattgatttagagaaaatatgttcttgaattatgaggttttgatgttgaggtagagactggtagttttcttgccatatcgaacatttgggatctgcaaactcccaacctcattaatagggtcatcatttttgtaacttacttttagatatttaaaaattttgccttttaatctttcttctaagcaccctattcattctctctgtttgtaaaatgcataggaggtggagaatctgtcgtaattctagcagcatattgcaccttggagacattcggtttactgccctgaatgagggaactccgcttcgtttctgaactccagctcctggaacaagtcagcggg

SEQ ID NO: 3091 - DNA, 615 bp, Homo sapiens
actggagtgcagtggcgtaatcccagctcactgcaacctcagcctcctaggttcaagcgattctcctcctgcagcctcctgggtagctgggattacaggcacgcaccaccatgcccagctaatttttgtatttttagtagagacggggtttcaccctgttggccaggatggtctcgatctcttgacttcatgatctgcccacctcggcctcccagagtgctgggattacgggcgtgagccaccacgcctggcctagattagagcacatttttaatgttccgtgtccacaagacacctggccatcttgttggctatggaaaatatgggtccgaagctaagggcaagacctggcgatggagacatagtccagtatcattgtcatgcaaaagtggcgagagccatcagagtggacataatcttggaatctgtggaggctgaggaatcactgaaaatgatctgagactcgtcagagagacaacatgaagatgaggagacgggaatatcacaaaaccaaaaacatttacaaaatccacactcaagaacggtggtcgtaacatttcacatgcccttcagggtgggcctgatgactgcagggactccttcccctggcaagtg

SEQ ID NO: 3092 - DNA, 640 bp, Homo sapiens
agcagcaactgcaatactcaaggttaaaacattagaaaagcatttgtgtgacaggtatattacagtattatcaaaatattacattttcagacttacttagcagataatcatccaccagagcttaaatctttaaattatttccatagtcttaaaaaatatgtaatgtcagaatgcatataaaaagaatgtcaaaggaaacctaaaatacaaatggaataatgtaacaaataaatatttgatttcagtaactgttaataatcagctcaacaccaccattctctctaaactcaatttaattcttataggaataatgaactgtcaaatgccatggcataattatttatttccaagctatcatcaatgattagaactaaaaaaaatttggcataaaaaaatcacaattcagcataaataaagctatttatagcttcaacactagctagcatctctaagaattgttgaacataagtactataaccttgaaaattttcgacctggtgtctagtgttaagtgaaagtaatgcatttagaagtgaaaagcttcttacattatttcacagacagtattaccagccacattatgaatagtagatatatccatgtctttatacccacatgtatgacgctgaatttggtcctg

SEQ ID NO: 3093 - DNA, 94 bp, Homo sapiens
ttttttttttttatttggggggtttttattgagataggatctggctctgtcaccaggctggagtgcagtggtgcgatcctgagctcactgcaac

SEQ ID NO: 3094 - DNA, 126 bp, Homo sapiens
tttttttttttttttccctgccacagttgcctcacgtctcctccctcacacctcaccttcccctcatgggccttctgtccgacttggggtaccccatagatggccagacgcacaccctgggttcga

SEQ ID NO: 3095 - DNA, 710 bp, Homo sapiens
tttttttttttttttgtagagacaggatctcatgatgttgcctaggcagatctcaaactcctagccttaagcactcctcctgcctcaaccaggtgtgagccaccagccagcgggagaggaggaaatcccatggtaaaagcctgggaaatcttatacagtacgaatctaacttggagatttgaaacatacattagcctattaagagctctgttaggtctttcaatatacaaacctgtttatctttgtttacataatgcctatcaaaccatgctgaatatatgttctatggaatatattttgagaaaagctgggttaatgtgtcacccgttacaagagctattttgtatttcttaataatatttagaaataggatttcgccccgtggtaagacggtaagggagttactagcaaatgagtcgtctgccacctctgaaatcagttgtcacagaaagctgcctcttttgtctgagcaaaggctatcatgtaggggcaagcccaacttgccttctcttccattaaccaattacaagtcaatcaagaacatcacttctggcaaaagctgtgttgactcattcaggtctaaaaataactcttgaccatgtgtggtaggtctagatcttctctaggatctaacatctatcttccacgaattttaagttgtaacttagttgtaaccatttggcattaacaattactaatctgctttaaag

SEQ ID NO: 3096 - DNA, 686 bp, Homo sapiens
tgtacatcttgctctggaaaaatgtctagtgccagtcctttgccccaatttttgaattgggttgttcaggttttctgttgacttgtaggagttcttcatatattctagatattaaccccatatttagatacatgattggcaaatgttgtctctcattgccgtaggttgccaaccccatgaattgtgttattgtaaaagtctggcctcttttttatttgatatttgagacggagtctcgcactgtcgcctgtggaggttgcagtgagctgagatggcgccactgtactccagcctgggccacagaaggagactccgtctcagagaaaaaaaaagaaagaaacaagagtttagaagtcactcacctaaaaaacaatctgtatcggctgggcgcagtggctcacgcctgtaatcccagcactttgggaggccagggcaggtggatcacgaggtcagaagttcaagaccagcctggccaacacggtgaaatcctgtctccattaaaaatacaaaaatgagctgggcatggtggcacgttcctgtaatcccagctacttgggaggctgaggcagaagcattgcttgaaccgggacctgggaggtggaggtcgcagtgagccgagatcacaccactgcactccagcctgggctacagagcgagactccgtctcaaaaaaaaaaaaaaaaaaa

SEQ ID NO: 3097 - DNA, 654 bp, Homo sapiens
tttactaaaaaaagggagggacaatagcaaaaacagagataaataggcagctttattggttgactttctatgtattaaaagcatctctctgactctgcaggtatgtataaatttgtggttatgcataggaaagcttaagtatttcacacttaaggtcaagtactcagatggccatagtttgcaaaagggccacatgtacatttgaattcaaagtataagtatctgcttagataaacttttaattaaatgtttgatgtttgacttttccttgccagataaataaaatccagccgctgactaattaagtagaaaacttgagcactgagacaggacacagaaaaacaaaaataatttatccagtgattttgcctttcttagtgaggccaggatatgttacagggggtgaatttgcttcagattgaagtgtttgaagagtatgaaccaccaaaaacacagattcaactcatgtaagaatccacaaaggtacacacacacatattcctcaaaaacatcagacattaaatgtctagggttttaaatatatatcagttcttaaaatggctccacagaaatgacaaatccgaaaatctaactagtggctaggcctctatattatgactcagactttctgttcctgtcagaggaatggaatga

SEQ ID NO: 3098 - DNA, 178 bp, Homo sapiens
ttaaatgctgagctctttccactctgggtaatggagaaagtccaagattgtatgtatctaggaggggcccatggtcacttggtgaagcccgtagagccaaccatttactccagagctgtcagctcctctgctccccaggcttcttagtcacattcaccacctaagtgcatccccctta

SEQ ID NO: 3099 - DNA, 749 bp, Homo sapiens
tttttttttttttttttgctgtaacagtgtttattgatgatgagtccaggctcctgctgaagccctggtggggaggggcacagagcgagatggggcgtaatggaatgcttgaaggctgctccgtgatgtcggtcggagcttccagactaggcgagggcagggtgaggcctcgggcacacagccggcgcccagtcacccggcccagatggagggcggccgggccctgcgcaggcacttgccaaggtggctcacactcacgcacactcgtactgagactcaaggccgtctccacaactccaaccagtgcaaatgacttagtgcaaattaaattcagaagggacgggggaaacagagtcgtggaggctttgaatctctcagaaaaaaggaaagacaggaaagctcagaaacaaagagacagaaggatgaaaaagaagaacgagggaggtggtggggacggcgtcatcccgctggaggagctcagctctgggatgatgtggtggctggtggtcaaccgtccgccgcagggggtggccgtgaagatggagtcgccggtgcggggtgggtgctgcgggcgctgctgttccgatggtgtctttgatgttgggctgatgaggtctggttcctctcgcttcaccttcgagagccgattcctgagtcagtagtgcagtggttgtaaagtgcagcatattcatttccaagctagaaggtttgtgtccggatcaaaggccaggcttagctggtagccatcc

SEQ ID NO: 3100 - DNA, 707 bp, Homo sapiens
gctggagtgcagtggtgtgataccggctcaccgcaacctctgcctcccgggttcaagtgattctcctgcctcagcctcccaattaactgggactacaggtgcccaccatcacgcccggactaattatttgtatttttagtagagacggggcttcgtcatcttagccaggctggtctcgaactcctgacctcataatccaccagccttggcatccccaagagctgggattacaggcatgagccaccgcacctggccgtcttaccaaaattttcagaggacaaaaaatgtgggattttaattttcaattatgttctcaccctccaagcatgcatgggtgctgcgcatgagccctgtgaggggctggcagcatcgcccccaagaaacctgaggcttagacaggaaaggccacctgcctggatcaccgggattctcctacctgagaaggaggcagttttagctgaggaaggatatccagatgggccctccatggttccttcccaccagaacttctcagccatgggcaacgaggcagccacgggacccaagcacatttcatcccttggtttcctgctccccattctgggtagggcacgaagtgaagcaaggtgtgtgcatctctgacaaggcaagatctgccaggatttactagaagctgtgaggctggttgacccagcaacagtgatttggagaagcaaggctccctccca

SEQ ID NO: 3101 - DNA, 673 bp, Homo sapiens
tttttttttttttttcttttctttctttctttcttttttttttttttttttttttgagacagagtctcactatgttgcccaggcttgtctctaactcctgggctcaagctatccgctcatctcggcctcccaaagtgctgggattacagcgcctgtccaaaactttctaaagatactcttagttaaacttcccataagacaaaatgtttattgatctatcacaaaaagtggtggaagagggtctgattgagattttgggtctgggaatgactaaagcctccaagctcaaaacagattgaagactgaaacggccttttaattggccaggtgtagtggctcccgcctgtaatctcagcactttgggaagctgaggcagttggattacctgaggtcaggagttcaagaccagtctggtgaacatggtgaaaaccccgtctctcctaaaaaaaacaaaaaaacgaaattagccaggtgtgggggcagggcgcccggtaattccaagccaaaaaaaaaaactttgtatatttggacagagtcttgctctgtcgccccaggatggagtgcagtggcacaatcttggctcactgaagctcagcctcctgggttcaaggattctcctgcttagcctcccgagtagtggatccaggtgtgagccacatgcctggctactttt

SEQ ID NO: 3102 - DNA, 765 bp, Homo sapiens
ttttttttttttttttttttttttttttttggagttgcatagtcttttatttttctaaagatgaccattccatgtttaatgtcttcagagaagatctaaaaatcaaagttaacaacccatttgtcccaactctaactcttcctgggaacaattcctcattctgttacttgatttcttcctttaccacccacataaaatatgtcttactgctcacaagatcaaaagaaaacagaacaaaacattgaaacatcagaattgtttaaaacactagatttcattcaatggtccaatggacacttgctcattggaacttatttctgcttcagctctagttctttgagaaacacaagaattcctttcaccaaaatattagcctgacacaagaatgttcgaaaggttagctgccttagctttattgctgcctataatctccaaagatatctgaacacctagaagattacatgtagcaagaagtggaagagaaacacagtttataagtcatttaataactataattgcatagaatttactcacttttcaaatacttattctgaatgaataccaaattttgtgacacacaaactatattctatggtgcttagacatggttgtcacatggtgagttagtttctccaagtacaaactttacgtgcatacacagaggggaatgcttataatcatatgagtaggcctattatctcatgatagaagagaaaaggggtcaaaaaatagtacccacaaagtcccacagtgtacggcagtctg

SEQ ID NO: 3103 - DNA, 674 bp, Homo sapiens
ttttttttttttttttcaccactaaaaaaggcttttattacaaaatgaattctaataaaaccaggcctggtcttcaacccctcccgctgggtagaggccctagggtgggctagggtaggggagatgggggtggggggccctgaaagaacagagcaggctgccctcctctcatcagtctcagctgctgccctccttttataaagggctagaagagctcttccaaagccccttgagagagtccccatccttccaaccaggatccttccaaccactgctgtcacaggaccttagcaatgccgcattgcaggatccaggaggtctcggctggctctcagcagaggccatccagggtcactcagcctgagcgatggcgtaggagagcaaccacagcagcaggggacccagaatgaggacagcaagccagacagcaaagctggccaggatgagtttccgggcccgggccccccagcgcactgcctcctcggaccggcctgctttatgccgctcttccgccttgatggcaaacaccagagccatgactcccaggcaagagcagccacagataatgctagtagctgccaagcagcggaggcggagccagcagcagcggatgggggatggaggatgagcagcttccgtgttggcccaagatctcccactggctttctgcctgc

SEQ ID NO: 3104 - DNA, 758 bp, Homo sapiens
tttttttttttttttcttttttttcaggtggatgctaagaccttaggaaattaggtagtctgcgtcaaagctgaagggtaaactaggagacctggttacatctttagatctcagtgctaaattgtgaaatctcctgtttgcctgacaagaagaagaagcattagccactgccggggacaagacagcatacttgatagaccaattgcttgatccgctatggcaaatcctgtgtaatacccagaattcagttactttcaaggaagaaacaagaacagaaggttcaggaaagtcccacaattctaactgaggaacaaccaaaagcctacgttacaaaagcaacagctaaaatgaccaggtaggctcacaacactggtaacagactgaactgctcaaattccctgagagttcacatgaagaccaaagcaagaatttgcagatcacaaaagatgagacagcctctgcagagtggagcgaagctggttagccagcagagcccagagtttcctcagccatccacagtgtccctgccctacatcaccaagaatttaaaattgcctggcagggttgatcgaaatagcctaagaataaggttttgaacttacctgggccatactgcgtgcatgaacacacggacatctgaaaactgctgtcagcctctattccacactatctaacctctttacggttccaaaaatgcttagcactattacaaaatgcctaaaacttatttggtaacttagactcccatgcggttcggt

SEQ ID NO: 3105 - DNA, 711 bp, Homo sapiens
cctattgtctaagtagataagggacatatttgacaaaatttgacatccagtcatggtttttaaaaaaaagctcttagaaaataagactagaatagtatttgctcaacccagttacagggtgtttgcagaaaaacctacagctaaccgtgaacacttaatgttgaaagactgaaagcttcctccctaagattggggaaaaggtatagatgtccactacttctattcagcattatagggaagtcttaatgtcttattcagaaataatacaatttgcagaaaattcccaaggaatttgttaaaaagttgctggaacttaataaatgagtttaacagtacaatttctgtgtgtttaagctcaacatatagaaataattgtatttctacatacagtgaacaattagaaactgaaatgtagcgccgggcgcggtggctcacgcctgtaatcccagcactttgagaggccgaagcgggcggatcacgaggtcaggatcacgatgaaaccccgtctctactaaaaatacaaaaaaaattagccgggcgcggtggcgggcgcctgaagtcccagctgctggggaggctgaggcaggagaatggtgtgaacccaggaggcggagcttgcagtgagccgagatcgcgccactgcagtccagcctaggcgacagagcgagactccgtctcaaaaaaaaaaaaaaagaaaaaaaaaaaaaaaaa

SEQ ID NO: 3106 - DNA, 773 bp, Homo sapiens
  misc_feature (135)..(135): n is a, c, g, or t
tcaacccaagtaccccctttgacgtcaatgcggtaatggcccgccctggcaatatgcccagtacatgacttatggactttcctactgcagtacatctacgtattagtcatcgctattaccatggtgatgcggttnttgccagtacatcaatgggcgtggatagcggtttgactcacggggatttccaagtctccaccccattgacgtcaatgggagtttgttttggcaccaaatcaacgggactttccaaatgtcgtaacgactccgccccattgacgcaaatgggcggtaggcgtgtacggtgggaggtctatataagcagagctcgtttagtgaaccgtcagatcgcctggagacgccatccacgctgttttgacctccatagaagacaccgggaccgatccagcctccggactctagcctaggccgcgggacggataacaatttcacacaggaaacagctatgaccattaggcctatttaggtgacactatagaacaagtttgtacaaaaaagcaggctggtaccggtccggaattcccgggataacctggtaaagtaacacttagggggaaatggggacaaactggctctctggattagtgcgggtatagacacccccaaataggtgggtaggcccattgattcagctccttgcagctgtctctgttcaaaggaactgtgcagatttagaacgaattggagcttgagcttcacaccaccagcttccagagattaaagtttgtacaaacattgccaaaaaaaaaaaaaaa

SEQ ID NO: 3107 - DNA, 739 bp, Homo sapiens
tttttttttttttttgcagttgaaattttaactttattattttcctattacaaaagcaacacatattcattacataataaaagggagggagctcaaaagatataaagaagtctatgttttttttgtttgtttgtttttttaaaggagtctgttttaaaattgcctattatcctattccagggaaaactattaacattttgccatatttcattttatcagtcttttcctatgtatttttgaacacagctcaaatattactctatataaagacttgtattcagctttttcaacataaattacattaaagttatttttatgtcaataaaaattatctttgtaaacaaaattttaatggcaaaataacatttcatcatatagacatactgtaatttatttaaacactctcctaaaatcaaatatttagttaggagaaagttagtaggtcaaagcatataaacattgcgcaggtcactgtggcctaaaaaggctgttcttttttattttttttggaacagagtctcgtactgttgcccagcctggagtgcaggggtgcaatctcggctcactgcaacctctgccccctgggtcaagcaattctgccccaacctcctgagtagctgggtttacaggcacaggccaccatgctcggactaatttgtatttagtagagacacggtttcaccttatgggccaagctggtctcgaactcctgacctcaagtgatcaccgctcggctccc

SEQ ID NO: 3108 - DNA, 739 bp, Homo sapiens; identical to SEQ ID NO: 3107

SEQ ID NO: 3109 - DNA, 711 bp, Homo sapiens
tttttttttttttttttttttgcagttatttttaaaactttattttaaaaatatgagcatctattttaaaagttttgataattattgccattattttcttgtgattggtacaatttaaaaataagtctatgttttcacattgattttaaaaaatatagcatgtttgaattacaaatgattaagcaaactctattacttcatagctgaccatcttccagaaaattcccacttaattgaatacttagaaaaaaatggccagtggccgattgaaaggtatattaaaattaagggcagttttaattctgaagacaaatatcttcatggaaatctatttgtaagcttctgagattgctgctgaaagtctacagtctgtgaatataccaattcccctttacaactgatgcagatcattatgaaatactggaaggcataccctacaatttaggaattggtgtggctgccactgctatgctctcaattgcacactcatcagttcctctgcggatccggaagtagccattctcaccccagccggtgccccagctgtttttaacaatccagtaatccatcccagaggctgagtcagtgccatagcccacaagcagaacagcatgattagtcagctcaaaggggttgaaagggtctcttagaccagtgttggtggtagatccccttttgtagtggaggaagtctcatatactcaaaagcaat

SEQ ID NO: 3110 - DNA, 499 bp, Homo sapiens
ttttttttttttttttttttttgtggctcagagtggtctcaaactcctggcttcaaatgatcctcccgcctcagcctcccaaagtgttgggattacaggcatgagcttctacacttagccctagaattcattcttttactcaaagaccagtgttttttcactaaggttcctaggtgacctaaaacttaattatgtgactgctgccaaaggtgcattactaacagcacagcaccccggaaatgataaacgattgttccactacacccagcacgtgcagatcgcacccagagtgctgtctttgagtgtgtcagtaagtataggtttttgagacaaggtgtcattctgtcatcgaggctgtggtacagaaggagtgattatggatcactacagcctccaacatcccggactcatgcgatcttcccgcctcaggttcccgagtagccgggaccacaggcacacagacaccatgccctgctaattatattatattatttcatta

SEQ ID NO: 3111 - DNA, 769 bp, Homo sapiens
  misc_feature (634)..(634): n is a, c, g, or t
ttttttttttttttttttgtttttctgttttttgataattgggaatgctgaaacctcttgcgtctgcgattcataactactcagacttgtcttatattacaaaaatgggggttaaggagaagtgtttatgtgggtttaagataatacagctgttaaggaagtggtctcttgttttaatgaagcaatgtggcaacttggacccttttacatctgtcccatgtgattcgatgcgtctcccattccagggtgtgggccggccaaggagagagggggaggctctgaggacaccttctcttcctcccttcttttcagacacgcagctttcggattcagattcctttctcggacttgctgctccagactgaggatgacggccaccgcctggtggaggatcaggagcttggtctggggcttgtcactcttgaggtggagctgcaccatgcggccgagctctttgaaagcctcgttgatgtcacggacccgcagacgctctcgggcattgttggccatcctccgctccttctcacgctctgccttctgctctggtgtcaggtcctcatcgtcattatcgctagatcttgacctagtaattgatttgatatccttcttgtcgtcatctaatttcttgtcctcncgaagatttcgtgtcttgcaggttctcatcaccctcgtcatcggatttgatctcagagctgccagaggagacactctgcccctgtatcatggtggcattgcctctgtagggtccggggtgggtcaggtcgggaac

SEQ ID NO: 3112 - DNA, 682 bp, Homo sapiens
tttttttttttttttggtagatacccagtaatgggattgctgggttgaagggtaattctatttttagcaaactagaaatatttaatgaagtacatgaatgagtgtcttcagaattgtacacagtgagatcaaatattttaataatgagcttgttatgttgaattctattctgaccatcactcactgagattttcttttctttctttcttttcttttctttcttttttaaagagacagagtttcactatgttgcccgggctggtctcaaaccccttgcctcaagtaatcttcccaccttgggcctcccaaagtgctgggattgcaggtgtgagccaccacacctggcccagattttctttaatatttgtctaatatctttccatctccctatattcaagcttcatgtaattttattttctggtaattctctgagcatagagctggatttgctagtttttttattttatgactcaacatgacagtttctatttttcatagaaaagttgaatctgggcctgtttcttaattttcttctttgtctttttaaatttacattaggactatgaagttttaattgaacagccattaacatatatggttatatgttgcatgatgtttcaatcagtgatggactgcatgtacgatggtggtcccctaagattataatgccatgttttggtgt

SEQ ID NO: 3113 - DNA, 746 bp, Homo sapiens
tttttttttttttttttttttttttttttttttttttttatctgtggttttctttttaattatctttagtcttgtgatcacacataattttaaaatttgtgtatatctccgttactttaatccttttaagttggcaaaagcaccattcccaatcaaatacacagttctacagttttgtttctgaatggctgtttaaagacaatcctaaattataacttagtttgacttagattgtaaagaattcaagagtgaagtttaacttgctactattttaaaagcatgtgaccttatagatctgtaagatgtgagaggtgttgaataatctttaatattacacataaaccacactaaaatgcctttcaataagtaaaagaaaccattttaaatacagggaattataattagattggcatagttaaggccaaaactatagacattgctaccttatttatcttcaacccttgcctttaagaggcaaatgaacatgaacacaaaacacaggtgaatcttgctgtggttctaagacagtgaagcaatttccccagtatttaaatatattcacataaccagttatataaatctaaatataaaaccaatctccagtaagtttaagatggcactcaccatctttgtgaaaagtgaacattactaacgaagtctaatcatatcttccacaagggtcaacagtgataccattactggaatggagtctattaatcaaactgaactttcattaacacaagcca

SEQ ID NO: 3114 - DNA, 715 bp, Homo sapiens
tttttttttttttttaatttgcttttcttttgacataatttctcttctctctgaatttttttttgctcctcagcttttctttgatattctttccaggcttccaatgctttagtggcttttatccgttcattttctttcatatcttctatttttttcctctcttcttcttcaattttgcctttatccttcaaccattctgggttcttttcttcttcttttaaatcgcaaagttcagctatgtcagtattcattgctcttcgtgcctcagcttgtttgtgtagccactcctcctcttctgctacttgtgattcacgaagagctgttgggaatactcgaggggtaaagttgattttaatactgccaacagagcgaggagcaggaatactgtcttcctttaacttctcagtaaatatattttctgaatttctcctttattaagcatcaagctagatccattatacttcatcctgggtgacagggtgagatccttgtggagcaagatttctagatgccaaatttctagtaagactcttatatttatttttgtctttcttctttaatttgcttttcttttgacataatttctcgcctgtaacaagccagattttcaaaatttatatcgtaacatatcgtgtgtgtgtgtgtgtgtatatatatatatagtgtccagtcaatctaaagttaattcaacgctgttcggtgcctttatctcggc

SEQ ID NO: 3115 - DNA, 789 bp, Homo sapiens
tttttttttttttttttttttttttttttttttttcctagtgccaggtttattccctcacatgggtggttcacatacacagcacagaggcacgggcaccatgggagagggcagcactcctgccttctgaggggatcttggcctcacggtgtaagaagggagaggatggtttctcttctgccctcactagggcctagggaacccaggagcaaatcccaccacgccttccatctctcagccaaggagaagccaccttggtgacgtttagttccaaccattatagtaagtggagaagggattggcctggtcccaaccattacagggtgaagatataaacagtaaaggaagatacagtttggatgaggccacaggaaggagcagatgacaccatcagaagcatatgcagggaaagggcagttactgggcttctgggctgcttagtccctggcttggcaggaagggtacgggaagatggatggggctcattgtttggcattgatgatgtccacgaattcgggcttgagggaagcaccacccacaaggaagccatccacatcaggctggctggccagctccttgcaggttgccccagtcacagagcctccataaatgatacgggtgctctgagcccaccgcatcaaagacgtcggacttcagccatcctcggagcttctcgtgtacttacctggcctgtgggggtgttgccaatcctgcccagtaccaatggccaacacgggctcataggcaggacgaacttgtccagccttcacgtatctggagacctcgtctc

SEQ ID NO: 3116 - DNA, 716 bp, Homo sapiens
gctagccgcgggacggataacaatgtcacaacaggaaacagctatgaccaaataggcctatttaggtgacactatagaacaagtttgtacaaaaaagcaggctggtaccggtccggaattcccgggatggccgccctttttttttttttttcgctaattaaagaagatcaagttgagtaccatgaagggctaaagtcaaatttcagagacatggtaaaagaattatctgacattatccatgagcagatattacaagaagacacaatgcattctccctggatgagcaacacattacatgtattttgtgcaattagtggtacatcaagtgaccgaggttatggttccccaagatacgctgaagtgtgaggaaatgcagatgtacgtgacaatgagactgacctttctcaggaatatttggagctgtgcaaatgttaaaatttaaagatttgatatacatggagtgtttcttctcgacaccaaaattttcatgtgttccaacagggtgcttacatatttgtaaataagcaacttgaaagtgcctggaaaattgcaccactgtgcttggtttgtacttttttaggtaaatctatatgctgaaaagtagagctcaaaaacagtagttcaatttgcttaattattgcttaaaataatggtactatgtaaaattgtataatggaatacaataaaaggtaaaacttaaaaaaaaaaaaaaaaaa

SEQ ID NO: 3117 - DNA, 629 bp, Homo sapiens
ttttttttttttttttgtttttgtttttttttataagggtttatctttattttataaaaactgctacacacacacatacactctctctctcccctcttgctttcctcatttgacctagagaagtttggagtttgttcccacacattcttttcaaggaaataccattcagccatggtatgtttttaccacaatttatacatccattcccttactgatggtcttattttgtttgtttattggtccttaccaaaaaatacaatatacattagataaacatataatcttaagtgctggcgctttttattccttagggatagattcccaggagattcctaggttgtaagagtatattaatgttaaaacagactcacaatgtagtccaaggaggctgttacaatctacatttctaaaagcagctatgaaaataacgtttacccctcctttgtgagtaagtacgatgacaacttagacaaaagcttatcgggctatggatgtcctggatcaatcagtgtcagaaagtcacatcaatatatagtgtgacagcacatcaatgatatccaaaaatattctaaaagccagtataggtgccatttataatttccaatacatgatggtgacgactcgggaac

SEQ ID NO: 3118 - DNA, 609 bp, Homo sapiens
tgcagtccagaagcccccccagcggaggcggcagagtaaaagagcaagcttttgtgagataatcgaagaacttttctcccccgtttgtttgttggagtggtgccaggtactggttttggagaacttgtctacaaccagggattgattttaaagatgtctttttttattttacttttttttaagcaccaaattttgttgttttttttttctcccctccccacagatcccatctcaaatcattctgttaaccaccattccaacaggtcgaggagagcttaaacaccttcttcctctgccttgtttctcttttattttttattttttcgcatcagtattaatgtttttgcatactttgcatctttattcaaaagtgtaaactttctttgtcaatctatggacatgcccatatatgaaggagatgggtgggtcaaaaagggatatcaaatgaagtgataggggtcacaatggggaaattgaagtggtgcataacattgccaaaactagtgtgccactagacatggtgtacaggctgtctttccccacccctcaaacgaacagttattcccatgtatccgtgcagcaggttacaacactacagcctgagtcaag

SEQ ID NO: 3119 - DNA, 680 bp, Homo sapiens
tttttttttttttttggtacaaaaggtgtctttattgaggtctgggttaaaattaggcacttggccagagcagcagcttaaatatgaggcaagcagtcaggggttagccatgcctggggctgggttggggtcatgaggctacaggcacagactgtccccaggtggacagaagttggagcaggaagaggaggaggaaggggccgcagagcagcctgggtcagaggcctggtgggccagcccagtgggactaggcaggaagctctgggtggcaggtccagcagggaggggaccaggatctcttgctccacgtgccccttagacccaggcctgagcctctggcaggggcagccgcacttggcagggcggtcttcccaagcctcacttcttcaccttggcatcgtaggtgcctgcattcttgtaggcgctcacgtagccactgtcgtccaggatgtcctgccgtcccgcaatgcccttgcccttgccgctctcatcgaagcgctccttgtgggagcccgtgtatctgctggtgtccgtcagccggtctacagcaccccctgtttttgctttagtgacgcccacattggctggctctttgcctgccaccagctggcaggatggcatcgaaggctcctccttgtcttccccttgaatctcttggtcgcgctcttccggggcttctt

SEQ ID NO: 3120 - DNA, 647 bp, Homo sapiens
cttcgacaaggctcgcttctctgggacctggtacgccatggccaagaaggaccccgagggcctctttctgcaggacaacatcgtcgcggagttctccgtggacgagaccggccagatgagcgccacagccaagggccgagtccgtcttttgaataactgggacgtgtgcgcagacatggtgggcaccttcacagacaccgaggaccctgccaagttcaagatgaagtactggggcgtagcctcctttctccagaaaggaaatgatgaccactggatcgtcgacacagactacgacacgtatgccgtgcagtactcctgccgcctcctgaacctcgatggcacctgtgctgacagctactccttcgtgttttcccgggaccccaacggcctgcccccagaagcgcagaagattgtaaggcagcggcaggaggagctgtgcctggccaggcagtacaggctgatcgtccacaacggttactgcgatggcagatcagaaagaaaccttttgtagcaatatcaagaatctagtttcatctgagaacttctgattagctctcagtcttcagctctatttatcttaggagtttaattgcccttctctccccatctttccctcagttcccataagacttcattacgcataaaga

SEQ ID NO: 3121 - DNA, 574 bp, Homo sapiens
ttttttttttttttttttggcgttgaaggaatttattcatgagaagactgagggtccatcagggagactgtccaatggtgacaagctccagaagcccgcgtcgcaacagccaggagggccgaggccaccccaggcaggaggcagtgggctggcagaccaccctgggcacagaagagcagacgcagacagtgctgggcaacgaggggctttcttcatgggcccgcctgccctgtccctaccccccaggtccccacctatctagggttaaagtgcagctgggagggaggaggcaggcagaattggggagctagagagagcccaagtgaaccctgactgtccacgcaagtcccatgtcctcctcgtcctggagttcctcgaggttcagcgagcccatcccgcctagggcctctggaaccttggcggcgcagggaggtaacccctcactcccacacccatccgatattacaaagagcatccctgggacaggggagacggcggcggctctggcagcttctggcggggctagaacttggggcacagtgcggcgcactcaacatctctaaccacgggcacg

SEQ ID NO: 3122 - DNA, 745 bp, Homo sapiens
  misc_feature (627)..(627): n is a, c, g, or t
tttttttttttttttctttcctttcctttccctttctttctttctctttccttccttccttcctttctctctctcttttcttcctttcctttcctttccttcctttctttcttttctttctttctttctttctttctttctttctttctttctttcttttctttctttctctctcactctctctctctttctttcttatttttggtgctaaaacccaaaacaaatcttttatttaaaaataagatttttttttttttttggccaggtgtgatggctcatggtaatattttcaataagaaaaataacagtgatgtcaggatgctagaaaatgcaaaataaatttgttataattcctgattctggtgataaaatactaaatttttgcagtattattctgaaagaataatcacgtatttaaagtacaaatctttagacttcaaagtgcatccatggtggcagatttggtttaacttttatatagcatcttttatgcaaccaaaaatagctgaccattatgtggaataattcagcgtaaagcttttttactttactgagacggagtctcattctgtcacccaggctggagtgcaatggcatgatctcggctcactgcaacttctatctccnaggttcaagcgattcttgtgtctcagcctccaagaagctgggactacgggcatgagcacatgacagtaattttctatctatagagacggttccctgtttgcagctggttgaatctgat

SEQ ID NO: 3123 - DNA, 740 bp, Homo sapiens
ttttttttttttttttttttttttttttttttttttgcaggttaaaactgctttattattatttttttaacatagaagaagcttggtagtggacatgtggccatttgatgtttttatgactaagagagttcaggctcaatctcttacagaatgtaaatgtacccctatgcatgcatatgtaattcttatcaaaattaagcttaatcactaaaagaagattcgctatctgaactttcttctacagttttctcactttcgccatcaggcactggagcatctggcctctcaagaagatctgggtctagtccttctgatatcattttgtttcttattgccatcactggtacacccacttgaaccattttgagatatctggcatatcttggatccttggctacagttaagatattttctgctgatacttcactttcctgtagtccagagtcttgtgtactgttctgctgtggttgctctgaagtggcttcaggatgtgctccatttgtgacactggtgacatttaaaggagatacttcaactgtgacatcatctaggcctgggatagatgacaactttgcatctaaaatattgagagttgtttcaatttgttggatacgaagtgaaaggtctgccagttttctcctcacaaactgtagaaaagcggttgaggaactgtacagtgtgcaccacaaattggttagaaaagcacgtcttttctgtgaatagctggacctggtcagttt

SEQ ID NO: 3124 - DNA, 624 bp, Homo sapiens
tttttttttttttttcaattaaaaagtattttattactacaaaatgctgatggtcatctgagccattaacacataatcgtttgctgtggaggttcttgccttgatgttgattactgctgactgattaggatggtagctgcttgaaggttgggatggctctgtcagatttctttaaataagataatgaagtttgctgcatcgattgacttttcctttcacgaaatatttctaacatgtgatgctgtgtgatagcattttatccacagtagaacttcaaaatggagtcaaaccatgttgctgctttatccactaagtggatttaatattctaaatccttgtggtcacttcaacaatacacagcatcttctccaggagtagattctatctcaagaaatcacttgcattgctcatccgtaagaagcaactgctcatccgttaagttgatcatgagattgcagcaaattcagtcacatattcaggcgtccacttctaattctacttctcttgctgtttccaccacaatctgcagttacttcctccaactgaagtcctgagtcctccaagccatccatgagggtgggaatccgtttcttccaaactcctgtaaatgtgatctttggactt

SEQ ID NO: 3125 - DNA, 740 bp, Homo sapiens
  misc_feature (439)..(439): n is a, c, g, or t
ttttttttttttttttttttttttttttttttttttttttttttttttttgggtggcatgcttttttcacttagccgtctatcacaaacattttccatattgatagatctgtatcagcatcattttaatggctatctgatgctaatttcgagctaatatgtactataattcaccctggagcagcctctggcagagtgactatagcataggcatttctgtaggaccatgctgtttcctgttgactgcgctcctcacttccctggtgcttctgattcttctaggtgttaacggtttgaggatgctggggattctccatgatgcagttgtgttcctcattgagcagctgtctggtgccaagcactgtcgaaattacaaattccgtttccacaagccagaggaggccaatgaaccccccttgaaccctcacggctcagccagngctgaagtccacctcaggcaagttcccttcttttctgtcagcagtatgggtctcgatttcttatctcatgacactgtcatcttcccacataccctttgagattccagtttaatgccatcatcctttactgctttattaaagcatttctctacatatgttttaatctttgtggcccaggaagtcacgcatttgacatgtttaacttcctggcttctaaacatcgtcagctcctgaatacacccatgattgaacagaggaggtacagtgaagtcagctcgggaagtctgagtgggaaccagca

SEQ ID NO: 3126 - DNA, 718 bp, Homo sapiens
agaaatttacgtataagtcatcgctataccatggtgatgcgtttggcagtacatcaatgggcgtggatagcggtttgactcacggggatttccaagtgctccaccccattgacgtcaaatgggagtttgttttggcaccaaaatcacgggactttccaaaatgtcgtaacaactccgccccattgacgcaaatgggcggtaggcgtgtacggtgggaggtctatataagcagagctcgtttagtgaaccgtcagatcgcctggagacgccatccacgctgttttgacctccatagaagacaccgggaccgatccagcctccggactctagcctaggccgcgggacggataacaatttcacacaggaaacagctatgaccattaggcctatttaggtgacactatagaacaagtttgtacaaaaaagcaggctggtaccggtccggaattcccgggatcatcacaagacgtcttgcactcatgagctgtccccacattaggcttaaaaacagatgcaattcccggacgtctaaaccaaaccactttcaccgctacacgaccgggggtatactacggtcaatgctctgaaatctgtggagcaaaccacagtttcatgcccatcgtcctagaattaattcccctaaaaatctttgaaatagggcccgtatttaccctatagcaccccctctaccccctctagagccaaaaaaaaaaaaaaa

SEQ ID NO: 3127 - DNA, 768 bp, Homo sapiens
tttttttttttttttatagtaagaacccaattttatttagaaaccagcaagcagcgtatgcagtaagaacccaattttattacaactttgtacataaatgcccaggagaaaagttggaaggtgctacattaaggtgttaagagtcgccatgggggtggctgatgtgagaatttaagagtgttttctctttagcgataaaatatcctaccgcccccaggagtgaccacgtgaggctgcataatggccgtctctgtgatctgcagtgatgtctgcagatgacgaacgcccggggtggtgagctctaatggccttctctgtgtctgcagtagatgtctgcagtgacgaacgcccggggtggtgagctctaatggccgtctctgtgtctgcagtgatgtctgcagtgacgaacgcccggggtggtgagctctcgactttagagagagaattgcatcctcctgagtacaagggcgcagtctgtgttataatgcacagggcactgctctctggagtttggcaggacctggtgaagggggtgccgggcatgggggtcggctggtgaggccctccttgctgccgagtcagggagcctctgcatgctgacgaggtaggagaatcgaaactggctccgtgggcagtttcctaaaatgtgctcctcgagttgaccttcctctcccacatctgtcccgaggttgctatccgggaatccggacggtacagcagactttttgacaaactgtcataggtcactaatagctaagtcaatgtctt

SEQ ID NO: 3128 - DNA, 778 bp, Homo sapiens
ttttttttttttttttccagttacaggtattttattgagcagagacagtgaagttccttatgctgttatttcaaaagtgtttcctggtttctttttaatgaatgtcttaaaatacaagcaatcaggaccctttaaataaggcagtatgttcacaaatcaaaatagctttctgctggcatcagttgattcaacatcaacatgcagtgtccagaatgaataagcagttctttaatggttatttaaatatattccagaagagcgtttataattcatttacaagtgcagtattgcgctagtaaatgttacttgacctcttgtataaataatgccgattaagaattagtcctggaatagttttcgaatttctaactctgtagatctaaaacacaattgtaaatggtataaacgatgtaagaatcatattgtgataaagtcaatctcaaaaatagagaatccagacccttcccagataatttaagaactgagttttcctcaacttaaacatgatggccacacagaaaacagtaaagacacttttcgatgtgatacaactgtataaaactcgagaatatgagtatctaggtgaccaatgtatagacattaatagaattttaaaaacacatttaaatctgaagcagaacaaaacagacaactttacaacagaattattgagctctaatcatcatcagagtctgaatcatattcttccctcggatagtttctttccagcttgtgagttgtcaaattcttggtctgaaggggcctaattccttaaata

SEQ ID NO: 3129 - DNA, 759 bp, Homo sapiens
tttttttttttttttttttttttttttccttttgaaaaatatttattgagtataaataaatgtcctatacattaaatatcaagaaatattcataattgattacaagtcaagatgtaatactgagggaaccatagaatcaaaatacccactcatgatacagtagtgataattccattccaataatggacacagtaacgacttgttcacaagacacaacaaaacccatcaaaaaggccatcactttaaccaacctataataccacaatagaaaatgattctgaatcataatatgaacagccccaataatctcatcttggtcttatcaatttatcaggtcattttgagactgtagagttacactgtcatagacttttaagattccatttccttagttttatttcaaattattattaatgaatgaaaacaagtcatacgagctaaaaatacttttaaactgagttcgtttcttcataagaaaaaaaggaatcaaattttagtacgaagaaagcatttcccaagcaactgagtctcttaactggaaaaaataaaagagcaactgtaattaaactttccttcaaagaaaggaaagaaacctaaatctgttatggcacattggacagataaatatttcctagtcccataatatgtgttgttttacacgatatgcttgaatgatgcaatctatgaagcaggatctgtggcatccaaattcatccaccagaactcatcctgttctcgtatcggggacccccgattgcg

SEQ ID NO: 3130 - DNA, 703 bp, Homo sapiens
cactccgccccattgacgcaatggcggtaggcgtgtacggtgggagtctatataagcagagctcgtttagtgaaccgtcagatcgcctggagacgccatccacgctgttttgacctccatagaagacaccgggaccgatccagcctccggactctagcctaggccgcgggacggataacaatttcacacaggaaacagctatgaccattaggcctatttaggtgacactatagaacaagtttgtacaaaaaagcaggctggtaccggtccggaattcccgggatcgcgaaacgtgggttggaaggacaagaagtcctatcgttggttcctgcagcaccggccccaagtgggctacatcagggtgcgattctatgagggccctgagctggtggccgacagcaacgtggtcttggacacaaccatgcggggtggccgcctgggggtcttctgcttctcccaggagaacatcatctgggccaacctgcgttaccgctgcaatgacaccatcccagaggactatgagacccatcagctgcggcaagcctagggaccagggtgaggacccgccggatgacagccaccctcaccgcggctggatgggggctctgcacccagccccaaggggtggccgtcctgagggggaagtgagaagggctcagagaggacaaaataaagtgtgtgtgcagggaaaaaaaaaaaaaaa

SEQ ID NO: 3131 - DNA, 715 bp, Homo sapiens
tttttttttttttttttagaaagtgcacaatttattacatttatgagttcataataaaatggatacttaggaactttaaaaatgagttagaagtaacaattagatgtaaaattctcaaatcttggaaactgaaatattaaattctagaattttcttaaaaactctttcttatgaaagagaaatttgcatagtttgaaaattattatgtcctttcaagggaaaaaggaggaattaaaaaacagacacattgatgaaggcaatgagttcttctcagctggtttattctccactgaagctcaatataggattatattttctttacttacaggaagtggtcactgctctgttttccaataaccctcaaaacagaacaacaatgcttacgcgaaataacacaagccttaactattatactttgcaggctttaccatttcaatacacttctagtccaactgctttcccaactctaaagttctgtgagtgaactatgaatatttttaaatattttccagattcatcagggaggctgcttttcttctctgcactgtaatcacactgagctgctgggaagctgaagcagctctctcttctgcctgacttagacgcctttgaagtctgtggctttttcttgatgctctagaattagctttcattctcagctaccttttcatttgccatttccagctgagaaagaagtcttggggtatgaggttct

SEQ ID NO: 3132 - DNA, 748 bp, Homo sapiens
tttttttttttttttcttttgcctatttgctctaactaaaacttctagtactacgttgaatacaaatggtgaaagtgggcatacttgtctggctcttgtccttagagaaaaatctttcaacttttcattgttcagtataatgttagctgtgagcttgtcatacgtgatctttattatgttaagctacattctttgtatacctcatttgttgagtgtttttatcatgaaaggatgttgaattttgtcaagtgctttttctccatctgctaagatgattatatggtttttgaccttcattctgttaatgtggtatatcatatttttaaattgtgtctgttgaaccatccttgaatctctgggataaatcccacttgatcattgtgtatgatctttttaatgtgctgttgaattcagtgagctagtattttattgaggatttttgcatctatgttcattagggctattagcttgtaattttcttttcttgtagtctttgtgtggcttggtatcagggtgatgctggcttcataaaatgagtttgaaagtgttctctcttcttcaattttcttgacgagcttgagaaacattggtattagttctttaaatgtttcatagaatttagcattgatgccatctcatcttggacttttctttgacagaggactttttatcacttgattcaatatccttactcattatcctgtccagattctattcactataatctgcttgaagctgatgtcaagat

SEQ ID NO: 3133 - DNA, 664 bp, Homo sapiens
aactgcgtacaagaattcctcagccactgcaaatacaacatcgatggagtatgcgtacgtcttccagtaaaaaaggacaatataaataaacatcttcaagaacctctcagggacgtctgcacgtctactgtggggcgcacagcacagatggacgcaggggctggggctccagggcagttgctgccacacccgccggggtcctaccacactacactcagaaacgtcacacggagttggaaaaaagccacagcttgctcagcttccgacaaagagcggattcacagtccgttcgatctcagagaagtgagtggggcacccacttcatggggccaaccccactaaaacaacaacacaggcaacgcaaccaaaaactaaaacaaaaaccaaaaaacccacaacaaccccgattttttttgaaaactcatggctcgtggtcaaaaaagtaaatgcttttcaaaatgttttgaaaaccctcaaaaaaaaacagcacttccttaaaaagaaaagtctagtaacgaggccatcccggcgtcagaagcggtcaggctgggtttgacaagatcagaaccgaaatgactacgacaagtgggaataccaggaggtgctttacttacacattaacgtccagcgaagctcccacaatctttaaacacaccagcccatg

SEQ ID NO: 3134 - DNA, 664 bp, Homo sapiens; identical to SEQ ID NO: 3133

SEQ ID NO: 3135 - DNA, 746 bp, Homo sapiens
  misc_feature (125)..(125): n is a, c, g, or t
aggatttttttctatatggttagaaagcaagttctataaacaagggtgttaaagtgctgaggtgaaagagctgtagagtgttattttattttattttattttcgagacggtctcattctgttgcncaggctgcagtgcagcggcgtgatcacagctcacaacctcgacctcccaggttcagtgaatcctcctaatctgttttctgagtagctggcaccacaggcatttgctactgtgtctggttaatttttcttgtactttttgtagagacagggtttcactgtattgcccaggttggtcttgaactcctgggctcagggggtctgcctgcctcagtctctgaaggtgttgggattacaggtgtgagccaccacacctggccagtaattttaaatagagtggttggcagagtcctcattgaaaggtagtatgtagagcagaaatctggaaaatgatctgaaaaaagaagttagccaaatcccagcactttgggaggccgaggcgggtggatcacctgaggtcaggagttcaagaccagcctgaccaacatggcaaaaccctgtctctactaaaaatacaaaaattagctgggcatggtggtgcacatctgtaatcccagccatttgagaggctgaggtaggagaattgcttgaacctgggaggcagaggttgcagcaagctgatatcatcccattgcattccagcctgggcaacaagggcaaaactctatctcaaaaaaaaaaaaa

SEQ ID NO: 3136 - DNA, 160 bp, Homo sapiens
ttttttttttttttttttttttttcttttttacagaatatagctttatttatagaatcttacaaataaaacatttacagtccacataagttaattttctcttttgcataagattaaaggaaggaaaagtaaaaaaaaaaaaaacaaaaaaaaaaaaaaag

SEQ ID NO: 3137 - DNA, 595 bp, Homo sapiens
tccaatggagagtttgttttgctaccaatatcatacgggactttccaaatgtcgtaacaactgccgccccattgtacgcaaatggcggttaggcgtgtacggtgggaggtctatataagcagagctcgtttagtgaaccgtcagatcgcctggagacgccatccacgctgttttgacctccatagaagacaccgggaccgatccagcctccggactctagcctaggccgcgggacggataacaatgttcacacaggataacagctatgaccattaggcctatttaggtgacactatagaacaagtttgtacaaaagaagcaggctggtaccggtccggaattcccgggatctttgcaaggagagccaaagctaagacccccgaaaccagatcgagctacctaagaacagctaaaagagcacacccgtctatgtagcaaaatagtgggaagatttataggtagaggcgacaaacctatccgagcctggtgatagctggttgtccaagatagaatcttagttcaactttaaatttgcccacagaaaaaaataaaaaaagggcggcaaaaatttaacacccatagtaggcctaaaagc

SEQ ID NO: 3138 - DNA, 630 bp, Homo sapiens
gcagtggtgagatcttggctcactgcaagctccacctcccgggctcacgcatttctcctgcctcagcctcccaagtagctgggactacaggtgcccgccaacatgcccggctaattttctgtatttttattacacgacaggtttcaccgtgttagccaggatggtctagatctcctgacctcgtgatcctcctgcctcagcctcccagagtgctgggattaccggtgtgagccaccgtgcccggctaggagaaaatttcccatttgtgcccttatttagaactaaacaatatcttactgaatttactatttgtatcaaagtccttattctcacagttctcttgattttaagacaacattcattacggagctagccagtgtgacggtcatgacttgaggacccatgaattcctacttcaatcaagttctcagcaagagacagaaatttatttcacatgggcactctatatatgtaatcttacaattaatcatgttataatcttttctgacagtggtctaaagttctatacaaatcttagcagtaatcccactagcccttttagccaaaagggctgaccttgtattgtgaatctccgtatcctccatcaagggtctggcacaataccatatt

SEQ ID NO: 3139 - DNA, 753 bp, Homo sapiens
  misc_feature (98)..(98): n is a, c, g, or t
  misc_feature (326)..(326): n is a, c, g, or t
tttttttttttttttttttttttttttttgggggaagaaaaagaggtttaattggacttacagttccacatggctgggaaagcctcagagtcatggtngggagggcaaaagggcacctcctttactgggcagcagcaaagagaaatagtgaagagaggatcgcaaagagcagaagcccctgtataaaaccatcagatcgttgatgagacttattcactaccacaagaacaatatgggggaaaccgcccccttgattcaaattatctctcactggatccctcctataaaatgtgggaattatgggagtacacattcaagatgagatntgggtggggacacagagccaaaccatatcagaggtatattcatatttgcatgagtatatctgaggcaagatacatgcacatagtattattcagttaaattatcttactgcataatctctgccggggcaggcaattttggtgaacacatgaacgtgttttagactactgggacctcactggctccctgtggtaataatttacttaatagtaaattatccacaggctaggaagtcaaatttgattataacaaactctcttaagtggtagaggttaagaaggaagcaagagacaggcaagcaaaaaacctcaaaaagcagctggaaataggtggtaatgggagagcaggtacttaaaagaagggtgccagtttatcaatgggaaagaaagaagttaaagacatacattatatactttaatcctagtattc

SEQ ID NO: 3140 - DNA, 609 bp, Homo sapiens
tttttttttttttttgaaaactaagacatacctgggtgttgtggggggggcctgtagtctcagttacttgggaggctgaggcaggaggatcacttgatcccagcagttcaaggttgtagtgcactatcattgtacctatgaatagctgttgaactccggcttgggcaacatagcaagaccccatctctagaaaaaaaaaaaaaaacctaagacacaaacacacacatttgcctaggcctacacagggtcaggatcatcaatatcactgtctactaccacctccacatcttgtcccactagaaggttttcagggacaatagtatgcatggagatgtcatcttctatggtaacagtgccttcttccaaaatacctcttggaataatacttcctggaataacagcaacaaacaagggtaatttgaaattaaaaatataataccattaacattagcaccaccaaaatgaaatacttagctgtaagtctaataaaataggtacaagacctattaaacagaaactataaaaactctgatgaaacgaaatcaaagaactgtaaaactgaggctgttttacagttaacctttttttcaaaactcaaattagaacact

SEQ ID NO: 3141 - DNA, 116 bp, Homo sapiens
cactaaatatcagtgaagtcaccactggaatctcaatagcacattttcctgctttcttttctcccttctgctaaccattgaagaccagggtcatccgatgggagcagatgagtagg

SEQ ID NO: 3142 - DNA, 116 bp, Homo sapiens; identical to SEQ ID NO: 3141

SEQ ID NO: 3143 - DNA, 624 bp, Homo sapiens
ttctaattctggtcacttattatgtttctcatttcattgaattgtttattgagcacctttaaaatagctattttggattctctatcaggcagtacatacatctttgtctctttatggtcagtcactagtacctcattttgtctgtttagtgacaacgtgtttccctgatccttgtagtcatgcattgaccttctgtacattgaagaagtaggtacttattccagtctttgtaagcttttgtggctttgttttggaacctccttcaaaagtaagcctgttcagagtttctaggcaggttgtctggtctggtccctaatcctcagattgctgtagctgtggtagcttagcatgctaagcccatggctaccaaggctggtacagcactgggatatacctgaagctcttggctgctgagagcctgcctgttgctgtgggttattcatagcctaaggccactgtagtcagctggcagtgatgcaggccagaactcaaatctgtgttataggggctgcaggtctctggtgctggggtgggtctagaagctcagttcacaggtgtcggcctggagttgaggccctaaggtctgcctgatgctgggtttatggtgggcaggctccagtattg

SEQ ID NO: 3144 - DNA, 544 bp, Homo sapiens
ggtgaaagaaggcagtctgcctgggagctgctcagcccccttccccatcagcctagcccctctttgaaccatgccagttctagacggcctacaggagcgcgaatgagtgaggaacttggcacagagcacctttctgtagtaatccccacagtgaggaacagagggatgtggctagagggcagaaatgaccaaggaaatttatgaacctgcctgatcaccacccccaacacacacacacacacacccatccactaagctctggctgtggacaacagaagacaaaaaaccacccacaattcgagcacagtcctgagtcaagggagcctcagggaataagacaagacatggcaggcatggttcaggctttactgggcatcacacggagctggggtagggacccagcaaagggagcagggcatacagatggtctttgaggacagtgctagggagctcagagatcagtctggcttctcaaagaagagaaaagcactgacaggaaaagcagtcaggttggcgttagtgcaggggaacaggcaagaccgtt

SEQ ID NO: 3145 - DNA, 674 bp, Homo sapiens
  misc_feature (590)..(590): n is a, c, g, or t
tttttttttttgatatggagtctcgctctgtcacccaggctggagtgcaatggtgagatgatcttggctcaccgcaacctccacctcccgggctcaagcgattctcctgcctcagcctcccaagcagctgggaccacaggcatgcgccaccacgcccggctcaccttgtattttcagtagaggcagtgtctcaccaagttggtcatgttgaactcgcgatctcaggtgatcccgccccgccctcggcctcccaaagtgccgggaccacaggcatgagccatcacacctggccacatttttttttttttttaatcgtagttgtgggccaggcatggtggctcatgcctgcaatcccagcacctcggaaggctgaggcaggcagatcgcctgagcctaggagtttgagaccagcctgggcaacatggtgaaacctcatctctatagaaaaaacaacaacaaagaattagctgggcatggtggtgtgagcctgtagtcccagctactcatgaggctaatgtgggagggctgattgagccctggagatcaaggctgcagtgagccatgatcacaccactgcactgcagcctggngcgacaggaatgaaaacgaaaccttgtcacaaaaaataataataataatgtggtccctgatatataggccagcgtgcaaacata

SEQ ID NO: 3146 - DNA, 176 bp, Homo sapiens
tttttttttttaaaacggagtctcgctctgtgtccaggctggagtgcagggctgatctggcttactgcaacctccgcttcccaggttcaagcgattctcctgcttcagcctcccgagtagctgggattacaggggcgcgggcggcctttttttttttttttttttttttttttttt

SEQ ID NO: 3147 - DNA, 164 bp, Homo sapiens
gcgctgtgggtaaacattgctttaaataaggaaaaaaatgttatcaatgtgctatatcattaaagtaggtgcaggatacactacttaaacttagctaacaaattacaaaagtgaaacagcactgaatggatttgaattacaatgatcttccagtgaaagtatat

SEQ ID NO: 3148 - DNA, 708 bp, Homo sapiens
tttttttttttttttgagatggagtctctctctgtcacccaggctggaatgcagtggcactatctcagctcactgcaacctccacctcccaggttcaagtgattctcctgtctcagcctcccaagtagctgggattacccaccaccatgcccggctaatttttgtatttttagtagagacggcgtttcaccatggtggcgaggctggtcttgaactcttgacctcaagtgactcagcctcccaaagtgctgggattacaggcatgagctaccgcacctggccaaaaaatagtctattgatttctaaacaatggcacaaagaatcatcttagtggatgactgccgagtgccagatttggcactttggcagcatcatatgcagtttcttgccgaaagtcactgaggtgtatagttagcattgatcaatttagtcttttgggttcataaaatcagtctttaaactcgattttgcctgaatgtctactaaagaagtatcgccagacaaactttagttcattgattcaaagagctgtcttagagcaattgccctgtctaagggagtgcattggaaagtttttaccctgtgaaaccggaccaagttgattacgaaatggtggaaaacacgtgcatcatgagccatcctcagataaactccctataggtgtggtgtattagtctgttttcacgctgctgataaggactatcccag

SEQ ID NO: 3149 - DNA, 714 bp, Homo sapiens
gagtaaaacagaaacatgcttttaatatactaatagcataatctcatcccattgcactttttaaaaactatattaagtttcaaagccactcaaaggcaagggtctagcagacagtactttataacaaatcatttttataaaataaaaaaacctgaggaaaatttgtgtatgtacaagattagtattaactcctttaaggcttacatccatgacagcatgtatctaattagaaagctatgggaatcaatgctaccttcccttgctcataaaaacatttaaactgtagttctggcacacgaaatttgccccaaagaaaaatgtctttcaaagcccttctgtccctagatctgttttgcaaagtttctgatatggggtacttaggtcactaatgacaggaattaggatcttgtcttctttcttgttcattattttatatttgtggcttaatgtttcacctgtatgtgaaagattgggggttcaagtcacagtgctgaattttactttttaaaagacaaactatcaaaaattgcttttaaaatcctaattacattagacaataggatacctgttcatacattttcagagaaggcctatgaccatggagaacacacagtttaagagcttagataatctctgaataaagcatcttactactctgaacacagaaacgccatccgggaatccgacgtacagctgcttttgtacactgtcctt

SEQ ID NO: 3150 - DNA, 572 bp, Homo sapiens
aacttcctttgtcgtggttgattggtttgtctttatgggggggggggtaggggaaagcgaagcagaagtaacatggagtgggtgcagcctccctgtagaacctggttacgagagcttggggcagttcacctggtctgtgaccgtcattttcttgacatcaatgttattagaagtcaggatattttttagagagtccactgtttctggagggagattagggtttcttgccaagatccaagcaaaatccacgtgaaaaagttggatgatgcaggtacaggaatacacgagggcatagttctcatagtcggtggccaggatccagtacggtgccgatggcataaaccaggaaaacttaacttccagcttggcaggctctgtgaggttaactggggtggcttcaccttcgatttgattcacagttccatcagctctcaactcctggtttaacactttgatctttccgttttccattagtgagtagttggcctggatgcagcgtccattctcaaaggttgtgggatcttctcaatttcgtacctcttccgagatacttattccgtcaaattctcctg

SEQ ID NO: 3151 - DNA, 724 bp, Homo sapiens
tttttttttttaatgtgaaagtttccattgcttaggtttccagttgctgacttggaacaatccatttgcctggaaccagatattataataaagtgaatcaaacatattaaaaaaatggaaacagtttaaccttcttctcttgatgtagcaagccctgtttaaaaggaaggaaattcgtttttctgtacaaaattaaaaaataatttctttgtcaagggaaaattttatgatccaattcccccaatttgagtacttctgatctacctaaatgttaccctttgtaaatcaagaaaagtatgttaggtgtaatagttgagttgtgaatgataaaatctgcatgtgtattagggagggaatgcatacgtagaaattggcttaacaaggtgtggagccttgtgcacatttatgtctgaaatccatatcaagcccttaacaggcaagattctttaatataaatgagaaataggctttatcttgccataatgacctgcagcctcttagacatgactctctacagaccgatcactccacagaaaggttggccagctcactgaagccattatcttttatttatgcagatcagattgtgacaatccttggaattctttgttttatctctctctctctctttaatcctcttgatacggttttttctttctgtttctatgtgggcaactcccaaacaaggcatttcatgacttcccagtcttgaatgaaattttgg

SEQ ID NO: 3152 - DNA, 687 bp, Homo sapiens
ttttttttttttttactagatctgggtttttggtttctttgtttttgttttgctttgttttgtaattttgaagaataggaacagggtgctttggacatcagttatagtcctagtagtttacctcaactgagggctctgttcaaaactggtgctctctgaaggaactctgtggatacctaccaagattgatcatagtgccccatttcccttgaaagaatcaggatgaaaaggaagaacaagggatgtactccacaaaggtcagtgcttttctccaccctcagccagctgaatcaatagcaagattctgactctattggaggagctgaggctagaggagtctagaggcggctggaggggaaagtggccacagatgtgagagtggcagatacaagccgcagaggtcacatgccaggccaccattcctgaggccacatacctcaggaaaaacctttcacagcctgttctcattcctgcgactcattaaagcacattacagaattgaacagtttttgaacatcatttcttcttagattgttgctgcaaacatagctgtgaaaagttcttgctaaacttttccggtgctttcctgagttcgttaggtcatgatgcactttttgcccaatgccaagttaggttttggcgttggcccaaggacatcaggagtgcagatgccaaacaaccaggccg

SEQ ID NO: 3153 - DNA, 774 bp, Homo sapiens
tttttttttttttttttttttccttactctcacactgaagtacaagcaaacattgatcttggtgataaacagtctcctttaattctacccctaagctcagagtttcatgttcctattctctgatgtgagttgtcccttaataatgtgtcatagtaaccatgaatatttgtgtaattagctttttagaaggaacacaaaaatcaaagatgatctaaaaaatgtgttttgtcatgcttgtaatggctagaaaatgttgtttggatggctgcaaattgcatgataaactttcaagcattttttaattgtttaaaaaaaaaacacgtggcaagttttaacatgttgtcatttttgaacaggatgtaaattacatcagtcacattaacaaatgacccatatggtcaggacttcagaaagaaaccagacggagccaaaaacccccaggcagagtggcttaaggaaatcagagttggaatctcagagatttttaataacttcggtactcttattatagggtaaattggacagactgggtaagacacactgactttcctacatacttaagaagtgagtccaggctgatgcatagatacagagaaatagcagaaattaagaccaagtgaacaagaagcaatgggaccagaaaatatgggtagggcaatacaaatatagagtggagaaagtgttgtgggtatgaacatttttgggtcttgtccagatggctgataagaccagtctggtctgcagcaccaggagatcgacgcagcagatgtgatg

SEQ ID NO: 3154 - DNA, 605 bp, Homo sapiens
tttttttttgtatcttcagtataatgggctttcactatattgccatgctgttctcgaactcctgacctcaagtgatcagctcgcctcggcccaaagtgctgggatacaggtgtgagccactgcgtccagcctctaaatggaatgttttgtgggtatttcacccctttctggcttagtccgctttatcctaatcccagtgaccgccagggagctgctgggaaatgtggacctggattcttgaaggcagtggatgagaaagaagagtgagcaactaggactagcctgggcaacatagcgagaccccgtcactacttacaaatcaaattagccgggcgtgtgcgtgggtgcctttagtcccagccactagagaggctgaggcatgccaggtgcggtggttcacgcctgtaatcacccgcactttgggagaccgagacgggcggatctcgagatcacggagatctcagacacactctctgtgcgtatacctccgatgtgaaacccccgttttcccaccttaaaaatacaaaaaattagccgggcgtgatgtcgggcgcccgtagtcccagctactcgggaggctgaggcaggagaatggcgtgaacccg

SEQ ID NO: 3155 - DNA, 735 bp, Homo sapiens
ttttttttttttttgagacagagtttgctctgttacccaggctggagtgcagggcacaatctcagctcactgcaacttccacctcccgggttcaagcgattctcctgccccagcctcctgagtagctgggattccaggcacccaccaccacgctcggcaaatttttgtatttttagtagagatgaggtttcaccatgttggccaggctggtctcaaacccctgacctcaggtgatccacccacctcaacctcccaaaattctaggattacaggcgatgagccaccacgcccgggccagggggagcccatgtgtctgatgggaagcacgtctcaacagttagtagtgaaggagcagaaaagcaggtcggcagtcacttggctggggcgtgacgtgacatgcttggaatgaggcaggctgggagtggatggtggcgaggcctgggacttgcacatgcctaaggcgaatagagtgagtgtacctgggacgggacgaggagacgcgcgactccgataggagaccacgaagctcagtgccgcaccgggagtcaacggaaccgagccggagacagcggccttcgggacacgagtacaaggacacgatgcccaagtcaagaggcattacgagatggaagcaccgggaacggtccctgactagacgtggatgacaggtcggaggacactaggccgtcatgggtgctggggctgaagtcccacccctctacccctcagtccttc

SEQ ID NO: 3156 - DNA, 125 bp, Homo sapiens
tttttttttttttttttttttttacaggtcttactctgttgcccacgctggagtacagtggtgcgatcataactcactgcagccttgatctcctgggctcaagtgatcctcccacctcagcctcc

SEQ ID NO: 3157 - DNA, 75 bp, Homo sapiens
tgggggtgataaagacacttaacatctactgtcttagcaattttcggatacacgatatattggttattaactata

SEQ ID NO: 3158 - DNA, 663 bp, Homo sapiens
tttttttttttttttctgagatggagttcactcttgtgcccaggctggagtgcaacggcgcgatcctggctcaccgcaacctccgcctcccaggctcaagcaactctcccgcctcagcctcccaagtagctgggattacaggcgtgcaccaccacgcccagctaattttgtacttttactagagacggggtttctccatgttgaggctggtctcgaactcctgacctcaggtgatccggccaccttggcctcccaaagtgctgggattacagggcgtgagccaatggggcctgggccaaggttagccttcctaagaaggtaaggcatcggcttttttgtctcggatcatattatctataatgtgtgaagtagtagagcacagagataacaagagtccaactctgtgactcagtttgggggaagagagatcaggggttaccccagttggaggggaacagaagaagatgctatagaagagctgaggcagaaagtggccatgcagagggctcctagaaaacggtgtccatcaaacatctacaggaaaacagcatgacacccctaagacctgagccccttctgggccccacactccacccgtaagaactctgatggggcttgtgcggcgaaccacaatccaagagaggtgttcacatccatgtgctc

SEQ ID NO: 3159 - DNA, 432 bp, Homo sapiens
gagggctttaagcttgtcttgatttgtggaaacatgaatatcccaagccattatcattgggccagggacactaataataaaagaactgttgatgaagtaaatatctacacaggacaaaaacattaaaaaatgggtaacaaaattagtcactgttcctgcatggtctctctgagaaatgagatgcttctaaagcaaacactctacactttaagagggagccacgatgaatgattacgcttcaacttatccagcaaggaaaataatgtacatcaaaacagaaacaaggtgtcttaaaacatgtagatgaagtacgaaatgtatttctatcttaaaaagaggacagaaaagaaataagcagtcatgctactcctttcaaagggtgaagtgtctctgattagcttgggtcatgcatcaccatctgagtggctaagc

SEQ ID NO: 3160 - DNA, 664 bp, Homo sapiens
ttttttttttttttttgttgactcccgtgtggccctcgtgggagcctgttttggctgcagcggtgtctggggtgatgtggaccccggagctggcaaattctgagggggattccccaatggaggctgagcggcagcatgggaaccggggaggggtgtcgggggcacagagagggtgatcttctcactacaagttgctgctggaagggaactatgaagcacatattcttaaattcaatgactcaaaatatttttaacttcaacaagaaccgctgaagaaaagattgatagctacctggagaagcaggtagtaacattcctggattactcaacagatttggacacaacggaaagacaacagttgatatttctacttggtgtgagcagtttgcaacttttggttcagagcaactggacggggccccctgttgacttacaccctcaggacttttggtcatctgtttggttccagcaattcagtgaggttaaaggactggatgcatttgttctgagcctgctcactctagatggtgaatcaatctacagcctgacctcgaagcctatactactgttattagcacgcattatcctagtgaatgtaagacataaactgacagctattcagagcttgccatggtggactttgagatgtgtgaatattcatcag

SEQ ID NO: 3161 - DNA, 684 bp, Homo sapiens
  misc_feature (411)..(411): n is a, c, g, or t
  misc_feature (461)..(462): n is a, c, g, or t
  misc_feature (508)..(508): n is a, c, g, or t
  misc_feature (530)..(530): n is a, c, g, or t
  misc_feature (561)..(561): n is a, c, g, or t
  misc_feature (582)..(582): n is a, c, g, or t
tttttttttttttttttttttttttttttttttggcgtctctgaaaattttaatttgttctgacaacgaaactaacacagcataaggacttaagccctcaagctaggcaagacactgatggcccttggagaaagcaccagggcagctggcaggaggcgctaagatggattcttggtgggaaaggaatgagggacacacatataaccgtggggaaagagcatctagagtgtgtcgggggccccaacgccagaaagagggataagggatggagctgtctccacgccttacgtctgtgtcttaaagaaggacagaagatgccctttctcgtggaattatgagggacgacggtctgagggaagggagggcaggcagctttactactgtgccctttcactggacctatagcatctngaggcatctgagcagcaaaggttaacatagaatggaggcgtggtcgcaanngcacgtgggacagaggtgggcggtcctcagggtttacaggagccanaacccgtgggctttggcattcnagctcccaggggccagaagcagcatctctcnttctgcggaggaggtcacctngagctcacaggactgggaatgtcggcttgggaccctcctgatccctggttgttgagattcccttgtgtctcaaaagccttggagcagtgaagtgtctctcca

SEQ ID NO: 3162 - DNA, 626 bp, Homo sapiens
tttcctttcttgaggcacatatagtgttggcgggtggaattgaggcaataacactgttttgtcctcatttacagatgagaaacctgagatagagacatattagttggtagaatattagacctggtagttggtagaataagggtttgaacctaggaggtctggctccagagtttggttcactcccagagtcccatccatactgctgtaagctttccacaagctcctttactgtatcccttcctcttaggcttcttatgcttactggattgtggtggaatttgggtggtttaaagcttaagtagatctggtctatgagtattaaacacatgtgcggggactttgtgaacctcatatccttgatgcctgcctaccaccctggtctggctctgctgccccagcgtcttggaatccaaagtcaagcctcatgcctgtcatatgcccacctcttgcatctaattcctcatcagcttatctcttagcctcatcttggccttctgtgcctgatttctgtttcccctgtgtaattcactggttatctcaatgtcacttagtgccgatatgatcacaggaagggatctgagaatgggggtcctgaaacgtgcttccaaaggtttgactagcataca

SEQ ID NO: 3163 - DNA, 652 bp, Homo sapiens
acgcacccagctccaactcctttctttatgcaaatacaaaaggcaaacctggtgcgacacttagtccttagtagcaaccctggctcatcctcctagtctttccctagtatttgcatcaatggctaactaagctgatggcagacctcatcctggggtaatactcattcagggaagcagcaacaaaggagggtggggaaagaggtcaggtcagatttacctaacatgatatgtagcataataggtgcccattaaatctcagctactagtaaagttggtgaggaagaggtatggaggcattaagacctgaagcactgagttggtccataaccctgggctttagaacaaggtctggttttattttctggcagaatcttttaaaatatagaaccagatataaacacatctcaaccctgcaaatctgcgcagcaatgccttgtctctacaagatgcatgctagaccatgagactacatagcaaagggtctttaagaggattggcttgggagaaatagaacaaagcagatcttagggaagcctgggctagccaaaagctgagctacatccctcaaactagagcagtcttggtctttcagcatcatctaatgtcttcttattccaaacattccactgaattttcatatctcctcaggtta

SEQ ID NO: 3164 - DNA, 684 bp, Homo sapiens
  misc_feature (478)..(478): n is a, c, g, or t
ttttttttttttcagctagaagtgagtcactaaatacaatccacacttaagaaaagaggaatgggctccacctttgaaggggggagtatcgaaaacttgtggatgtattgaaaacctaccacagtggataaccctttaatatgctagcctttccagatcccatatttacatattaatagggcctcaagctgctcaaagcttaatagattctagagctcccttccctgacttatggactttagacagagaagaatggggtgtttcagtcttgttgattgtaataccctctcctccctgcaatgcacgtgctcatgcaggtggacgtgcacacaggcacacagtcacccttccggctctggatctggtccacatagtgatcacctcacaactgttacaagcaaaactttctctcccacaggacctccccatccccattcccagtcaggcactggtgcctctggtttctgacttttatgtngaatacttcatactggtaaccccattctttgttctcagttggccttgaagaaaagcagagcaagaatggaatggcattgtaaggaggaggaaaatcttttccttccgccatgtattcaggagtgtgatatcccctatatcctagcaacagtctgggaggtgaagcaagctttgtgtgaatcaaagccaagtctgactgttaacatc

SEQ ID NO: 3165 - DNA, 682 bp, Homo sapiens
tttttttttttttttttttttttggaaagtgtacaaactttattgaaacgcacacgcgcacacacacaaacacccctgtggatagggaaaagcacctggccacagggtccactgaaacggggaggggatggcagcttgtaatgtggctttggccacaacccccttctgacagggaaggccttagattgaggccccacctcccagtggtgatggggagctcagaatggggtccaggagaattggttagggggaggtgctagggaggcctgagcagagggcaccctccgagtggggtcccgagggctgcagagtcttcagtactggtccctcacagcagctgtctcaaggctgggtccctcaaaggggcgtcccagcgcggggcctccctgcgcaaacacttggtacccctggctgcgcagcggaagccagcaggacagcagtggcgccgatcagcacaacagacgccctggcggtagggacagcaggcccagccctgtcggttgtctcggcagcaggtctggttatcatggcagaagtgtccttccccacactccacgtccttcacacccacgtgagggctacgggccaggaaggtggcaggctgggcagagaacacttccttctcgacaggatcgagccttcaccgttgcaggtgtagccagacgggcagcaggctggcgat

SEQ ID NO: 3166 - DNA, 719 bp, Homo sapiens
acagaagattcatagtgtaatatggataaatgaataacttatataaagtataatgtcattttctgctattatcactgataaagatatgtcaaaataaaaatagttacttatgtaaagtataatgtcattgtttgctgttattagtaataaaaacaagtcttctcgatttataatttcaatgcagttttaaataaaatgccaaaatattttaatggatcatgaaaaattaactctttagttcatctgcaaatatgaatgttaaaaattacctatgaaaggccaggcacagtggctcacgcctgtaatcccagcactttgggaggctaaggcgaggggatcacgaggtcaggagatcgagatcatcctggctaacacggtgaaaccccatctctactaaaaatacaaaaaattagccaggcgtggtggcgggcgcctgtagtcccagctacttgggatgctgaggcaggagaatggcgtgacccggggaggcagagcttgcagtgagctgagatagcgtcactgcactccagcctgggcgaaagagcgagactccgtctcaaaaaaaaaaaatattacctatgaaaatgtatgagtatgacagggaacttgccctgcatctatttgaaagcatactgtgaaaaactttggtaactcaaatagtgtagtatttattaaaacaataaacatcattaatgaataaagaatacataaaaaaaaaa

SEQ ID NO: 3167 - DNA, 761 bp, Homo sapiens
ttttttttttttttggttggtctgttgttggtttatttgaaccagtatctccccatgcctctaccctccagcctctggcaactatcattgtactctttgcttctatgcttttgacttcctccgtgtctccattaaagcacttgtcacattggtttgaagtaacttgttgataaaactgtctcttccacattctccattgcttcagaatccagcccagaataggctctcagtaaatgaatgactaagctagaactgaaaaattaatttttataagtgtagcctcttgattttccttctttcataagaaacttccttcttttcataagaactttttgaaactatgggaatattcaagaaaagctatttaaggctatttaaatattcaagaaagactatttaaggatatttaaattaaatctataaaatcttttttgaatcttacaattttaactatcactttgatgacagaagtcttccatttaaggaaaaaattattttaccgataatgtaacatgaattcaatgaataaaaatagtttacttcatttgaaagcctgggtcatctaaatgtaagtccagaagctctttgaatcatgagaaggctacatttaaagttctttttcatcaattcttaatttgagaatttcgttgtttatggctgttttttttccccccaatatggagtttgctctgttgcccaagctagagtccagtgccacaatcttggtcatgcaactccagcttcagttcaagtgatctccg

SEQ ID NO: 3168 - DNA, 625 bp, Homo sapiens
tgactggaaaaattgaaacactttataagtagttatttaaagactggtggactttgcagagaaaatatatttcaattgcatctccaaaccataatgactgatttggaattaggtacgatcaaggctcctaaaattgaatttcaagatgttaccaaatagttggtttttctatttaggccaatgcatttggtggacaatccagatgagttgttggtcatgcaaaaatgacaacgacaaaaacatcagtttaaaaaatggaaggtcaatttggcctttcaattgggcaattccctttccaagcttgattgacattaccggggaagcttttaactgaatttaaagctgctttggcctgaaaaagccagcaaagttactgacggtaagtggtcagcattattattattatttttttttatactattggctgtgtattcatcttggcatcatttccaatactggaggtagaaattgcgtggagactcatagagagtccgaatttgtttatgcacttttgcaaatttgactccaccaaagtgtgttactacaatgttgacttgtgtgtaagtactatgcatgtatgatgttgaaattcctcggcaatgaagagagtcctttcgatatcgca

SEQ ID NO: 3169 - DNA, 743 bp, Homo sapiens
  misc_feature (37)..(37): n is a, c, g, or t
ttttttttttttttatggctacatagtattccatggntgtacatgtaccacatttttttaattcattccactgttgatgggcaactgggttgattccacgtttttgctattgtgaatagtgctgcagtgaacatacaggtgcatgtttccttttggtacagcaatttattttccagacatccagacctatctagtaatggaattgctggtttgaatggcagttcaactctcacttctttccaaactctccaaactgccccctccacagtggctggactaatttacattgcaacagagtatcagttcacccttttctccacagcctcgccaacatctgttattttttgactctttatcaaaagccattctgactggtgtgagatagtatctcattgcggttttgatttgcatttctctgatgatagaacgacagagtctgtcttaaatctcacccagcattctcaagatttcagaaggtaagcctaaatctgcaaaatggaattttccattttcttattttccctttaaaatcacccctacctgggaaaacacccacgtggtaactaaagtaggttttgtagacaacagctttgtgcattctgaaccagtgccaggaaagattttagttgagttaataaatgtaatgagctgaaatgggtcccaagaaagcaatccttatctgcgggaacatggatctatggcattctatgatttccttcttctatatcagtagaatgtgttaa

SEQ ID NO: 3170 - DNA, 786 bp, Homo sapiens
tttttttttttttttaaaaatcagatggggactttattgtgatggtggcaggtccaccagcagatgcaaatgtggggtgctgagagtggcaacacaggccaccccaaaccaacttcactccctcccctgtcctcagccagtacagaagccaaatgtagccccagccctagactccagcccaggcagagtccaagggaggggtgtcagggtcagaagtcacagggagcccagtgactatcaaggtggctgagagcaaggctagggtagggatggggcagagaaagggcagggggtgcagccccaggtggcccaaagcaacacagaggagcaagggctggcattcaagtcagcaggtccctggggagaacagatggtgcctggagtcccacatggtggtacaggtgggggagctcttggtggcaggcagcaccccaggaggagtgggactcctgccgaggctgaccccaacttcaaggctgccaagttctgatgggagtgtcctcctccaggaacatctcccagccccggacgagcagagccctggaggagtgggactcctgccctgaggctgaccccagttttggggctgcaggttctgatgggagtgtcctccaggaatgtcttcaggcccccagcgggcagagcccagaaggtctgaggcatgatgggcatcagtgggatttggtcgtgcacgggtgggcaaggcaccgtgagcaaaggcgcaggggtgggggtatgctgcacaagcctggggagggtgtgagcggcctggtaggccaggcaaat

SEQ ID NO: 3171 - DNA, 727 bp, Homo sapiens
  misc_feature (679)..(679): n is a, c, g, or t
tttttttttttttttttacaaaaaacaatgttatttgtgtacttttaaaacctcacagtaatattttcacactaccttcttggctgaaagttcacactcggaattccagagcagtccatggccaggcccactgggctccccttgctctctccttggctttggtaaccactggccccagggactcagcctgctttcctatccatcccctcagtagctgtcaccatgcaggttaccccttctgtttcttctaccactaactccatgtctgactgcaagtgaaaggaacagaagcccaaacctttgggttttaaggagtttattgctaatctgtaaaacagaaagagacaggagataagcatgacaaaatatagggaagaaatgacttttgcctaaacttccaaactgtgtacaattgaagcctccgctttatagctcttagcacacctctcaaataagaaggcagtactgggaaggctctgaacctgtggcagaaccaccgatagctgtggagctattccaaggagtctgggaatcaggggaattatcaagatcattgttagaataaattaatcttactgtatatatagcagaagttttcaagcatatgtaaatgctactaataaccaaataattacaccttgtttttcttttaaactgtaactctcaaagtatgtcatcncgggaattccggacggtacaggctgcttttgtacaactgtctatgtgt

SEQ ID NO: 3172 - DNA, 760 bp, Homo sapiens
ttttttttttttctgtaggttacacacaaacacacacacacacacacacacacacacacacacccatcctcccatctagctgcaaaacagaaaacattttttcattgaattgtatctttcccgtccttttgaatgcagaacaaacatggaaaatgttcaaaggaataatccctcccaagactatgatgtaaataaagagggggtgatgacgatgtcccctggactcaatgctgatcgctcttcactattacccagggggcaaatgctgccggcgcaaggccaaccacctgcacttcatccacacctccacaacttgtccagcctttcagctgccttggccttcatctcccgtctttccagtgaagaagataaaagcattcattccctccctaaggatgttgtggaaagagtatgtaagaatccactgtgtgtggctgtgtggtctgagtcactctaaaatggaaaatataagaatggaagtatagaaaatatgaaatccttgctttaggaaagaggctcctgtgatctcacttgatgattaaataaatcagtatcactaacacaataacaagtgtttcctactccctcaaaaacattatcatcaaatatatcgcatgaatatatgtacatctatttacatagacacacacacatacttcatctacacaattacacataggaggctgtagttgcatgtatagtacacctgtccaaatcttctcagaactctctgtgtgcaggccagcaaggcacgggggac

SEQ ID NO: 3173 - DNA, 658 bp, Homo sapiens
ttttttttttgagttttgagtattattacttgtttgtgtgtgtgttttcttgttttgagacaggttcttctctgtcgtccaggctagagtgcagtggcgtgatcacagctcaccgcaaccttcatctcctgggcttaagccatcctcccagctcagcctcccaagtagcttggactacaggcacaccaacactcctggataatttttgtaattttagtagagacgaggttttgctatgttgcccaggctggtcttgggctcaagcaatctgcctatcttggcctctcaaagtgttgggattatggcgtgagccactgaacccggccagttttcttttaaatgtaatttatttaattgtaattttatgtagtaatattttaaaataatgatgtgttcaacagtgggcatataaaaactgttgactattgacttttccagtttcgatccggaccccaggcctcactctcacaacgacctcaatttcccaaatagactcaatctttatgtgtttctgagactttgctaaggaccttacactgcagagacccccctttactctcgttactaactcatacctccatcttcaccaggggtatgccaattcagcctttagacagggtctgcaaatcacagcccgcggatcacttctgtccctcta

SEQ ID NO: 3174 - DNA, 706 bp, Homo sapiens
tttttttttttttttttttgggcaatgatatttaagacagactctcattaaggttcaaaagcatttattcaaatatcaacgagagggactggagtaggaaagatgtcatacttagtacaggtgtttttaacttgaatcaaaaccagcaggtaatagcacccttgggtatctgaggcctggttatgagttacttaatcccctgctgtctgctcaacaagcctgatacctgggaaagtagtcctctttgatgagaattagcatcttccagaactgaacctggtattgcttcatgagggcattcccacacacctagagggaaagacaggcactgtcagagcagaaaatgaaaattcacactcacaggacagattcataaagcacaatcagcccttcatctttcacacctatcaaaaatttcaaccacaatgccactgaacttgctaacaagggaataaatggaaacacccaactttcttctaaagcatttctctttatatggcaatatctccatttaaccaatcaggtcttaatgaactactcttcttttcctctaatgaatggacgccttcctaaaggtatggtatacctcccaaacttagtaaggagagtatacagaataccacttgtgttctcaaatgatacaggatcatttgttcatgtatggtgacttcagagcttttatatttttgaataggtctcactctgt

SEQ ID NO: 3175 - DNA, 602 bp, Homo sapiens
tttttttttttttttttttttttttttttttttttttttttgcactatgaggtttaattgggaaacattaaaatggttaactcataatgaattataaaactttgatagttacattgtactatcatttatgaggcatttatttttcattatttacacctgaaagaaacttcatacttgtgtgttctgttccccatctcagagcaagattatgaagagaaggtctaaactacttatataaatcaaaacccaactgggctagaaatgaagtataaagagaactaaatctatacacagctgtgccataagagcattaggtggttttagctcttatctggggtatgaaagcaatttagctcatctcacagaaacaaaagcaggtgctgaatcatgaaaacctcaattatttttagcatgcctcttaatttttctttcccctggtttctggtcgtctgtgcttgattcttgaacaggtaaccacttgagaggatgccggcgatagatgggccatggaggaagtgtcagcaaacttgaaaaagcaaatccggccataactatttgacagtccacccgaactgttcagccacgtacccgtagattaatcc

SEQ ID NO: 3176 - DNA, 690 bp, Homo sapiens
tttttttttttttttgaatatagccaagtattccatttattaacaaaataagtcttaccaagggagagctctgttcgtcccaaacaggccccgcagcccccgcgctgccgcatcagaccagaaggagggaggagtggggagaagaccccagtcgctggggggtccactctgggggctctgccgggccaggcctaggagagggcgggggctgctgtgatccgagagctccctgacgccccaaccttccccgaacgcagctaacgagctcgtgacatccgctgacatcgccaccggtctgctttggagggatctagcgagagtcacctaccccacccctactgccaggggaggggtcgttgcccccacgagggagagaaaaacaaggactataatgcacttcgcaaaatgtaaggggccggcttcacgccagcggggccttctgggactttgaattcaaccaggtgagcgctccaggtgccccgacaggcgcactgtagccactgggtgttaggggcgggagtctggaaggtgacggtagacggccacttgggcccttctgggggcgagcctactggtggggtcagggctctccgtgctcagagcaaggtagaggagcaagggcctacttttggggggcagggtccagaccaaggaccctatgcgcggagggtggcggggaggagtcccgga

SEQ ID NO: 3177 - DNA, 717 bp, Homo sapiens
ttttttttttttttttttttgtagaggtggggttggccatttgcccaggctggtcctcaagctcttgggctcaagcaatctaccagccttgacctcctaaagtgctgggactacaagcatgagccactgagcccagacaaatctcttttctttataaattacccagtctcaggtatttctttgtagcaatgcaagaatgacctaacagagtgtgtaaagaggattttattgattttatgcctgaaagtcattcctcctctggtctttggtgtctcaataaatagccccacaatctatccagattctcaaagttgcaacctgggggtcaaatgtaatttgtatgtgccctcatatttgatctcatcagcaaatcttgctgctcctaccccaaaatttatctcacatctctctacttcttgtctcctccatggtccagttctagtccaagccacagttatctcttcccttcatgagaacagctttgttattactcttggctcccaccttgagtctttttcctctattctcatgaaagccaaactcttcttttgaaagcacaaatatgattaaataacttttctatcaccttaacattcttcaataacttcccattgcactttaaaataaaatctaaactcttccccatgtgccccacttgacaatacactaatccttgctatcaggctttctcatctgagacacctctttccctcgcta

SEQ ID NO: 3178 - DNA, 691 bp, Homo sapiens
ttttttttttttttttgtagagatggagtctcaccatggttgttgtccaggctggtctcaaactcctaggctcaagagatcttcccaccctggcctcccaaagtgttaggattacaggcatgagccactgtacctggcccccaacttctcgaataaaatgaaactatgattcttggcctcactcactaccatgtgacattgatcaaatcacttcacctctccaaacctcagagtctttatctgtaagaaggaaaaagtaacacctacttcaggggctgtcatgaggattaaataaatgtgcccagcaggtagtaagtatacaacacaaagcatctaatggttcattcatacatttgcttattttgcaattattggccacctgccaatgttgggcactgttctaggcacaggggatacagcaagggcaaacacctaactactggtggagggaagacgaaaaacaaatacgtaaagatttgtgccaggtagtgataaaagcaaagaatgacccatggagagggtcagctggggagaccacgcagtaccctactttgtcacagttcatccagtgagggacatttttaccggcacatgaccttaatctttttcattaatctgggttaattcatttccaggaggtcaagtctcttgtggttctgtggaatcaacagatgctccgtggtgtggttag

SEQ ID NO: 3179 - DNA, 269 bp, Homo sapiens
agcaccgtggactcttccttaaagtgggggctgtgttggagctgtcactgagaagggctgggctggcaggtcacccagcgtctctctaccctacaatttagtaatttgaaacaacatttatcacctcagattctgtcagttaggaggctgggtccccagccaggagcctgtcacaggctgcagggagggtgtcagctgggatgtggtcacctcagataccaccaggcagggccccttttctcactggcctggtatccatgggggtattc

SEQ ID NO: 3180 - DNA, 676 bp, Homo sapiens
  misc_feature (183)..(183): n is a, c, g, or t
ttttttttttttttttaatttgactaacttcacacataagcccagctaatcttcactgctgcatgttagccaaaatagagttcttccgataaatcctcaggagagagccagggaagcttgattaaaggagagatttttaaagtcatagaggtcaaaacaggttcctttttaggcaattcagtntggcatgactgcaacatgattatcttagtaagaacttccaaattttaaaacaaaaatatactaagcacatcttaatatcacaagaaatagggctagcagttacataagggaagctgacttatcttaacattcatctattaagccctattttgttccatgacccaggcttaaaagactgccattacaattaaacctccatcccccaaagagccctgtctacaagggcttataaaggaagggataagagccaaattccaggttggcctcagttatgtctaaatgtcaacttgcttatcccacacagtgaaacatatgaacatcgtaaggcagatctcttttaagggaaaggggtcaggttccctagtttttcaccccaaaggatagacaggaatgtgctggtctctatgattctatgaccagatagaatcacagtatgtttaccattccattataattctttacactctagacactatgttctcaaaccactctg

SEQ ID NO: 3181 - DNA, 508 bp, Homo sapiens
  misc_feature (202)..(202): n is a, c, g, or t
ttttttttttttttttgagatggagtctctctctgtcgcccaggctggagcgcattggcatgatctcggctcactgcaacctccgcctcccgggttcaagcaattctcctgcctcagcctcccaagtagctgggattacaggcacacgccaccgcgcctggccaattttggtaattttagtagagatggggtttcaccatcntggtcaggccggtctccagcccctgaccctaaggtgatccacccacctcggcctcccaaagtgctgggactacaggtgccagccaccggcgcctggtccaccccaagaaatattaaatggtagttccttctgcaagagcatcaacatcgaactatgttccagggaaccctggggtttggaggaggtaccctggggactgggcaggtagaggaaagtaggaagctcatgtctcagggaaactcttctactcattggagaaccgtgaaggggtccagttgaaaggaatgatctatggctaaccactaa

SEQ ID NO: 3182 - DNA, 630 bp, Homo sapiens
tctggtatttcccacattctcatccgatttcatggcttcaaacacagaacaaaatcctcattaatataaaaggaagtccatattctgaccagatcagtgaagcacagagaaagatatgaaattcacttacaatgggtcagactcttacaaagttggaatttagcaacatgaatttataatgcggcatatataaaaaattaaagggatgatgtgaagcaaggggggaatctacaagcataaaggatatttactgtatgtgtgatgaagcataaaaatacatttttctccttcaaaaagcaaaatgttggatatattcacataaaacaccttaggctatatcaagaacactatacttaaatacttaagtacatttacatactatttatgtaaatgtattgacttaatcatagcagctctagggattcatgataagctgtgaaaatggtctataaaagataaatgaatgaccctttaaaatagaataaaaattaagtatagcgcaccagcaattttaagcacatatacgtaccattctgaaaatctgtgctcttgcatgttagcagttccttatatagttctcaaaggatgcatccacatcacatatacagtctcctaacctatcgtttttct

SEQ ID NO: 3183 - DNA, 90 bp, Homo sapiens
tgtgaagattataaaagataatgcatataagacattcagcacagatgcctgatacatagtaagtattcagtaagtttttattattgcatg

SEQ ID NO: 3184 - DNA, 731 bp, Homo sapiens
aagcccaagcatctgcagacagagaggatctgcagtataaggaccttgtgagaggtatactatagaccatgggctgactgaagtgaacaggggtagaaggagcccccactcagagcaacaggaagccctacagactgaagtttctttgtaaattgctggccaaagctataaatcagataagttcatgtgaacaactgagaaattaacagcaaatttctgtaaacagacttggcagccaaaccagttaaacacatatgtcttataaatttatccatcaaaaataaaggagggaatacaatatctaatatttggagggtgtatataaattatagcgtttatatatatatatattcttttatattatatactcagtagtgtagaaatgagaagcatagggggtggtggtggctcgtgtgtgtaatcacagaactgtggagggaggccgaggcgaggaggagtggttgcatccaggagtaggagacaggcgtgggcaacataggtgagaccccatctctacaaaaacgtcaaaagttaaccgggcatggtggtgcgcgcctgtagtccaaacactcaggaagctgagggggaggactgactgagccaaggaggtcgacatgcagggagaccatgattatgccactggactcagcctagatgacaagagtgagacctgtctccacaaaaaaaagaagcaagaacatatctgtcagttcatcacccgtttaataata

SEQ ID NO: 3185 - DNA, 589 bp, Homo sapiens
cgtttttgggcacccaaaagtcaacggggactttccaaaatgtcgtaactactccgccccattgacgcaaatgggcggtaggcgtgtacggtgggaggtctatataagcagagctcgtgtatagtgacccgtcagatcgcctggagacgccatccacgctgttttgacctccatagaagacaccgggaccgatccagcctccggactctagcctaggccgcgggacggataacaatttcacacaggaaacagctatgaccattaggcctatttaggtgacactatagaacaagtttgtacaaaaaagcaggctggtaccggtccggaattcccgggatctttgggaggccgaggcgggtggatcatctaaggtcaggaattcaagaaaagcctggctaaaccccatctctacaaaaaatacaaaaattagctggttgaggtggctggcacctgtagtcccagctactcgggaggctgaggcaggagaatcacttgaacccgggaggcggaggttgcagtgagccgagatcatgccctgcactccagcctgggagacagaaagagactgtatcttaaaaaaaaaaaaaaa

SEQ ID NO: 3186 - DNA, 782 bp, Homo sapiens
tttttttttttttttttttttaaattagtcaaacattttattatagagtatatatttatatcaaaagcacaaaaacgtttattctgaaaaccaggaagattgtgatgttacagaagaagattcaataattccagtccatttctagggtactaagtgtctgatcacgtcagtgaaaacaagatacaaatgaggccaaggtcacaggtctggccaccctgagtccccttcgcaattaatttgggtttccttccaaaggttggaaacaggttttcccagtccaagtatgagcacacctctcacagaggtgttggtcatacatagctcttaagtgggtacttagccaaagactacacccaaatataaccaaagcttgatgttgaagtcataagattaatccttcaataataaggatagcataatgggcttgttacctaattctacataaacaaaatcatcaaatatcctggcataactgaaatgacttacagaggaagtagtaaagcttggaagtattctatggtaactgagctgaaaaaggggaaatgccaaatgttgtaaatgccatcattaccaataagagtcaccaaattctcagaaataggtaatggcagctcaagggcagttagcactacaagatttctctggcctttaaaaaaaaatcatttgtaagactcctttttttaaaagggtacatcagaaaataaccgaaataccaaaattgaaggcacatgagtaaataaccacaaattaaaatcgattatattcggtggtcctacaaacat

SEQ ID NO: 3187 - DNA, 444 bp, Homo sapiens
ttttttttttatggcaatcagaagatcagggaaatagagccttcatgaaatatcccttggtttcctgaaacccatacactttcttttttttcttctggggttgtaaataagaatcatgtaactagtatccagcctcttgaatataatcttttcagcagaatgattacaatgattattataatataggaaatttaaacattcacctaaaaataacaacacttttggtacccatgtacatacgtggtagtggtgcatgtttaaataatttttgacatataacttgaaaagcaattaaaacaaatatgcattgaaacatgcattgaaaggcaatgcatgttggttttaataattcaaataatatagagggtataaaaaagagtaatattctatttttcttgcatttccagtagcaacgtgtcctatttcatgtaatgtcatcttagg

SEQ ID NO: 3188 - DNA, 723 bp, Homo sapiens
ttttttttttttttttttttttttttgggaggtgggggctttaggaagtgattgagtcacgggggcaaagtcctcttgaaagggattagtgcctttatcaaagagagcagagagggggagggagggttgagacctctgtgatccttctgccatgtgaggttaaagtgagaagacggctgtctaggaggaaatgggccctcaccagacaccaaacctgattgtacttcccaatctccagaactgtgagaaataaatttctgttgtttataaagtagctggtctataatattttgttatagcagcctaaatggactaaggcacatatatgtccctctatatatgtacgagtatgtatatgtatgtatgtatatgtatttatatatttatagtataaacacacgcacatacgttttatatagctcactagttcactatgggatttgacttcagaacactactgattgtttctctgattgaaccctgaatgataaagaccttggtattggaggtggttctgtaagaacagaaccttacagcagatatgtatgtttataaatatacaactaaaaataggtatatttaaagttatatacgtcttctatttatataaggactccagttccagtggtaaagagggcactggtagtccatggcacgatgtggcaaacattgccattggacagcccagtgagtgcaaagttaacccgagaggacggacactgg

SEQ ID NO: 3189 - DNA, 657 bp, Homo sapiens
  misc_feature (643)..(643): n is a, c, g, or t
ttttttttttaacagatactgatgcatcttgtatcctgccttggatgtataaactagaatacaaatgttcacaaaatattatccacattccagaactataattttttaaaaatagtaggctttttacaaagctgccagtgcatattaaaagtattatccttgtcaaggtaataggagaacaacgcagtatacagaggaaaaagcaataatgtgaataactctttgacttcctaaaagccaaggccaatctttacgtagccaaatttgttgagttttaatgaaggcctggtctgggctgaggcttccctggctccttgtagcagttatcatgagatactgaaggttttgataaatttaagaaacagtctctgtgagatttaatgttgctttcaaaaaggtcaaggagaaactgagaattctttgctctgtaacttttatccatatccacagaatcctgaccttgggattagcagaatttttaggattagaacatgttagggcaactgaaaataaatgctgacaaatccctattattacaataataattatcatttccttattattataatgaattaccacgtatttcctgacctaattcaacacatttttttttcttacattaatggaggtcagaaggctaaanatcaagatgccttc

SEQ ID NO: 3190 - DNA, 627 bp, Homo sapiens
gtgcaatggcgtgatctcggctcaccatgacctccacctcccagattcaagcgattctcctgtctcagcctcccgaatagctgggattacaggcatgcaccaccatgcccggctaattttgtatttttagtagagatggggtttctccatgttggtcaggctggtcttgaactcccaacctcagatgatccacccacttcggcctcccaaagtgctgggattacaggtgtgagccagccaccatgtccggcctaaataacattttggaaataaaattgaaatagagatgaggcctcactatgttgtctagggtggtcttgtactccttggctcaagcgatctgcccacttctaccttccaaagttctgggactacaggcacgagccaccttgcctggcctcctcgtgtgtgtgtgtgtgtgtgtgtgtgtgtgtgtgtgtgcgcatgtgtgtgtgtgaaacagattcttgctgtgtcacccaggatggagtgcagtggcacaatctcggctcactgcaacctctacctcccaggtttaagtgattcttgtgccttggcctcccgagtagctgggactacaggcacgtgccaccatgccccaaacatcacttggcttcgaagccgccg

SEQ ID NO: 3191 - DNA, 578 bp, Homo sapiens
tctttggcagtacatcaatgggcgtggatagcggtttgactcacggggatttccaagtctccaccccattgacgtcaatgggagtttgttttggcacgcgaaagtcaacgggactttccaaaatgtcgtaacaactccgccccattgacgcaaatgggcggtaggcgtgtacggtgggaggtctatataagcagagctcgtttagtgaaccgtcagatcgcctggagacgccatccacgctgttttgacctccatagaagacaccgggaccgatccagcctccggactctagcctaggccgcgggacggataacaatttcacacaggaaacagctatgaccattaggcctatttaggtgacactatagaacaagtttgtacaaaaaagcaggctggtaccggtccggaattcccgggatcgcgagcggccgcccgcggcgagcggccgccctttttttttttttttagattataaaaacttcctctttaatcaaggcttttaacatgaacagatttcttgaataaaatggaaagtttccagtacactgaaacataaatccgcaagtcaccacacatac

SEQ ID NO: 3192 - DNA, 555 bp, Homo sapiens
ttttttttttttttttttttttttttttttttaaagaagtaagcctttatttccttgttttgcaaataaaactggctaagttggttgctttttggtgattagtcaaagagaccaaatcccatatcctcgtccgactcctccgactcttccttggcttcaaccttagctggggctgcagcagcagcaggagcagctgtggtggcagcagccacaggggcagcagccacaaaggcagatggatcagccaagaaggccttgaccttttcagcaagtgggaaggtgtaatccgtctccacagacaaggccaggactcgtttgtacccgttgatgatagaatggggtactgatgcaacagtcgggtagccaatctgcagacagacactggcaacattgcggacacccaggatttcaatggtgcccctggagattacagtggtgatacctaaagccatggaaaaaggaggcctactcgggcccgagaccaggtacaagggctggcacagtgacttcacatggggcaatggcaccagcacggggcagcagctggcaccctat

SEQ ID NO: 3193 - DNA, 737 bp, Homo sapiens
  misc_feature (505)..(505): n is a, c, g, or t
tttttttttttttttagtacagacggggtctcaccatgttggccaggctggtcttgaacttctgacctcaaatgatctacccacctcagcctcccaaaatgataggattatagcatgagccactgtgcccagccccaaataaaatttcaatagaagatcaaaagtgcatgaagggccaaaatatgtctaaagaggagtaacgtcaaaaggcttaatctaacatacaaaatttattataaagataacgtgttggcatataaataaacacaccaatagagagcacaggcatagatcatgcataaatgagaatataatacatgacagaagtgaatggcaatcattgaaggaagtatggatttttttagtaacgtatgggacagtttgttatccatatttaaaaacaaaacgaaactgaatcctgctatggggtctgaatgtgtcctccaaaattcatgtattagaaacttaatccccaatgcagtactgctgggaggtagggcctttnggtaggtgttcaggtcgtgaaggcaaagccctcacaaatggattaatgtcattataaacagggcttcacggagggagttggcccttatttttgcccttctatccctttgccagatgaagaaggcacagagttctcccctctagagaatgtagcacaacgtgcatccttggacgtaaacaggcaggctctcatcagacaccaatctgctggtgtctgacctagatctggctca

SEQ ID NO: 3194 - DNA, 697 bp, Homo sapiens
  misc_feature (606)..(606): n is a, c, g, or t
tttttttttttttttttttttttttttttttttttttttttttttttttttttttttttgagtaacacctctttactcagcaacgtgctcctccctcgggggaccttccccagtgcccctccatgctcgaagggcctggaaggatcagaatgcaggcctttcccaaggacggcacagaacgtgatgaggagatgccactgggggtgcagaaagctccccatccccctggggagaggcgtcagcgtgccctcagggtagtcaggtcctgagctttggactcctcgcttggttaaaggcactgtcccttgtgcaatctagaggaatgctcctcaaagcatctctcctggggaccaggagagccgcccctgctcccaatgcaacaagatccctgatcgccagcctcttgcctccctcagagggagacaagtccgcactggagggagcacggctgcctagctccctgtcacctcctccagcctctctatctgttcacgtgggacaacagaggatccctgaagccgctggaggagctggctttgcaggtcttcctccatcaccttccaccaagagaagttctcaccccgaacttttgggggttcatcctgnatccctgggctcgaaaagacacggtcaacagcacattcaaacagatgccatcactgtgatctcggccccaggtgctggagtccaaggcaac

SEQ ID NO: 3195 - DNA, 697 bp, Homo sapiens; identical to SEQ ID NO: 3194
  misc_feature (606)..(606): n is a, c, g, or t

SEQ ID NO: 3196 - DNA, 663 bp, Homo sapiens
tttttttttttttttatgggcaaatattagcaatttaatattatataaacataattactgaattattacatacagcttgatgtcctttctatgcattaaaaccaaacaaaataaaggcatttttaccatcacataagaaatgagaatacacacgcacacaatttaaagtgataattatcttggcggaaggagcgaaggtgggggcgttacaggatgagatatgacagaagttattgttagagtcctagttttgaagttgggtagtaagctcattggtgctcgtgacattattaaaagaaacaaataatcaggggatgcgtgcatccatgaggagaaacgtggcatgaacaataggtataaattctaactctcacctccgctgtgaatgaggcaaagatctacagcacatttacttgatcacaacagtctgtgaaaacaaagacacgttagtggccacgggtgggctgtgacaactctagtctcacctcgatgagtcaggttaacaccaggatattgacacttctcttccttcacgtaatctacagctatgagtgtgaaagttataaggttcttgtgagtcttgagtcatttgccaatttacaccaggtttgtgtgtacaacgttcttttccccagaaaaattcttaaaacacaaaaacaaatt

SEQ ID NO: 3197 - DNA, 663 bp, Homo sapiens; identical to SEQ ID NO: 3196

SEQ ID NO: 3198 - DNA, 760 bp, Homo sapiens
  misc_feature (675)..(675): n is a, c, g, or t
tttttttttttttttcttacaaaaggccttcatatcatcgttgtcttacaaaaaccaaagtccttgtctctgagtttgaaaaacatcttcccagaataaatgggaaaggatctcttataaatatatatatattttaaaaaagcaaaacatgttcctaaagcatcttcctttccagtttcttttgttccttcgcttcctggggccaagactagagtcacacagccgcctacccgctctccctctgctctttccgggagcttccttcactggcccccagggtccgcctggagtgggagagcccagcagggcccaggcatgcgttaccagcacatggcagggcccgccgtgcccagggactgcacgttgcggagggcagggcggacactgtcctcataggcactcggttctggggacgttagggctcgtcagctgggccacagcatctcacagatgaggagaccgaggtccagagggaacagggcccagctgtggtcacacagccctgtctgcacacatccccgaggttgggactgagaacttacgtggtgtggcagcaggagggggctggccatctcactggctgagagcccggcccagctgcctgtctctctctggcttagatgtagggcttgcgtggaggggtgactggaggcaggccctggaagcccatgagtnggactcacactcagaccgctggcaggctctcacgccttgtgctcgggctgtcagggactctccctcgtccggcccgccctggccc

SEQ ID NO: 3199 - DNA, 760 bp, Homo sapiens; identical to SEQ ID NO: 3198
  misc_feature (675)..(675): n is a, c, g, or t

SEQ ID NO: 3200 - DNA, 759 bp, Homo sapiens
tttttttttttttttttaaattccagagagatttttattccacaattagattttaacatcaataaaatcttagatataacaatacagatgaaggaacaattgaatttgcattgaaataaatattagacatacaaagcatatacagtgaaaaagggtcacaataaattacaagtagagacattatttccctcaatcaccaaagaaagcccttgatacttccaatttcacaccatcaaatttatcattcttgctgatttaagcagaacacaaaacaaatatggatcccagggcttactttcacaggtaccagcatggataatttactatcgtgatccaatttggaaatcagtagggaccagtaaatcactgcataaaagaaagagtgaatgaggtcctttttccttagtgtcagcaggctatgattattatgtttattagattttcttgaaaggacttcacattttctcaaatatgcaggagaactgtatttcccctctgagccctacattagcatttatgtgctttggtcttgaatacaggggaatgaatttttcaatttattttataaatttatatagtctggatagtattggcctgaagaatgtactccccaactgtacactattagatatcaaaaactggattcacgagaagttactaagaaatgctgacatactgtatatacaatcttagttcaatatatgccattatatacaggccaagtactgcttataaatcagccatttatgaaccgtcaac

SEQ ID NO: 3201 - DNA, 731 bp, Homo sapiens
ttttttttttttttttttttttttttttttttttctgctccttttcctttttattaaaaaatagatcaagaaaatatacacacttcagtccatccaccatggtggatgctttgaggaggccaaagcaccatggggatgggatggaggcattgggagagccagccctgccctcgtgccaagggtgcagagaaggagggtgccctcagccaaccttgccaagcatggccctggaaggaaagcctgggccatgtcactgagcagtatgagagcaggtgggaaggggaggagggtccccagtgagagcagagatggcaaaggggattgggagccccagggaggtggggcctccagactcatggtgggaacagggccacacagggctactgcccacagaacgtcccttgacctggtcctcctcccctggggactctgggcctgctggcctcctctctggcctgtcctccacaggccctggcagctgccctcaggcatttgatggccttccagcgctcgctgtctgtgctgttgatgctgccagtgtggcagggcatggcacgcgatgtcatccaggtaggccaccccgccggcagagtcgaactgcgtgctcgagtagctggcagctgaggccccagcaagcccctgcagcctcccagggccctcccggcgggccaccaggcgtagggctggggtaggtgtacatctggctcctcctgtttcctccattgggcatc

SEQ ID NO: 3202 - DNA, 731 bp, Homo sapiens; identical to SEQ ID NO: 3201

SEQ ID NO: 3203 - DNA, 390 bp, Homo sapiens
cttgttttgaatgttttgtattatactgtttttgtgtgtgcataaattcattctgtaggatcttaagaaaaagagtcccagaatgttgcttctattattgtgcacaaccattgagaggtgttacaagaatgcagttaattttaacatgtgtgatgtgccagtggtggaaaagtactatcggaataactctgcagtgacagaatttgaagtttggctagcatccatacttttctactgtaaatatttcactctcctctagctatccttgatgagctctcactttaagaataaatgtgtttgatataacaaacaacaaaaaaaaacaacaaaaaaaaaaaaaaaacaaaaaaaacaaaaaaaaaacacaacaaaaaacacacacacacacaa

SEQ ID NO: 3204 - DNA, 533 bp, Homo sapiens
ttttttttttgagacacagtcttgctgtcacccaggctggaatgcagtggtgagatcttggctcactgcaacctctacctcccaggttcaagtgattctcctgccttagcctcccgagtagactgggatcacaggcatgtgccaccatgcccagctaatttttctatttttagtagaggcggggtttcaccatgttggccagactggtcttgaactcctgacctaaagtgatccacccgccttggcctcccaaagtgtagggattacaggtatgagccaccccatctggcctaaaatgtctattaccacttaagattatacgtacactttctgaaagtcccacttatcacgagataactcacagaacattacctacgctcattcgacaagccaaagcactattcagcatattcgaattcgccacttactactccataggactctgcagcaaatccagaacaggctgctggacatccggagaatgtgcaacgtgtgctcctcctccatcctccatcgccatcaacacggatcgg

SEQ ID NO: 3205 - DNA, 705 bp, Homo sapiens
atcgccgcctttgcactccagcctggcaaaccagagccaactccgtctcaagcatattaacagggagggaagaagaaaggcttgagatcttttaagaactgcaaatactccaaggatatgaaataagaccttagccgggcacggtggctcacgcctataatcccagcactttgggaggcggaggcaggtgaatcactaaggtcaggaagttcaaagacccagccttggcccagattggttgaaaaccctgtcttctactaaaaataccaaaatttagccggttgggttgtgggtgcctataatctcagctacttgggaggctgaagcagagaattgcttgaaccttggaggtggaggttgcagtgagctgagatcatgcccctgcatttcagcctgagcaacagagccagactccatctccaaaaaaaaaaaaaaaaaaaaaaagaaatagaccttaatgaatggaggaatgttctgtgttcttaaataggcaatttaatagtgaaaccaaaaccaaaaccagttctctccaaattaatatagacagcacatttctagtcaaaaatatcagtcggggagtaggactgaatgaaatgaaattattttaaagttttacattgtaaaattcagtctaacatagctgagagattgatttcagaaatactaaaacttactacaagctgctgcaattaaaaaaaaaaaaaa

SEQ ID NO: 3206 - DNA, 649 bp, Homo sapiens
  misc_feature (224)..(224): n is a, c, g, or t
tttttttttttttttggtttgtttctaaattatccattcccaataaggttaaccaattccaaaatgttttctaagaaaaatgtgacattctaaagggaggctatttcagttttgatttccatttgtattatataaataaatatgaaatacaacatttaagtttaagaaaatcagtatttaatgaatgctcttattattttttggacagctgaatgatatcaagntgttcttggaaattcaattatgataatgaaaacaagtgactactaataacttattgtttagctgagtctgtaaaattcagcaggaacaaaacatactagaatatgaagaaccaaaatatgaaccaaaagcaaaattcaagagtaagaccatttggtagccagcatattgtaaagagcattattttagccaacagaatgatgagactttatgaattttaattcttccactactgttgtggctttggcaaattactaaatttctctgtgactacttttccatttcttaagtaatttggttggtttccaaaagtcaataatgtggatgtagtgttttgagctcttgggaaaaaaggactctacataaattaattagacaattcatttctaaataaaatctcaaaatttacaataagttgaatgtaaat

SEQ ID NO: 3207 - DNA, 709 bp, Homo sapiens
ttttttttttttttttttttttttttttttttttttttttttttgggttaacattccaaacaggtataaccaattaacatggcctagggttttctttttatgggtattcacttcagtaactgtgaatccacagatataagcagtatataaccagaaagttacaagtaaacacaaattatacatgcaaatttcgggttcacaaaggtcacatgtgcaggtacatgaattagaagcgtgcatctaggattatggccaaacggttttaaaaatgcagaaatgtaaaattacatctgtgaaaatatgaagagatggtctacacacttcaaaaatcaaatgtggcttataccagagatgtatgacaatcacgggattcaagtgacaagcagtaagatctcaaaaattaatacgggtcaaagataaggggaatattttggcattctcacggaaaatacatggactactagaatacgaaatctagcaggaactcagggaaaacaaatcacaaaatctaaagccaattacttaatatctcttattacctaaacaaggcatgacatctaacagaaaatgggacctggcatttcaatgggcaatctcacgttcaatcaagttctccaaaatgaactgcaaccaaaacgggttcaaactccaaatgaagtctgcaggtcagattacacctggatgtcagatgaagtataaaacacaaggg

SEQ ID NO: 3208 - DNA, 709 bp, Homo sapiens; identical to SEQ ID NO: 3207

SEQ ID NO: 3209 - DNA, 675 bp, Homo sapiens
tttttttttttttttcattcaagaagtatttattgataggtgctaggcaagatacaaagatgactcagacacagatcctgcccataaggagcttacagtctaataggggagagagaacacatacatggaatacatggtcagaactatgtttcagtaagatgaatctaacattgtgtataaagtaggctggagtaagaggttaagtgaagctgagagactactgaaattacataggtgaggaagaaagacgggaaagacttgaggtagaactgacaggacttagctgaagactggatgtggggaataacaaaaatggaagcagatgactcagactttagcatggatgatgtcatgaactgaaagaaggaacaagtttttgcaaagaaatgaaaatttcatataaaattcttctgcatagaaacaaactgtctgggatatactaggcacaatcaggaagaaatggctagttacccagaccaatggaagcacctcaaacgtggccagtgacttcctcccccttatatatccatccccccaaatttcccaagcaattttctccactgaaatggtatagtgcctaaaatttattaaattcaaggtctatctccagacatggctccctgggaatgaaaacagaaatatataagttattcaactcagtaagtcccatctaaa

SEQ ID NO: 3210 - DNA, 224 bp, Homo sapiens
ttttttttttttttttttttttttttttttttttttttttttgtttttaagcactcaatagatgttatttattattaaaatgacaaacatgtcactgccatggcccggccctctcgggaactcaactctaaaaacgtgcttttatggttactttagaaaatcataaaaatctcattaaggtcacatattttggatccccaactaccatgcagctcagtctccat

SEQ ID NO: 3211 - DNA, 731 bp, Homo sapiens
tttttttttttttttatgtaattcagcctttactgtaaaaaaggaaacaacaaaaacaaaaccctattaataaacacaagcaaacaatgcccgagattatcataaaaacatactagcaagccacaagtaccagagaggggtgaacaggcatatctgctagctctcctcttgcagtcctcagcctcccacaggaggcacaaggtccaaactattcctcaaaaaaaaggacagcctctttatgctgaaataggaactttaaaggaagctcttcttgtagtccaaatggacgtaccttgtggtatggctgtaaggactcgattttacggcttgtgtattcctaactatagctaggcctgtcacctgctgttcctgtgatctcagctttacctagaagagctcctgaaacagaatgggtacacgaaaatctggaatgaatagctatctgctcaaaaacgattgtttaaaaacagatgattggggccgggcgcggtggctcatgcctgtaatcccagcactttgggaggccgaggcgggcggatcacgaggtgaggagatcgagaccatcctgggcaacatggtgaaaccccggtctctactaaaaatacaaaaattagctgggcgtggtgatgccagccactcgggaggctgaggcaggagaatcgccgaaccaggagtcagaggtcgccacgagccgagactgcgccactggactcaagcctggcgacagagcg

SEQ ID NO: 3212 - DNA, 731 bp, Homo sapiens; identical to SEQ ID NO: 3211

SEQ ID NO: 3213 - DNA, 690 bp, Homo sapiens
  misc_feature (304)..(304): n is a, c, g, or t
tccttcaaaatgtctactgttcacgaaatcctgtgcaagctcagcttggagggtgatcactctacacccccaagtgcatatgggtctgtcaaagcctatactaactttgatgctgagcgggatgcttgaacattgaaacagccatcaagaccaaaggtgtggatgaggtcaccatgtcaacatttgaccaaccgcagcaatgcacagagacaggatattgccttcgcctaccagagaaggaccaaaaaggaacttgcatcagcactgaagtcagccttatctggccacctggagacggtgattntgggcctattgaagacacctgctcagtatgacgcttctgagctaaaagcttccatgaaggggctgggaaccgacgaggactctctcattgagatcatctgctccagaaccaaccaggagctgcaggaaattaacagagtctacaaggaaatgtacaagactgatctggagaaggacattatttcggacacatctggtgacttccgcaagctgatggttgccctggcaaagggtagaagagcagaggatggctctgtcattgattatgaactgatgaccaagatgctcgggatctctatgacgctggagtgaagaggacaggaactgatgttcccaagtggatcagcatcatgaccgagcggagcgtgcccacctccaggaagtatc

SEQ ID NO: 3214 - DNA, 615 bp, Homo sapiens
tcgtcccagggacacgaactggagattaacgtactgtggctgcaccatcggtcttcatcttcccgccatctgatgagccgttgaaatctggaactgcctctgttgtgtgcctgctgaatgacttctatccccgagaggcccaagtaccgtggaaggtggattacgccctcccatcgggtaactcccaggagagtgtcacagagcaggacagcaaggacagcacctacagcctcagcagcaccctgacgctgagccaagccagatctacgagataaccccaagtttacgcctgcgaagtcacccatcagggcctgagctcgcccgtcacaaagagcttcaacaggggagagtgttagagggagaagtgcccccacctgctcctcagttcccgcctgaccccctcccatcctttggcctctgaccctttttcccccggggacctacccctattgcggtcctccagctcatctttcacctcacccccctcctcctccttggctttaattatgctaatgttggaggagaatgaataaataaagtgaatctttgccaaaaaaaaaaaaaaaaaaaaaaaaaaaaaaaaaaaaaaaaaaaaaaaaaaaaaaaaaaaaaaaa

SEQ ID NO: 3215 - DNA, 746 bp, Homo sapiens
ttttttttttttttttttccatttaaacatttttataatttgtttcattttcaaggcacaaagagtttatgtcaatcattttaatgtctaagaatacaaagttagcactagtaacatctggtagtctaatcatttatcatgcttaaatgtaacattacaaaactacattttaaaatctggcccccttaaaccaagaatggttgaaaacaaggtgggacaaggggtgacagtggtgctagacccaatctccaaaaacgtatggttgacaaagacagctgacgtgctggggtaaaactgcagcagtcataatcgaagagcgaaagaggccactctattaaagactttgtttcttttgctagacatttttcacctaatcccaggatagtttctggttaatgcatcttactctctttcaaacgaatcgtccctagagcaggtgtacacattaaaaatgagctttatagcatcaaacacataccacaaccaactctacaaggagggttttctgtaagatgtgtacgactgtccgaagaacacattctggctgataagtctcagctcctgtgaggtcctgatgagtatctaaacaacctcacattttctcttccacgcctagggttaaggccagcactcagcccacacacaaagctgtgatgagaggtggtccagggatggtgggaggcaaagccacagatcagccagaaactcttagagtcaaagttctactccctcccataacggacggt

SEQ ID NO: 3216 - DNA, 676 bp, Homo sapiens
tttttttttttttttgtgattgctgccatttatatactatagaaattttacatgctgtatatttacagtggggcaagtgcttttttaatctttagaaaaacaaagatcaaactttaaacatctctgaacaacacaaactgtataaaccatacagattattcagatacaaactgtattaaatacagttttccccactccatctcctgatgcaggaccagtgaattataagtgtatcacagtttgatagcatatccatattaaaaataaaatcacagtatgattgtgtctgtaactagaaactcgaagggaccaagcagacaacggagactccagtatcagtgaagacaagagacgctgtatcaaaaagtgtcgtgtaatagaaacatactgtcggctttacaaatcatgtctgggttatacattcataatgtaaatactcatcataactgggaaatcgattgatggaacagttccacaaagttcaaaaacagaactgtctataaaatacatcttcaaatcttgaatacaactaaaataagcaaattagtttctagtatcagacattacagaaaacagactgctctccaaagtctaggtgagagctgtgagtctaaaaataagtctttaaattacatatacacacctgtcagtttgtacttgttgacaattccatggt

SEQ ID NO: 3217 - DNA, 614 bp, Homo sapiens
ttttttttttttttttttttttgtgagatggagtctcactctgtcacctaggctggagtgcagtggcagtaatctcggctcactgcgacttccaccttccaggattcaagcaattctcctggcctcttcctcctgagtaactggaatatacaggcgtcacaccaccacacctggctaagtttgtagtattcgttaataaagacagggtttcaccatgatggtcaggctggtctcgaactcctgacctcgtgacccgccttccttgagcctcccaaagtgctgggattacaagcgtgggaccaccacgtctggcctaattttctgtattttgagtagataccgggtttcaccatattggccaggctggtctcgagctcctgacctcgtgatccgcctgcctgggcctcccaaagtgctgggattacaggtgtgagccacacacgcccagccatatttatcctcatttataggagaaagaaatctgagagattaagtgacatgctcaagtccacagtggctagaaagatgtggggtatgaagccaagtctgacgtctgactccagcagactgtgcccttagctgccttatctgagccttgtggatcacctagagac

SEQ ID NO: 3218 - DNA, 741 bp, Homo sapiens
tttttttttttttttctgaaatcattcttttatttgcacacacatagctgctatttactggaacactgggaaattcatgaatgcgttgagcatattgaaagctttcatagaaggctcagatcaacaaagcaaagacttctacaggagtaataagtagttgtgtatgcgttgtcactctgggcccatcagcacgcggtgccctatcgatagtgcgtgaagctctgcaaactccagaaaggaaggtttcgttttccaaacttcagagaagctgcagatcaagaattgggccgtgtgcatctgattagaaactctcttcttccagtgtgagaacgtgggattgaaagcggcataatataaaaagagatggttgtctgtcagggagaggtcacgatctgtaggggtctttcacctgtcaccctcggaagaagctgatgagaaaggcgcacagggcctggaagggtttccaacaatgttcccaggccttcttctttgcttcctcattccctccgggcctgggtccaggctgggtaggttggctgtgggtcgggtggtgggttggcttttcccagctcttccatcgagtctttcccagctgtgttgcttctgtgagttcactgtggccttgggcctcagagatgggtcccagctcaggctgcatggttgggctctggggtgccttgagctggaaggcacctggtgcatagggccggggtcagctcctgacaaggatggctagcaccg

SEQ ID NO: 3219 - DNA, 741 bp, Homo sapiens; identical to SEQ ID NO: 3218

SEQ ID NO: 3220 - DNA, 671 bp, Homo sapiens
tttttttttttttttttttttttttgacgttcaccaacattgttctcctgtcaccaggacaggacgcggcattcacaacggaagaaaacggagcatcgtgtggcgggaagggatcatgcgggtgggaacatcgggaggcctaggctcaggatcccggcacaccacagcggtgctggggagaagaggcctcgagcgagggcaggggacggcaccgagagttgccaggaggtggctcaccgcccagtgccccgggggccctccaggtcgggccgggctgtggagaaggggtgtaagcggtcacgaccccgctccttgcagcctctggcctccttatgtctggagggctcccatttgattcagcccaaccctgcccgctaggcgtctggggataagggaagactcggcccgcctcgacagaaaagggggtctcagcactcgctgggtgacccgcgggagcaggcaaaggagggctcccaagtccgttctgcagcactggggcagggaacagacccaggatcctgggaatcctcttctgcctagctttgcctgcctgccagagcagggcctgcggtttgggtgctgtgaccgtccgggggcgggggaagggcacggaggcggatctctgaaagtcccgccaacttcgctctgaatcccaaggccgaagggcactg

SEQ ID NO: 3221 - DNA, 671 bp, Homo sapiens; identical to SEQ ID NO: 3220

SEQ ID NO: 3222 - DNA, 625 bp, Homo sapiens
ttttttttttttttttgatgattctttctgggttctatctgtagggtcttctccctggccaatccttctggtgcccccagggctccacactcagcccttctctcaaactcctccctctcactctaacctttctggactatcttatatggattattggcttcactaatccctcaccaggatcctaacacccaaatctacatctccagtccagacctttctccagaactccagacccaagtctccaaatggcccttaacggtggtcgctccggttgaattggttctggcaagtacaccagaattacggtgcctgaaagtgaactcattatcttcccgtgccaaactcatcctccctccaaatactcccattcaaggtcaacggcaacaccgtcaactcagccttccaagccagaaaacaagaaatctcccatagccctcatgccctgtaatcacatctccagtctaacctcccctatcctctcttgaattcatctactcctccctgtcgggttcaggccctcatggcatcttattctactccatggatgaaatagccagccagaacgatcaactcgtcactatcaactctgccgtccagtccatcctttctaaaatacattccgctc

SEQ ID NO: 3223 - DNA, 619 bp, Homo sapiens
ttatttctttagcttgttttttttttgttttattttattttatatttatttatttatttagagatggagtctcactctgatgcccagggtggagggcagtggagtaatctggcttactgcagccactgtctcccaggttcaagtgattctcctgcctcagccccccgaatggctgggaccacaggcctgcactaccatgcctggctaatttctgtattttagtagagacagggtttcactattttggccaggctggtctcgaatcgctggcctcaagtggcccacccacctcagatcccccaaagtgctgggattacaggcgtgagccacagcaccagccaagctaggattcccaaatcccattcctccaagtagatccccataaggtaagggaagcacgttttcccaaaagctagaaccacttaaacaactctgcagtaagcatacacctacaagaatcttcccgacagattcaggggaagcttaaccacaggtgcctatgccatgggcagcattcccacagtactatctgagcaggaatgaccaaaggtggagcaaaacaaacttcacgatggcctcagaggtcgcgcagagctttcagcagcggcacagatgcctg

SEQ ID NO: 3224 - DNA, 694 bp, Homo sapiens
tgaaacatttttaggtttacaggagagtgcagaaatagtagagagatttcccacatatctttcatccagcttacataaccatggtacatttatcaaaacacagaaattaacattggtataatactattaaccaaactacagacattatttgaattttaccagtttttccactaatatctttttcttttccaggctaagtccaggatagtacatggcatttagagctgtatcatggctttaaaattcttcacagattcacaatccctcattgcctgccctgggggctgaccactcccagctcccctactccacctgccttggtatacccctgattccactaaacttttgtggtattgggggtaagaagatctaatggcttcaagttagcaatggtgtgttaacaatttttaattaataaaaaccaaatacaagaagatctaagtggttgtgaagtctcatcctttggtgaaaggtgctgtttgagcctgatacaatatattcaactgccagagcacagacacttctacttggtctagctggagattctttagccaggtaactccttgacagagaccgtaggtaagcgacattgcaggttacgtgcctagtgcacagaaatcagaaagcaggctgtctagcaacgtgcacatatctgtaggtacgagacaaatatacgggaacgcatgaaaaatct

SEQ ID NO: 3225 - DNA, 588 bp, Homo sapiens
ttctctactctgttcccactgtacttggggtttgtaatatagccctctccatactacatggcaattatccatttatgtgtttggctctgatactgttctctgagttccttgacaggtcaaaggcgggattatgtcattgtctagcttcatatccccagtaacgagcactcagtggaaacacagtaggccctcaaaaaatgtttattaagtgtttaagaaaccttgtctcttgagtagcttcagaacagactccacattgcattctggcgcacttgaacctagatatgtattcatgattaatacttctatcacatgtatcaaataagcatccactgatgtgagggcttctgggtcggctatcaaattacacatacacagagctaaggccagaaaatctgtaacgggatgtccgggatatgctactatctactatcctttcctcaaaacatacgactatgctaactctgtgctactgatttcctgttacaacaacactctccatctccataaggaacacaacctgagcaattcacgctctcctattctcagtgaccttagagcaaaagctgcctctgaaaaccgcacact

SEQ ID NO: 3226 - DNA, 652 bp, Homo sapiens
ttttttttttttttttttttttttttttttttttttttttaaagtatacaatttaatagtacttagggttttggcattggtacaaccatcaccacagtcaatttgggaacattttcattactccaaaaaagaaaccatatacccattagcagttacttctcactttccccattcccatgatccccagctctaggcaaccaatagtcttggtctccatagatttcccagttctggacatttcataaagatggaatcatacaattggtgtctttttacgacgtgacttctttcactgagcataatgtttcaaggttatccatgttgtagcatatgtcagtgcttcgttactttttattggctgaataatattccactgtatggatatatcacatttggtgtatccattgatggacatttgcgtggtttctaccttgggatatggctgaataatattccatgaaagtggatataccacatttggtatatccattgatggacatgtgggtgatttctaccttgtggataatgctgctgtggacatttatatgcaaatttggtgtgaacatgtgtgttcagttctatgggtatatagtaggaatggaatcgctgggttatatgtaactaagcttacacacacacacacaacaccgac

SEQ ID NO: 3227 - DNA, 772 bp, Homo sapiens
  misc_feature (456)..(456): n is a, c, g, or t
tttttttttttttttcgagacagagtcttgctctgtcacccaggctggagtgcagtggtgtgatccctgttccctgcaacctccgcctcctgggctcaagccatcctcccacctcagcctcccaagtagctgggactataggcatgtgccaccatgcctggctaatttttggtatttttttgcagagatggggtttcaccatgtgtccaggctggtcttaaactcctgagctcaagtgatccacctgccttggcctcccaaactgctaggattacaggggtgagccactgtgcccagccctactcaccttcttaaaccctgtgaggttaataccaccatgatcctgttttacaaacaatgaaactgaggttaagtaatttacccaaggtgatataactagtaagtggtggaggtagaatttgaaccaagacattctgattctaaagtccttgattntggccactgtgctgcagtaaagtctgggccactcatagggcctctccttaaagatgcactccagttcctagccattctcaggcttctccctctattcagtccctccttcttcaggccttctcagtatacatctccatccctcctctctggaaaactttcagagcagaaacagaggcctgcaactgatctgaaccttacacactgaagaaatgtcatcatctcccattataacaggggagcctcagggtgaacgatcgacagatcattacttaagtaaggcccctctctgggggtcccgggtaccggacaaagagcc

SEQ ID NO: 3228 - DNA, 600 bp, Homo sapiens
ttttttttttcatattttaaaaaactctatatctccttaccgtctctacctcctcttcatgcccaccaaccaatttaacattctgctgtgtatatttctataccttttatcattctaatacaaacctctacaatcatttatgaaatataaaggattctttgctttgtttttatgtttttatgtttttatgcagcatgcttctctcactttatgtggacattattccaggtcaaaagataatagatttaactcattacttttaataatcacccaaaaaaatgaatttaatggctgttactacaggtggggaattcttatagcctgggagctacaccatcaacacaggaaagtcaccgtatagtgatgctttccatgttccattgtatgaatgaaccgcagtggtttcaataatttccctattcaacagatatttaacttgctttcaatgtttccctttagtttcagcccctacacccagcactgtaaacatccttttacatatatatttatattatagtatcttccttatctcattttacagtggccttatgttatttacttactcagaaacaccagtaaatgatatctaaagaaactata

SEQ ID NO: 3229 - DNA, 617 bp, Homo sapiens
gttgacactcaagtcggggaggggagggaacctcattattgccgggtggaagcggggtttccagctccccactcatcctctattgacaccatgggggtggcctgtggcaatagagtggtggtgaaagtcctgactctccagtaggcttcttctgacactaccctgctgagaggggacaggtacttctttactgccaaattgaggggtgacatggtgaagttctgactcttcatatgatatccattgagaaaatcttctcaccactcagtggggatgaaactctgctttctacatggcctttctgacaccatcctggcaggctggcaagggtggcaagaatagacttccaaatcagcctttagctggtatagatactggggtaccgaatacgttatcaactgtggtattggcctggagtatatatagtcctaaaagcccttacatctggctaggcttgctctttcctggtccttttaaatagagagagctgggcgtgaggtagaaagtaggtcactatcatcgttcattggtctggggccagctggcattatcaatgcgatagttcctttgcctagtacatcatgtctagcctttcgaaagaaacatttcagggaaca

SEQ ID NO: 3230 - DNA, 707 bp, Homo sapiens
tttttttttttttttttatttttttttattttgagacagaatctccctctgtcacccaggtgggggtacagtggcaggatctcagctcactgcaacctctgccttcaagttccaggttcaaaggattctcctgcctcagcctcctgagtaactggaattacagctgtgtaccaccatgcccagctgatttttgtgtttttagtaaagatgttttgccatgttggccaggcctgaactcctgtccttcaggtgatctgcctgactcagcctcccaaagtgctgaaattataagaatgagccaccacacccatctttcttttcagctattttaaaagagcataatcacatatttccaagggtggtttctcgatgtggtactcataactgattaggtggctttcaccattaaaatcttcaaaccagtgcaacaaatttacatgttggttgtcaagtacacacatgaaagcccaacagtgatacaaggctgggtatcaaaaatcactagaaattctcacagcttgttttattaccacttcatccaagtgaatgtcacttaattcttaataagtgctaaacacaactgaaggagcgttgagagaaatcaatcaacataatatccttaaggacaaggccaatctttctggcatgtggaactttgtacccacatcacagtttgtcctccttacggaacggtctgcaccagccca

SEQ ID NO: 3231 - DNA, 696 bp, Homo sapiens
tgcccgtacaggctatggactttctacttgcagtacatctacgtattagtcatcgcttttacctggtgatgcgttttggcagtacatcaatggcgtggataccgtttgactcacggggatttccaagtctccaccccattgacgtcaatgggagtttgttttggcacccaaatcaacgggactttccaaatgtcgtaacaactccgccccattgacgcaatggcggtaggcgtgtacggtgggaggtctatataagcagagctcgtttagtgaaccgtcagatcgcctggagacgccatccacgctgttttgacctccatagaagacaccgggaccgatccagcctccggactctagcctaggccgcgggacggataacaatttcacacaggaaacagctatgaccattaggcctatttaggtgacactatagaacaagtttgtacaaaaagcaggctggtaccggtccggaattcccgggatcataatgaggtgaccttggatgcctgagtccggaaagaacagaaagaggatgtcagaatcgtagaaattgctaaactgatcaaggcctacacagtgccttcaggctcgctcctggccccgagatgctttgcccacggattctgtaactgtacgttcctcttgcctcaccgtgcccgaacagttacatcattagtctctgaaaaaaaaaaaaaa

SEQ ID NO: 3232 - DNA, 646 bp, Homo sapiens
tttttttttttttttttttttttttttttttttttttttttcagaaaaggggaaaaatctttaatggatttctcaggtaatttttttccagatggtacataaagggttcttatgttctctattgggatgtttcaggagacatacaaatgaaatacagtacatagacaaatgaaatgctaataagaagtaggatgatattaaaatatccttacttggcctgtatggaacaaaggcagtctactccatcggggaatcaaagcaaatgtgaataagaggtttccaccttgcaaaactgtgagcttcatttgccctggagagaactactaggcaaggcttcacatgacagtacctgtagggatgtccatggggctgtgaagcaggtgtatggtatcgaacatgcagctgcaatgaacggcgtggagctcaggagaagcagccacgggacaaatgcccctcctggccgcagggtcttctgtgcagcctcccatgggatctaatataccagttagttaaaacacacatcagtatttctggtcctttagcaacgatgatgatatttgccaccagcgagtgtgatctgtgaggcgattttaaaatgcagtcctgggattctactgtattgaacaccttgatttctattgaatac

SEQ ID NO: 3233 - DNA, 693 bp, Homo sapiens
  misc_feature (164)..(164): n is a, c, g, or t
tttttttttttttttttttttttttttactgtaaaataagtttattagtagtaaggtgatagaatttattcccgatatctgatgttacaaactttaggggtccttgagatatgcaggatcctgtatgtaactgacataaaccccattatttgagctctcttaantgctttcgtgatttctttctgtttcttcccacaaagaccaggtcctcgtgctggatacctgtttatatggtgaacaacctcttctccaaagcaccgtgtgagtcccggaatgtgtaaggctgacagcagccgttaccaggtgtgtcaacttcttcctccctagaccaccgcaaacagcaaccatagcggccgtggttccgcatttcttccacttcctttcatcccaaatccaggacctggtttttaaaggatcacttccttcccaagtgaggcttcaagctcctgtggcatcagtgggtttgattcagagcaaagtcattttagtaaaggacagttgctacatggatttcagattaaaatcgaggagatgaatttggtgcagcaggtatgtaaaataccaaaaatgtattctccatgatgtggttccagttttctggaaatatcaaaaaaatttttttcacaacggaggtggagttagctctgtcgtccaggctggagtgcaaggcatgatctcggcttcaagaaaact

SEQ ID NO: 3234 - DNA, 594 bp, Homo sapiens
  misc_feature (383)..(383): n is a, c, g, or t
catggggaactgggcaaagtgactgacttcagttagagcaggcagcaggtacctgattcaccagggggctgcccctcaggtcaggtttggcacaagctgagaatgatccccaattaggacctattaaggtgagaaatctcttgattgggtcataattaaaagtcctctctgcaaatgcttacatttttggctggggtctggattttctgaatattagagtttatgcatgagaaggaggaaagaatttaggcccatgagccaagagggatgtatctttgggtttttagaacatcacagccttattgcaagtctgtgtgggcatagggggagtcctttgagcatctgtagcttggtgtgttccttcattcatctagtagatactngctagcactgtagatcccatagattcagagggggaaagccagatgtattagtcagcttgggctgtataactaaagccacaggctgggtggtttaaacaacagacatttattttctcaccgttgtcaaggtggaagttgagatccgggagcggcctggtcaggtctggtgaggcgctccaggtccatcgtctcactgggtcctctacacagg

SEQ ID NO: 3235 - DNA, 723 bp, Homo sapiens
ttttttttttttctggattacctgccttcagtaagcagatgcagacccacttgtaaggagtctggttagtgatgagaaaaggatgaaatctagatacaaaagtcaccttgaaggtgatgatggatctttaatccacttgactaagtgtctggaagagctacttgctcttccacccctcatctcaaatgagaggagcagaagtttaacttcctcaaatagaccagctctggctaaaacccaaagaagaaaggtcaaaggaagggaaagcatgtcaggggctggttgtgacttggcaggaccaggaaacagcagccactgacagcccagagaaggtgactaagggctggcagaagattagaatgttactttggctgctgtccggactagggaggccatgttcaatggcagtcagaatttgtgttctgcgcattgctgggtctataaatctgatacgcacagtggtgacagaattatagtataaggtgattgtactacattgcagatcataacggcttggtttaaagacttaagtagaaaatccctctctagcttatttagccaacaatattcagatactgagctttggagaatatcttttcctatcactagaaacgatgcacctgggaacggctaaagtctaacgcacatattgcaaaagcctttagataacaactggcagcatggagagagagggtggcagaaggctgaaaggccaaaagtcat

SEQ ID NO: 3236 - DNA, 125 bp, Homo sapiens
ttttttttttttttttccttttcctttttttttttttttttttttttaagaaggagtctcgctctgtagctcaggctggagtgcagcggcgccatcttggctcactgcaagctccgcctcgcggg

SEQ ID NO: 3237 - DNA, 528 bp, Homo sapiens
tatcagtgtgccaagctgaaacacgccacctaagtcagcaggcactatacagctcactcactgctagcttgttttttgtctcaatctaacctggttttgttcttgattatttctttagcaaacttttaacatcacagtcctggccaggcacagtggctcatgcctgtaatctcagcactttgggaggccaaggggaggatcacttgaggcctagaattcaagaccagcctgggcagcaaaatgtgaccccatctttacaaagaaaaatttaaaagttagccaggcaaggtggagcatgcctatagtcctagctactcaggaggctgaggcagtaggatcctttgagtccagtagttcgaggctgcagttgagctgtgatcacaccaagtgcattccagccaggcaatagagcaagaccctgtctaacaacatcctcacacaatagtaaaagccacagttcattctaacctgagtattctgtcaggcttgacctaattagtaacttttatctcaaaaccagtcttatgt

SEQ ID NO: 3238 - DNA, 704 bp, Homo sapiens
tttttttttttaaaaaggagggaggatggtctggaatggcaatgaggggcaagaagggcatctccacctccaggccccagggcatgaggaaggtgcaagtggaaatgctcaccacctgggagtgattcagggtcctcaaagaggagccaggtttctgtaagagcaagaggaaaggaattgccagggttgtggctggtgatgaaccactgattcttaggcaggatttgggagttggtaaaagaagggaaatgagctgagatgggagatgtgcatgggtatctggggatgaaagtccaagtgataagagggactgggggtcttgggcttctcgtggtgattgccctaagcgaggctgtgggcatttggggttggccctaattgtctctatgtcagattgaggtggtgatgctgcaagtgcccggggcagggacttgatggcagcacatggaactctggtacctcttcctcagtcctgatattggcttttttaacttctactaaaaaccccactgctaactgtgataggccacaacatgtttgatagatgtcaacaaatgttatcctggattgagaccacatttgactatttatcctggaaagtacacattttcacaggaaaacttgtcctttctaaggttcccaactaagctagtctcgtgtgggggggtcataactcattggtctttacttaccttactcctgtt

SEQ ID NO: 3239 - DNA, 641 bp, Homo sapiens
  misc_feature (54)..(54): n is a, c, g, or t
ttttttttttttattttatatgagacagagtcttgctgtgtcacccagaccagngtgcagtggcatgatcttggctcactgcaacctctacctaccaggttcaagcaattctcatgcctcagctacccaagtagctgggattataggtgtgcgccaccatgcccagctaactttgtatttttagtagagatggggtttcaccatgttggccaggctagtcttgaactgctgacctcaagtgatccgcctgcctcggcctcccaaagtgctgggtgtgagccaccacacccagccaataaatgtttttaaacataatactttaaaactttctatatgaaaggcaaaatatagtgactatagctacatgcaaacctagagaatgcttcttttgctattatatgaaatatgctatcctcagaatgcactatatttcaccaaaaatgtaatgtgcagtttttataaaatagtttaaattttctgtaaatatgaatggttgtcagcgtgggtatatatgctcttaggcaattaaaaaatacacaactatcactgctcaaaggaaacactgaagaattatttcaggtataatggttaaatcaattaatgccatgtagatcataaattacaaagctgttaaaacctaa

SEQ ID NO: 3240 - DNA, 171 bp, Homo sapiens
tttttttttttttttttttttttttttttttttttttctggaccaaaacattttcaaaaatatcaaacacctaggagaaaatctaagtaaaaatgttaaaactacacagaaactctaaaacaccatggagaaaaatggaaagatctaaataagtagaaggatacgccaagt

SEQ ID NO: 3241 - DNA, 443 bp, Homo sapiens
tgtatgttgctgtttgtccacgttcaggatattgttgttttgtttgtgtcgatatgttcggcttttcatgtatgtagattttagtctcgtgtgacatgatgttatgttatgttttattggtagcttttacttgttatgtgttattgatgttgcctttgtatgtcttttcccccatccccctcctagtcttgatagcgagcgttattttgggggtagagacggtgaaatctctagcctctttgtgtttttgttgttgttgttgttgttgttttatataatgcatgtattcactaaaataaaatttaaaaaactcctgtcttgctagacaaggttgctgttgtgcagtgtgcctgtcactactggtctgtactccttggatttgcatttttgtattttgtacaaagtaaaaataaactgttatgagtagtaaaaaaaaaaaaaaa

SEQ ID NO: 3242 - DNA, 443 bp, Homo sapiens; identical to SEQ ID NO: 3241

SEQ ID NO: 3243 - DNA, 698 bp, Homo sapiens
  misc_feature (594)..(594): n is a, c, g, or t
  misc_feature (656)..(656): n is a, c, g, or t
ttcatggacgacgactcctacagccaccacagcggcctcgagtacgccgaccccgagaagttcgcggactcggaccaggaccgggatccccaccggctcaactcgcatctcaagctgggcttcgaggatgtgatcgcagagccggtgactacgcactcctttgacaaagtgtggatctgcagccatgccctctttgaaatcagcaaatacgtaatgtacaagttcctgacggtgttcctggccattcccctggccttcattgcgggaattctctttgccaccctcagctgtctgcacatctggattttaatgccttttgtaaagacctgcctaatggttctgccttcagtgcagacaatatggaagagtgtgacagatgttatcattgctccattgtgtacgagcgtaggacgatgcttctcttctgtcagcctgcaactgagccaggattgaatacttggaccccaggtctggagattgggatactgtaatacttctttgttattataacataaaagcaccactgttctgttcatttcctagctgttctaattaagaaaactattaagatgagcaaccacatttagaaatgtntattgacaggtctttcaatatgctttctaataaatagccagagattcatatctaactttgtnaccagaattatacagtaagttgacccacttagatttaaggcg

SEQ ID NO: 3244 - DNA, 735 bp, Homo sapiens
tttttttttttttttaatttacacttttttttaatctggtaagaacagcatcagaaaacaaacttcaatctagaggagaaccaagagcagggagattggcagccaactattcccaaggccaaccttgtcacagaggaacctttgggtcataccacccctagggctataaatgtatctcttaaaaggtttctgggagtgcaactctcaacaccacaatcagaaaataacactcgagatcagcaccccaaggagttgacatctgtagtttagaaacaaaaacaaatggagctccagaaatgaaattacaaatcaatcacatgaatgacagccggccatcagttggccgacccctgctgggtctaaagggaaatctgtcattggggccgcctcgccctggcaagatggggttaggtcctggaagtgggccaactggatcaaagcgtggtctcagtggaggaaactggctgggcgtctccccaggaccaggaatgagtgaactgattgggtctccaacatagggaagtgtcggtcttcggtcatattcacccccgcataattcctggaggaaggcgggagctaggaaatggcctagggtgcacaggggttgggatagaatggaatggtgtgagttgacgatggcaggagcatcacaaaccgccctttcggggattcttttcttgtatgtgcctcttcctgtacagatcttccaatctgtgtcttgaactctgacagatt

SEQ ID NO: 3245 - DNA, 741 bp, Homo sapiens
gtactccgggattccagttccccaccccatgacgtcatggatttgttttgcagcaaatcaacggactttccaaatgtcggtacactccgccccttgacgctatggcggtaggcgtgtacgtgggaggtctatataagcagagctcgtttagtgaaccgtcagatcgcctggagacgccatccacgctgttttgacctccatagaagacaccgggaccgatccagcctccggactctagcctagccgcgggacggataacaatttcacacaggaaacagctatgaccacttaggcctatttaggtgacactatagaacaagtttgtacaaaaagcaggctggtaccggtccggaattcccgggataaaccatttaccagccactaaaaaatactgtaatccacaacccatgacactatgaagcaaccacataaacaagtctgcaaaataaccagctagcatcatgatggcaggatcaaattcacacataaaatattaaccttaaatgtaaatgggctaaatgccccagttaaaagacacagaatggcaagctggatagagtcatggcccattgatatgctgtcctcaatagatccacctcaagtgtaaaggcagacataggctcaaaaaaaagggatagaggaaaatttagaaggcaaataaaaaacaaaagccggagttgcattctagtttctgaccaaacagacttcaaccacacacatggaaaaaaaaaaaaaaaaaaa

SEQ ID NO: 3246 - DNA, 562 bp, Homo sapiens
ttttttttttttttttttttttttttttttttttcaaacttctaaacctttattactgattagtacaaacacaaacggagcaatgacaacagcagtgaggagaggccctgacaacgagggccgcccctgcccggggtgaggctgcacagcgccagctccaggctgggccagcttggcccgcactggcaacacaggcttgaccttggccacagctcagcagtagaaaggttcttggacagggtgccaggacacacgctggggctgctgtcacaggacaatcttaaaggagctggcaaagtctggagaacgggagatgacgtgctggaactcagagaggttgatggttccatccctgtcaatgtcagactcctccaggatgttgtcgatgagctgcttcatctcagacgcactaagccgtgtgtcctcgccctctcccgtgaggcagttccaccagccgggctcagggtctctctctgttcaagggtttccggtccttcatcgaagtccaaacattgcgggaaggcttattggggacttgatgtctgggcgttgggctgtgttc

SEQ ID NO: 3247 - DNA, 761 bp, Homo sapiens
ttttttttttttttgggcaaacactgaaaattttattaaatatctataacatgcaaaaaggaaatgactaatgactccaagtgtcttaggaacagacaaaggagacataaaaatcatttgcctggtttccttcaaaataaatttattttccatatatttcaaacttactcatggtttaattctaaagctgataggctgcttgattcgagctggaggatttctttccctccaagccttctgcataactgtgtctgaaggacgtaaaaaatctgtgtcacagggtgaaaaaagggtctggatgggtccctggaagcctggaacaggggttccaatggtccaattaaggttaatggttcaaggtgggctcctttaaccaaggtcctcaacccaaggtggttttctctcctatatttcctggtctccttctggaaaagaattacacaaggggttccttcaattacctgacacatctcgggacaatatccggacgggcgggtcacatcacgtcctcgggtcccctgcgaagggagagaaacccgggatctcgagaatagggcgtgctctcgtgtcccctacccatcgagtgggtgcgcaaaggggcttcacgagaatacgtgctcagatacacaggatgtggacagtgcttgatggaaggtaccaacattcaatatcataaatattagtcgctgatatcagatgaaggaggtccgtgtaagtggccacatagaaaggggggtgtcaatgaatttcaaacatagcag

SEQ ID NO: 3248 - DNA, 435 bp, Homo sapiens
tttttttttttttttggtaaggttgaatgcactttggttttggtcatgttcggttggtcaaagataaaaactaagtttgagagatgaatgcaaaggaaaaaaatattttccaaagtccatgtgaaattgtctcccattttttggctttgagggggttcagtttgggttgcttgtctgtttccgggttggggggaaagttggttgggtgggagggagccaggttgggatggagggagtttacaggaagcagacagggccaacgtcgaagccgaattcctggtctggggcaccaacgtccaagggggccacatcgatgatgggcaggcgggaggtcttggtgggtgttagtgattcaatcactgtgcttgcgcccagagctccggtgtgactcgctgcagaccatctgacagtgacactgtgagtgaaacgggtgtg

SEQ ID NO: 3249 - DNA, 715 bp, Homo sapiens
tttttttttttttttttttttttgagtgttttcagtattttattaacaaatgagctggcaagaggacaagtgatctagtagtatcacccccaccctcatggagcagccaccacaagcccaccatggtggggggtgtccaacatgctctgctggcccagttcccagccgatcccctgagtcttggcgcccgtttagtcacccttcagctgcttgggaggcaggaagagacttcccctcttcacgaggtaagggagacaaaagcagccatttggatgccagggccacaggggcaagccatgccctatttctttggagggacagaatcacttcttcccaaggccagacactgtagcccatggtactcagccttctagaggagggtagcctagcagaggagaagccctgagtggaagcagcattttgaaggcatcgtcattcttagaccagctaagagctgagggcattctctatctttgccagcagacagtgagactccaggattaaaattaaaagcccgtggtgcatcctttccttgacattaactttccacaaaaccttggaggagtcaaatcccacactgcacatactccggtgtctccagctgtgaagtgggaccagtatcaatacatgggaaagtgctgagaaggaagaaaatatttcaggtataatcctaatcatcaacacgttcatccaagaagcttggcaccaacttgtg

SEQ ID NO: 3250 - DNA, 604 bp, Homo sapiens
ttttttttttttttttgcaatcataaaataactttatggtcaggttagccaccactcatgcttttcctgtaataaggatcctttataaaggcatgatggtgttcacatgcagatgctttctgaagagccctggggcagggggcagccttgcccctcacatcggagctcctttgttgaaatgagctggtttggcttttgtggattccaggtctggagccaagaacgtagtccaaagatcccctcttcccttctcagggaaggtgcttcaaagcatacacagtatcagggatgtgatggcatctgggcagagcctatacttgggctaactctcctccaacagtccttgcccctgactgcccagatggctttgtcccaaccttgcccaaagggcaggtgggttaagccaaaaaaaaaaaaaaaaaaaaaaaaaaaaaaaaaaaaaaaaaaaaaaaaaaaacaaaaaagggcgatcccgggaatccggaccgggtaccagccggctttttggtacaaactggtactatagggtcacctaaaataggcctaagggtcatagcggtaaccggtgtgaaatgttatccgtcccgcggcctaaggctagagt

SEQ ID NO: 3251 - DNA, 758 bp, Homo sapiens
  misc_feature (688)..(688): n is a, c, g, or t
ttttttttttttttttttttttttttttggccattgctatgttttattttgctagtagcttattaaacataacatgcaaataatcaaagagaaacatacatgacttagagtgaaaaataattctagaaaagtttcactaggtaagtatgcaaattcttattctaaaaatacttctttaagtgcatgaagcttcatgtattttgcaatattcttggcctcaatatctaccacctattttttaaccagacaaatttgaatgtatcaagataatttggtgcaagagagtaacatccatatgtatttaatccaagctttgaggaacattaagatttaaggattataaaacttggctgatttccatgcaaccagtaaaaggttttgcaggcttgagtagcgctagggagaatccctgcaggtaatatttgacttttgcttcatattaatctgagtggaaaataaaagggccctcttctcctctcgcttccctgccgggcaggcgccatggcggaagcctcggcgacgggcgcctgcggagaggcgatggcagcggcggaaggctcctcgggcccggcgggcttgactctgggccggagcttctcgaactaccggcccttcgagccccaggcgtggggcctcagcccgagctggcggtgacgggcttctccggcatgaagggctgaggctgcangtcccgaagaggcgctgctcaaatctggcggatgagcggcggagtgcggcccgtgggcggcctgtggtgc

SEQ ID NO: 3252 - DNA, 670 bp, Homo sapiens
cctcccgagcttagctaggcccgcggacggatgacgatttcacacagggaaacagctatgaccattagggcctatttaggtgacactatagaacaagtttgtacgagaaagcaggctggtaccggtccggaattcccgggatgtctgaagatagatcgccatcatgaacgacaccgtaactatccgcactagaaagttcatgaccaaccgactacttcagaggaaacaaatggtcattgatgtccttcaccccgggaaggcgacagtgcctaagacagaaattcgggaaaaactagccaaatgtacaagaccacaccggatgtcatctttgtatttggattcagaactcattttggtggtggcaagacaactggctttggcatgatttatgattcccctggattatgcaaagaaaaatgaacccaaacatagacttgcaagacatggcctgtatgagaagaaaaagacctcaagaaagcaacgaaaggaacgcaagaacagaatgaagaaagtcagggggactgcaaaggccaatgttggtgctggcaaaaagtgagctggagattggatcacagccgaaggagtaaaggtgctgcatgatgttagctgtggccactgtggatttttcgcagaacattaataaactaaaaacttcaaaaaaaaaaaaaaa

SEQ ID NO: 3253 - DNA, 670 bp, Homo sapiens; identical to SEQ ID NO: 3252

SEQ ID NO: 3254 - DNA, 723 bp, Homo sapiens
ttttttttttttttttttttttttttcagtcttcaaatattttttattggaaggccatgcattgccttcatttattgtatttcaaatcactgtacatttacttttgtgaaaacactgcctgcattttctagtacaaaaaaaacctaaaaattgtttcaggaatgtagagaaatatccaacttaaatagcgaaaaagtgcaccataattactgctgcactgcagtcatttctgcaattcccatgtttcttaaataactatcttgtcagataacacacaatataaagagcaattatgaaaaacagacatttacatatacttctaaagtcttatggggaatatcctgttggcattggataaccaatcataggtgcagctgcagtagcaggatatgcatatgcctgtaggttcataccattgtgcatatttggaacattacttccgtatagctgagtgctatcataaccattctggtaagtccctgtgggattaccagtcctaaaactggtctgtataccagcagacacaaaattacttccaaagctcccatggtgtaatttgcagcactgtaaacaccattcatgagattttggacccgaaaatctctttttaagcaggctaggagtaacctcatgtcataaattttcccgtgtctctaaaggtattaatgcaccccttttgcacgagagtatctgtccgacgtcatccttcatgactcttattac

SEQ ID NO: 3255 - DNA, 723 bp, Homo sapiens; identical to SEQ ID NO: 3254

SEQ ID NO: 3256 - DNA, 715 bp, Homo sapiens
  misc_feature (590)..(590): n is a, c, g, or t
  misc_feature (616)..(616): n is a, c, g, or t
  misc_feature (640)..(640): n is a, c, g, or t
tttttttttttttttttttttttttttagtgtaaaggttttttaattgtgtatatgtagcattagacaaaattatttaaagtcaataaattgttattcgaggaattccatgttgtgatttcttccactgtccatcaaggtcactttagatcctctaaagagctggagtcaaaagatttatcttcaagtttgccctttttaatgaaactgatccagttgtcctgtcagcccataattacttggcttctgtcatctcgttttaatatggatatactgatgaagacttcaaaattcaccaagaatctttgggatctaatttcttcaaccaatttactttagggtcctttttactgtaggtggtggggatctacctggttctcaatttgacaccctctcaacatgaatgagttcaaatcacattcattcctaagcgatcactcaagaatggtacagatgtgtggagtatgccaatacctaaggtaaaaaagtagattatctttaactccagacaccatgttctcaagataaaagcctttaaaacaaaaagccattgtgtatatcatcaacatgaaattggaatgcaaaattaantactgctgaggatttccctcatatcncatgctgtttatctattctacagngcctggaatcaacctttttttcttaagagacagggtctgtctttgtaactcaggtggagttacagggtgccatca

SEQ ID NO: 3257 - DNA, 377 bp, Homo sapiens
ttttttttttttttttttttattttacaacactataattataaagtagaaggcacatccttggcagaaatatgatcaattacatgcttatgaaaaacaaactactgaatatcttaactacagtagatggatattgcacaacatcgtccactgctgttttcggataccaaacaatcaatgttcaacaacgtttagctaacacatttctttaactaaaaacgtaaggttgagacgcctggtttgtggctacaaaaggcatttgtcatcaacactgtgaaagaagctcttttaactgaagaacaagaactcatgctttgtgctctatctggttactcataccagatggacgggactgcagaaacgcttattgtaacacta

SEQ ID NO: 3258 - DNA, 80 bp, Homo sapiens
actggcatgtcctacttctgagtctccattttctccactgatatacatccaaataataaaagtaacacaattgcaattga

SEQ ID NO: 3259 - DNA, 265 bp, Homo sapiens
  misc_feature (253)..(253): n is a, c, g, or t
ttttttttttttttttttcttcattggcagtggaaaatgcttcagtactttattgaaagaaagcaataaataatactgtgataaaaatagttcaaaagtagactgtacatactttgttacataatcaggaagttgacaaaagattaatagaaaaacagaacagtaacaatgaattgtacaagtaaattaaaagcagaaaccaacgtgaaaagacagggcctgcctcgtggtctcgtggatctgcgtggcacanataaataccacg

SEQ ID NO: 3260 - DNA, 682 bp, Homo sapiens
ttttttttttgggaaactgctctttatttagaccttcgggacaaaattaacttggtcacatattacttaaaaaaaaatccagtttacatattctaaatagatagaactaaatgatcagagaattcttctgtaaaaattggccaagattttatcaaaaatctaagcatacgatacaatccaaattataaaaagactacttgggatcataatattccaaatgtatgacagttataactccatcttaacaagtgtgaaaagtacttgctctcatgttgctttggtccaaaagagtagagctaactcagtaacaggaaaactaagtacccaatctttggccaaaattaatttagatggtgactgggcagcagaaatatccataatggaacagctctactataacaacagactaacttaacagaatacttttcgtgaacatatcacagtatcaaatacatcttttataagagaaaaatatgaaggaaatgatcaaatagctatcacaaacaaaaagaagcatttcccccataaggtggaattagcaggggttgactgatgctaatatgcaaaggaagttgagtactgtgatttagttctctatttgtatacaactctatactctttacaaaaatgggttatagtcatgcccataaaagtgtaacccaagggctttggaaagccaacc

SEQ ID NO: 3261 - DNA, 734 bp, Homo sapiens
tttttttttttttttttgcaggttagcattttattagataaaaacaggaaggagggtgcctacccacccctgcctgctactggctctgaagggcactcctcaacttccccaagaaagaggacgcgtctctgacactgtgatcatgacaggggttcaaacagaaagtgcctgggccctccttctaagtcttgttaccaaaaaaaggaaaaagaaaagatcttctcagttacaaattctgggaagggagactatacctggctcttgccctaagtgagaggtcttccctcccgcaccaaaaaatagaaaggctttctatttcactggcccaggtagggggaaggagagtaactttgagtctgtgggcctcatttcccaggtgccttcaatgctcatcaaaaccaggcatggggaaggccctggcaaactgctccacccgttgcctgaggttggccagacgctgacttgtttctgagtccttaagcaggaaggatttgaaatcctggagcttggcagtcttgctcttcacctctaagccaatgttgaccccttcatctataaagtccacaactctccggaagtcatcctcacggaactgtcgagaagttaaggctggggccccaagccgaggccgcccggtgtgatggcacttcggtctccaggacaggtgttcttgttggcagtgatggatacaagctctagcacccgtcagcccgagctccattcaggccttgtgg

SEQ ID NO: 3262 - DNA, 348 bp, Homo sapiens
ttttttttttttttttttttttttttccacctcaaaatactctttattattcatcctttcttccatgaaagctttgatatggtggatctttggtgagcatcccattctttaaataaaagtaactcagaagctaatttaaagaagatatgctcttggaatttaacgcagctcttggaatttaacgcagcttaattcacatttttagccataatggtcatatggaggacttaatgcaattgagagttaataaaagtattatcactgtgcgcggaatgtctctgcgggtcctcaacacttcactgtgccgctgatgcagattttggaggcagcttcagagaaaaggatgtc

SEQ ID NO: 3263 - DNA, 159 bp, Homo sapiens
tggacttagagagtctcttcccagacagaggtgtctttccaggctatacactaagatggagttaggaaaataagcaccattaggttcctttaatttcccacaaaaagaaaaacaaggggaagggagtgccacacatggaagagagagggaagaagtagt

SEQ ID NO: 3264 - DNA, 744 bp, Homo sapiens
tttttttttttttttcaaatggtaaatattgggcttgcctattctgcctatttataatctaaatctattgggagaatgcttcactctaattatgccctcctggggccactttatccactcaaacattttttatttttcaaggcaaagtgcaaattcaactcctaatgaagctttctctgatcaccccagtaagaactgactactctttcttacgggctcccccagagtcaacgttttttaaactcaggctgaaacttattagtgggtcatgaaatccgtcgggtgggtcactggcagaaaaagaacataggaaatatcagaggacatcacacatagtgatggtgacaattactttttgaaacatttacttcagttaagagtgtctgcatatgtactagatggcaatgtaacatataaaagttgaaaaacacaggtctggaggatcaataatgtaaaacacatatcttaacatatcatggccagctgtatggccacgtagctctttgagggttgggacattcttgatctatatatccctcatgcccaatgtcctacctggtgagtactcaggagttcgtgactgcgacatgattatgaaggttcgagaacggaatggacagaatgacaacgcaggtaggtggcgaggacatgaaggcttgaattaagtgtacaatcctgtagttcccttatcttgcatgttaatatatatttttccactaatattatgcacaagaaccgtgtgta

SEQ ID NO: 3265 - DNA, 750 bp, Homo sapiens
tttttttttttttttttaagtgcgaagattttattaggcggtacaattccaaggtggtaagggtgaaaggaaaggcgaaggcaggcaaatacattattgagctgaaaacaactttacattcaaggacagcttccagacaagccatgtagaaccagcatgccttgggactgtgtggatggcagggagacgagtttctatgctgaccacttcatgctttctgccccctttggggaaagtatgcctcacggacctctaactctcccacttctctgggggcagcacctgacccctcccggcaactgctaggcaagagcattctgttccttcaaatttctcacctgagtctgagtcagagcatcccatcatcagagcctctgtcagggaggcagtgctgaagcatgaccttcacctgggggaggctgtcgggagatggcactggaggccaggcctctaccctaagcgagaggtgcaggccggggtggaggtggacggtgggacagagtaaatccggggaagcacatcaaccgggtctggtagggcatagccttcttggacctgagccattcctactgctgatgtccactgcttctcaatcgagaaacagcacggattcagctctcagatttgtaaactgtgattttctcccttattcctcaacaacacctagccacgacttcttaactcttccccaaaccgaaaattttgagaaatgactttctataattgatgttataacgtaccatttgaact

SEQ ID NO: 3266 - DNA, 720 bp, Homo sapiens
ttttttttttttttttttttttttttttcacttggtatgaaactaagctctttataatgaatgcctttaatcacaaccaccccacgaggtgcgcatattcattcccattttacatattaagaaaccaagactgagggtgtatgcagcatgctcaggttcacctggctaatgcagagagctgggtttgcagccacacttttacttcaaggggctgctgacaccctccaagagacttggtggttcaaaactatttctcatcccctctctgcgagccaaaagcctatttcctgaggtgttcagagagattcagagcagattgacaccttttccatcactgacacaaagaggagggtataaaaaacagtatgtagccctggggatctaaaatattttcccagccaaatcggacaggcattgaaagtcacacaggctggggtggttttacaaaatgccactgtgtttaaatttcctttcatcactctgtcaggaataacagcaacgtagtggagcctcagagtcctgttcgagcagggggcgagctgttccggggaaatttatttcaaaagttattctgaagtaaaaacttgcccactgtgcgagtgaggttggacagtgatcctatatcctaggtaatgaggctattaaagcagctggtctcttcagcttatgtagtggggcccagtctctgggcgaactgggtaaaccgggatagaattcaca

SEQ ID NO: 3267 - DNA, 707 bp, Homo sapiens
ttgcctgggctggtcttgaactcctgggctcaagcgatcctcccacttcaacctcccaaagtgctaggattgagaacagcctggacaaacatggcaaaaccctgtctctactaaaaatacaaagattagccaggcgtggtggtgtgcacctgatagtcccagctgctcaggaggccgaggcaggagaatcactcgaacccaggaggcagaggttgcagtgagccgagatcactggcactgcactgcagcctgggcgacagagcaagactccgtctcaaaacaaataaacaaacaaaccaaaaaactttaaaatcagtgaaaatgtgccattcctagtcctgtacagtcttacactgcattctgccctgtccctgtcctgctcagacataggctgaggcctgtggtaccgtacgcccaggctgcttgtcagtagggttcccatgctgggtatgggccaagggcagacagaaagaaaccagggtattacctcatccccaaccgcacccttcttcaatctcgcataccggcaatgtctctagctcctctgggaactgatggctgtggttcaaacttcccctggtgaccctgggccccaaggctcaccatctctacatgtggtggcttcctgccattgacaatcgggggatggcttgtctaccctggttggctctcactctccatcactgatgtaaccagtctctggttac

SEQ ID NO: 3268 - DNA, 294 bp, Homo sapiens
ttttttttttttactctgatgtttattttaatggcatcttagtccacacagtgggtataaaatcagaaaatgcaaagcaaaaacaaaaggtctggagtcttagcatcagaagggcaccatatatacatctacagttggtaggccaatacaagtcattgccagacagtccttggaggcacagaacagcctagacccagccaagctctaggaactcacggtcccaaggagtctagacgcttgttctagatgctccgaccgtaagaaacaatgtgggagtgatgacaggctttatga

SEQ ID NO: 3269 - DNA, 653 bp, Homo sapiens
tttttttttttttttaagtttagatttacagaaaaaccacatctagtagagttcccatataccccacgctgtttctatgaatgttgtcatcttaagctaccatggtacgtcagttaagaaaccagtattggggtcaggcgtggtgtttcatgcctgtaatcccaacattttgggaggccgaggtgggcagatcatttgaggtcaagttcaagaccagcctggccaacatggtgaaaccccatctctactaaaaataaattagccaggcgtggtggcgggtgcctataatcccagctactcaggaggctgaggcaggagaatcgcttgaatccaggtggaggttgcagtgagccaagatcgtaccactgcactccagcctaggagacagtgacaccgtctcaaaacaaaacccaatattggtacaatactctcaactgtactctagactccggactttagatttcacgtttttccatttaacatccttttgtttccagggtaccacattgcatttattaatagttgtcatgtatctttagtcttctgacgtccatggttacttctcagcctgtttttctgagcaaaaatttctggaaatttgaagaatactgttcacatattctaaatatgtctgtgtctcactagattgagat

SEQ ID NO: 3270 - DNA, 470 bp, Homo sapiens
tttttttttttttttttttttttttttttgcaatttagggcctttattgaccgaggagggtatggaggtttgagggccagtgagcccaccatagtggagcctgacctcagcaggccactggctggagctggaagtctggggggacactgcccaggccagtgcactgcaggtgaggttgatggtgccagggcgtaccacagggagcaggcagaacctctgtaaggtggccgtaaggaataggaagatacccgagtgggccaggcctgtgcccaggcacatctgctttgccgggtacacaggtgcacagtgagcaccaggtaaccccaagagcccagtccaaggctggtccccttcctccatcatagactgcacctgaggcaaagggcattgaaagcaatcatggacctggaacttgcccttgtaccagagaagtaggtaaggttgaacgcaagtctggagtcttagactta

SEQ ID NO: 3271 - DNA, 685 bp, Homo sapiens
  misc_feature (611)..(611): n is a, c, g, or t
tttttttttttttttttttgtgccccaaacatgatacttatttattgataattcataccctgcctatttctcaaaaatgacttgagaaaaactgcacaacatagcgacaatacacatacagaaattaaaagtgaaacaggaatacatagagatataacacacaaacatcaaactatgattagatcaggtaaatgagtgttctgaactgctttggtgtcacagaggcatttaaaaatatagtaaatactacagatccttgtcccagcaaaattccttcaagcacatacccagcttgttcgatccctaggggtctgcaactcctaaacccctacatgctaaagactcctaggcaggccatggacccccagattaagaactctaaagtaatgaaagtcagagaaaatatggattgaataaaatattgaaaaaatggagttacaaatagaacgggtagaattaaaaaacacttttggagattacacaaatggcttttataaaaccggataatatattcaggcccaaagaagtcctagtggacacttagaaatgttgacaccacagtacagtaagaaataagcagcaataccctaagcattcatcacttagaaatnttttatatatatctctttgagacagagtctagctcttttgcccaggctggagttgcagtggcaacacctcggtc

SEQ ID NO: 3272 - DNA, 540 bp, Homo sapiens
  misc_feature (294)..(294): n is a, c, g, or t
  misc_feature (305)..(306): n is a, c, g, or t
  misc_feature (325)..(327): n is a, c, g, or t
  misc_feature (379)..(379): n is a, c, g, or t
  misc_feature (396)..(396): n is a, c, g, or t
  misc_feature (399)..(399): n is a, c, g, or t
  misc_feature (426)..(426): n is a, c, g, or t
  misc_feature (466)..(467): n is a, c, g, or t
  misc_feature (523)..(523): n is a, c, g, or t
ttttttttttttttttttttttttttatggttgaatgagttacacatttaatgtactccttttaaaatgttacactcagaatatattttacttgataatactctaacaatgtgcttaaaaatattggctttatagatttttaaaaaatatttgcctctgagcataacatgagtcatcaaagtaaaaaaaatgagttacatataatagcaacaaataatagtgcaatcaaaattagaagtgtgaaagccttggaattatattaagacaaaaaaatacacgtgcgaatattcgtgngctttcctaanntgtcacgtggaggctcagnnnctactaaacagttttctacataaaaatgactgatcacaaaagtggtgtccanttatttactctacttcnagnaaaagaaacagaaaagggcaagctagnttattggcaatttccaaacagcccttattaacatcttctnnacaactttacacacaagaaatctacaggctctcaagaaaaccttaaaagttctacnataattttccaaatttt

SEQ ID NO: 3273 - DNA, 724 bp, Homo sapiens
tttttttttttttttgattttgggttatttattttgtgcatctgtggcaataaatgagatctcagtggtggtatggatttgactgatctctgtaactgtgtatggcaaaaggaccggaaaatgaaaaccagatcccagtaaggggtagagaggggccaagagaactgaacatctgggctgccggagaaatcaaagtctaggaagtaagaggtaagagtgtactacagggggacataccccccaatcttctttggcttcccttccccttcctttccctttccttcttcccagaagaacccaggttccctgtgggactattattgggattctgtctctgaagctgaaaaacaaaaggcagaggagacagtcggctctaagtgaccaatctcaagccagctttgtcagaaatcctaaataacaggagcaagggtgggaagaacaggatatgattatttcttattccattttccataagaggtgagaatgacaaggacctcttttctaactcctcttgagggtgtgagaagggttagcaggaggagaagggctgggagctctgaggtctcctgtaagacctcatatctcacaggcaaggactaagaattaggattacaatatttagtgggatagctctaaaccaggattagcaagcaaagttagggcgcaattcctggaatctgactgggacctggcagtgaagctggactgtgaaaacccattaagt

SEQ ID NO: 3274 - DNA, 761 bp, Homo sapiens
  misc_feature (187)..(187): n is a, c, g, or t
  misc_feature (231)..(231): n is a, c, g, or t
  misc_feature (240)..(241): n is a, c, g, or t
  misc_feature (248)..(248): n is a, c, g, or t
tttttttttttttttttttttttttaataagtcatttatgcccattttaattatccaatttaacacattcaacaattaaggcattcagattttggtgctaacagtcatatcaaaacacctcagatcctgtcttccccctccaaacatctgtaaactataatttatgtgaaaatatagctatccactntacttgtcaactcggcaagaaatagaaattagcttattcctccngaagaaccnnatggttntttcaaacttggttggaaccttggccaccaaattaaggaaaaccacccttggaacaaattttaaaaaccattgaaaccattacctgttttcccatggtaagccaactaaataaagatcactggaaagagtgagtgcccaacaattttttttcttaaattctccaggcgattctactgtggccaggcctaggattcactcctctgggacatttctcaggcagtgcattctctgactcgataaatgaagttcagccaagaataatcagtggaaagattgcctgaagtcaatgtcattcattactttccaggctaccatctttaattaacccaggttggcagaataaaggtggagtgctaggacaggattgtaatgccctagcagacttaccgtttccaaattcccttctgtactctcatgtactttatgattagtcaattatatctgtattattccaactactatgatgcccggaaaacaggttggcatttttgaaaaagagttctaattcctat

SEQ ID NO: 3275 - DNA, 709 bp, Homo sapiens
aaattcaaatactttaaccaaattggaaatgcaaacagtacacttagagtcatccttagccagctgttctccaaacaaaagatcgagaaacaaaaccaagaacaatgtaaaaaagaaaaggtttatctagaaaaactggaagctcatcaaagtcacatttcttcttctgattcttgttctcgttcagcatttttcagaagtccaacttctgaggagcagagcctcttaagtctagatttaaccaaccaggtaatgaaagcataattcattccaacgatgacaatggttactgcataatgccaacaaaagcatatggtgagaaacaaaatattttcatgatccatcagatcccatgcaggacctccactggggggatacaggacaaatccaatctgaaagaaccagctcccctgaagcagaatgagacttgaccgcaatagctccagaagtacattgttccgaacaaggaactctaggaaggcaacgaggcctgtcagaaagacgaccaaaaccagcagctggtgcacaaagatgtccagcatttcccggccatgagtgtggttgtagaagataaaggcctccacaaattaggcatttgacaacttaacttgggttaggacccaggaagtgaactgatggttgaaacataagatatctgccaaaccaaaagcccaagaagaatcatggtgaatgatgccgcccaggagtg

SEQ ID NO: 3276 - DNA, 640 bp, Homo sapiens
ttttttttttttttatgtctcctaggggatggtgagcgggacaattttcttttaggagaccgaggctttttaggagatcttgtgccactcctgcttcttcgtcgtcgtctctctctgcttgcacttctagaacgtctggctgtgctgtaactttttggtggtgttttagaacgtttctttagctttgtcttctttctttttgtctcttgtatttgatgtgctccttgaccttctacctctttctctggaatgagatcttctccgccttgggcttttggatcgtcgccgactcctagacttagaatgtgaccgcacgtctcgatctgcttcttgaccgcctgtgtctagaagatgagggagtcctcctcctcctagaacgtgatcttgatcttgaatgccttctattattcttactgtgcttatctggttctatagcagcagaaattagggactgtgcttctcgtactcttttcatagcttcctctatttctttactagaggtatccgatttcagacttggtgaaaccgagaacagcagctacgtgattcaacttgggatcaacagtactcataagcttcagcaactgatctgcagcaagagactgagagttcaagttagctccaggaagcccaagtgcag

SEQ ID NO: 3277 - DNA, 651 bp, Homo sapiens
cgttcagtcggctttactacaacaagctgacgagacaggggactccccaagaacgtcctttaatatgtccaacctgcttgtgctccacctgtcccacaacaggatcagcagtgtgcccgccatcaacaacaggctggaacacctgtacctcgactacaatagcatcgagaaaatcaacggaacccagatttgccccaacgacctagtggcgttccatgacttctcctcggacctggagaacgtgccacacctgcgctacctgcggctggatggaaactacttgaagccgcccatcccgctggacctcatgatgtgcttccgcctcctgcagtccgtggtcatctaggccctactccgccaccggatctgctctgaccgcacttgaaggctggggcccaggcacctgtgccggccattcgttttctctctctccctttctttctcccagctttgcctcccttatcccaccctcgaggcagggaaaagccatctattcttctgcagcctcaggagcgagacttcaaggactcagtttggttccacccagttgaaagacacccagtgcacacccaaactcctggccttctgtggtttccctttgctccagaaacacagatgtgttaaagacaaaaaaaaaaaaaaaaaaaaaaa

SEQ ID NO: 3278 - DNA, 651 bp, Homo sapiens; identical to SEQ ID NO: 3277

SEQ ID NO: 3279 - DNA, 707 bp, Homo sapiens
gccagtacagaccttaggggactttctacttggcagtacatctacgtattagtcatcgctattaccatggtgatgcggttttggcagtaacatcaatgggcgtggatagcggtttgactcacggggatttccaagtctccaccccattgacgtcaatgggagtttgttttggcaccaaaatcaacgggactttccaaaatgtcgtaacaactccgccccattgacgcaaatgggcggtaggcgtgtacggtgggaggtctatataagcagagctcgtttagtgaaccgtcagatcgcctggagacgccatccacgctgttttgacctccatagaagacaccgggaccgatccagcctccggactctagcctaggccgcgggacggataacaatttcacacaggaaacagctatgaccattaggcctatttaggtgacactatagaacaagtttgtacaaaaaagcaggctggtaccggtccggaattcccgggatctacgtttctggcctgatgaagggcggggctgatctgtttgtggagaacatgcctggatttccagacaacatccggcccagcagctctggggggtactgggtgggcatgtcgaccatccgccctaaccctgggttttccatgctggatttcttatctgagagacctggattaaaaggatgatttttaaggtaaaaaaaaaaaaaaaaaaaaa

SEQ ID NO: 3280 - DNA, 694 bp, Homo sapiens
tttttttttttttttcaggtttttatttttttatttcttatattttttaaagacggagtttcactcttgttgcccaggtgcagtgcaatggcatgatctcgactcactgcaacctccacctcccaggttcaagggattctcctgtctcagcctcccaagtagctgagattacaggcatgcaccagcacacccagctaattttgtatttttagtagagacagggtttctccatgttggtcaggctagtctcgaactcccgacctcaggtgatacacccgcctcggcctctcaaagtgctgggattacaggtgtgagccaccatgcctagcccctggggacacttttttcagaggccagatgtcaacttccatctccacatgcctcagtttacacatcattgcatctcagcacagagccccatcatgtagggttactttgggttattctgcccctgtgagaagaaactattggcagcaaagccatactgccctctgccacctctccccagctcaggccagctgcgcctctgccgtgcagtcaatcgttggctctgtgggtggcctggagccaggccagcacccctgctaagccagtgcccttcacgggcgctgatttctgccgtggtgatgttctgcttggcacaaagcaatgatgtctggaagccctgaattatgacttctctccctcgttggac

SEQ ID NO: 3281 - DNA, 653 bp, Homo sapiens
ttttttttttttttttttttttttttttttaaatcctaggctttcctcattcaataatagaggatatgcttgagtcagatcaacattgctaagactcatttctgatcttgtttgtttcattcacttaacaaattaacttaattaatattccaggcattgagctatgtactggaaatacagctgccagaagggcaaggtctctgcatttatagggcctaccataaaatggaaaactaataataaaatttcattacgatgcaatgagaagtgcagaatcaatgggagaacacagaaggggaagctaacctaatacagggaccactgtggtttcctggaagaagtgatgttaaaactcagacctgggccgagcatggtgactcatacctataatcccagcactttgggaggccgaggtgggaagattgcttgagcccagaaatttgagaccagcctgaggaacacagagagaccctgtctctgcaaaaaatacaaaaattagctgggcatggtagcccacacatatatagtcccaggcactcaggaggctgaggtgacaggatcacttggagcccaggggggtcccaggctgcactgaggcatgatcctgcccactgcacctacagtgtggggtgacagcattgcgaccctgtctc

SEQ ID NO: 3282 - DNA, 699 bp, Homo sapiens
tttttttttttttttgagacagagtcttgaggaaatacatttctaagaaggatttttacagacactcatctttcatacccaaccacagggtctaactctaaagaggataaaaccaattactttcgtcccaagagctcatgactaatgacagcgtaaatctatgctatcaaaacctgcgtctctcatctgttacgagtattcaggcaggattcaaatattctcaaagaaagaaacacagtgcatgctgtgatcgcctgctcagcaacaacaagcactgcatcccaaactatctcctcccaggaattaaatgaggccagttgtgtacactggcatttcctccactgtggtactgcagaaggtctcagtgtcacaaagaatccttttgtcttctttaatatttatggtcacagctgtcttcccaagttgaccccgactgccagttcaacaagtcagtagcagtcaaaatatggtttgtcctttatctgaattccctcctgataatgttttcttccttctgtcgctaccctctttcaaaattattgtaaaacactgattctttcaagggccaattcttccttcttcaccagaatttgaaatagatctgtcatgaacttcttggtaacttccaacatattaatattgaggcagaaagcacacaatctttaaaaagagccatactgaccagtctcagggtcacgc

SEQ ID NO: 3283 - DNA, 462 bp, Homo sapiens
atttctatacttctcataggcctttttaaatctatggcattgtttcccagcttgctatttcatcctaagtctaaataatgtcagatggagaagaaagcaatgaaatatgcatattaaactacaaattcttgaaacacttgcaaaataaacttagtacatatacatatattttgatattacaagaaaaaaatgtacaaactgtgaagataaatatagacctacaagtaggctattacaactcagataaggaacattctcttcattccataggtataaccggtaataaaaacatttccacttaacatataaatcaccacatactataaattcgaaaatacttacaggttgattgtgttctaacacgaaaagcaaaatacacatacactgtatcttttcagggcagttatcatgaaccaagtataatgctgggtatgatatcaaaattcattaattcacaatatc

SEQ ID NO: 3284 - DNA, 693 bp, Homo sapiens
tttttttttttttttttttttttttttttttatttgcatatttgtttacataagcccaaagtttccttttagactgattgttacttgtagcttctatccacttcagcctcatttccatttttgtattttatgagtttagaagattctaactttcaactttcttcatgctgtgatctgaacttccttcaagtcagatacatgctgtgaacaagtgggtttctttactttgtaaaaatcctgttaagatctttattctttttattacttatctacattctacattgcaatttaatagcctgtacaaagtaagtgcatggtaatttgagattatcccacaaataattttgggagaagaatttctaaattatttatgaatgattacatgaagaataatgatcagaattttaaaaagtgtagaaagcttagctttgaggaacagttgttgccctacctcattataagctctaaactattttactgtctacttcaaatatttcagggttttttcacaccaaaaaaggcttttgagtataagaactttagaatgcaaaatattttaactcatttattccatttatagtaccattcattgacttccaaatactaaacttcattaactacgtgcatatatatgtggttcaacatactatattttcctctgactaagactgctttgaatttacttgatcatgt

SEQ ID NO: 3285 - DNA, 244 bp, Homo sapiens
accaagggcacccagtcaccattctgtcctgcttgcatggctgacactgttgctcaccgagggtgagcagatctgcaaagtcacccagggcctggtttcctcaggtacagagaaccccaaagaaagaagagccagaacttagacgcccctttcttctccatatgggataggacacccaagacaaatgacccatgcatcatgaaacagaggcagggccctaagctgcccaagaggcctgggcact

SEQ ID NO: 3286 - DNA, 683 bp, Homo sapiens
ttttttttttcaaacagctcttggatagtaaaatcatagagataggaaaatgtttattaaaaatgagttttctgagcactatgcttacattgaagaatttttgaatcctacaattctcaaacctaatttggaattatccctaaagtatctgtaataatagcaaatgttttattatttcctaccatatcatcttttaataatcaatcaactcaagtaataataaaacttcatttttattattcaagttttgaaaaggtttcctgtcaaacagaaattatatgtcttggatattctgttaaaatcaaagatttttagagaaacaatctttttgataactctctctctctctctctctctatatatatatatatatatttccgataactatctattataatcaccaaacgtgatatttgttattaacaataaagatcaaatattagcactttgagaaatagtaaacatgtagatttattttttctaattttccaagactttttttttcattttattctattcatttaaatcctacattcagcttctcatcttgtctccttatgtatatttgtcacttccaaattatgaatcggatagtttttcaggtcacctgtgaccaacactaaaacccactctcttgtcttaagcttctgttccctacaatatcatctaattgctttctctta

SEQ ID NO: 3287 - DNA, 695 bp, Homo sapiens
tttttttttttttttgatggagttttgctcttgttgcccaggctggagtgcaatggcgcaatctcggctcaccacaccctctgcctcctgggttcaagcgactcccccgccccagcctcccgagtagctgggactacaggcatgtgccaccatgcctggctaattttgtatttttagtagagatggggtttttccatgttggtcgggctggtctcgaactcatgacctcagtaggatcatgttctgtatagattatgaatgaatgagtagatggatagaaggatgaataaaaagatttaagggttgggaatcctgtttgtaactgtgtgtaatttcactcgttcatagggctttacaaaataatgaatttaacaatcaaagtttatctgtttaaaattatgatttgagacaaagttgaggactaacaatgaagatgaagagaaatcatcacaaggcattgtggtaatccctccatacttaaaaaagagagataggtaaggttaacattttccattaatattgtgtcgagaagaccaaggctttactgagcttagatcactcttggagagggatcaagacaaaataccaggaaagaagaaatgtcttcccctccgtgctttaaagaaatggtagtattcttctaaaggagaaagatgtaacagaatagtatattaacatcttaaacatccatgcca

SEQ ID NO: 3288 - DNA, 609 bp, Homo sapiens
taggttcagtgagtttcgatgactagcctggccaacatggggaaaccccgtctctacgttagatccagaattatgccaggcatgttggctcacgcctgtaatcccagctactcaggaggctgaggcaggaaaattgcttgaacccaggaggtttcagtgagctgagatcaccccactgcactttagcctgggtgacagagggagactgtctccagagaaagaaaatgaatacgtgaaacatatagaagatctggaaaagaattagtctacggcattgctccagtggatggtatatggtggatttgacttttgtcttctgtattctccaacttttaaattaagtctaaattagctacccaaatatggagaaaaggatataccgggcttaatttttggaattcggccagagggtaaaaaagccccagcaggctaggtgcagcagctcatctctgtaatcctagttccttgggaggttgaggcaggaggatcacttgaggccaggagttcgagaccagcctgggcaacaaacgtagtgcaacccggtctctgcaaaaaaaaaaaaaaaaaaaaaaaaaaaaaaaaaaaaaaaaaaaaaaaaaaaaaaaaaaa

SEQ ID NO: 3289 - DNA, 704 bp, Homo sapiens
  misc_feature (596)..(596): n is a, c, g, or t
aaattatacttgaatttttttgttatcccagtagtaatttgagatcttcaaaaaaggatatttctcctacttttattgatttggaccagagcttaggttggaacagagaaggaaagatggataatgaactgaactgaaaattccaagatcaccataaacctaaatcacatcttagaaatctgggagacactactgcttcttagggcatgcttggttttcttgttgacaacttttcccccctcatgcctagcaagaggaaaggaactaacttcacagagttaaatgacaaggcaatacaagggaaattaagtgtgactttagatatgctggtacatcaagaactcaaattcaatttgtgtgagatatgaggttctggtgactgtcctgtaactctccactgttatcacaaatcacccctcccagtttcttcagacaaaataaaagcattaagagacatggatttcctggttttaagtagaagaaaataataatatcctgcatttgttgagacaggagatcaagattgggtgggtatatataccatttttcacctattaaaatagcaagggttatttcaagtgggattacttcatgtnggcaagtgtactgacatggatgtgcttatatatggcagtgggagcattaaatgattcgatttaaggggggagaattggcagactaccagagctaatattacttgaccc

SEQ ID NO: 3290 - DNA, 647 bp, Homo sapiens
tttttttttttttttttttgagacggagtctcgccctgtcgcccaggatggagtgcagtggcgcgatctcagctcactgcaacctctgcctcctgggttcaagtgattctcctgcctcagcctcccgagtagctgggactacaggcatatgccactatgcccagctaattttttgtatttttagtagagatggggtttcaccatgttggttaggctggtctcgaactcctgacctcaaatgatccatttgcctcagcctcccaaagtgctgggattacaggcatgagccaccatgcctggcccccaccccagttctttaaaatgctttcaactaatagtgtcccatttgatctggtcctcttgacggtcttgtgaagtgagtaggactggtgatatttttcttgttttcccgtttgagaaaaatgaggctgggaggtttgcccagttagtaagctaagtgatggcagatggggtctcaaggagtctctgattccaggaccagtgtggtctccgccattcccctctgcatccctttcacccactccactggcgcaacacctccccgggcacagtggggtcaggcagggtggtcccatagcccttgtggtcagcctgcagaggagcccgaacggcgctttgcggcatcc

SEQ ID NO: 3291 - DNA, 709 bp, Homo sapiens
  misc_feature (80)..(80): n is a, c, g, or t
cgagcttcaacggccattgagctttgggcctgaccatggagcataagcaaaggatctcagggtggaagaagatctgtctnccaggtggagcctgcaaacagcagggaaggtttagactttggggtctacgtgcagggcggggaggttagggtgtgaaggaactggcactccaaactaagggcttctagctttatcttttaagccaccagagaggtcaagaaaacgtgtcttttttctgcacaaagattttaaatcagaagggatacaattagatgtgcatttacagaacagaactcctgctggagtgtggaaagagggaagagattggaagcggagagtgagagaggcaagaaattttcataaagttttttcataattctctcatttcttttacttgaaatagcaccatgggctgggcgcggtggctcacacctgtaatcccaggactttaggaggccaaggcgggtggatcacctgaggtcaggagttcgagaccagcctgctcaacaaggcgaaatcccacctctactaaaaatgcaaaaattagctggacgtggtggcggctgcctgtaatcccagctacttgggaggctgaggttgcagtgagctgagatggcacaactgcactccagcctgggcaacaagggtgaaactgtctcaaaaaaaaaaaaaaaaaaaaaaaaaaaaaaaaaaaaaaaaaaaaaaaaaa

SEQ ID NO: 3292 - DNA, 676 bp, Homo sapiens
  misc_feature (79)..(79): n is a, c, g, or t
ggtacatgaccttatgggactttcctacttggcagtacatctacgtatttagtcatcgctattaccatggtggagcgtntttggccagtacatcacatgggcgtggatagcggtttgactcacggggatttccaagtctccaccccattgacgtgcaatgggagtttgttttggcaccaaaatcaacgggactttccaaaatgtcgtaacaactccgccccattgacgcaaatgggcggtaggcgtgtacggtgggaggtctatataagcagagctcgtttagtgaaccgtcagatcgcctggagacgccatccacgctgttttgacctccatagaagacaccgggaccgatccagcctccggactctagcctaggccgcgggacggataacaatttcacacaggaaacagctatgaccattaggcctatttaggtgacactatagaacaagtttgtacaaaaaagcaggctggtaccggtccggaattcccgggatcacaaactggtcaataataggtaatgcaggtatgttcaggttaagccaacaatgttttgcatttttatgcttattttctgtcaacactaatgaagtcaacattgcctgaatgtctgaataatgaaacacatccctgtttaaaagtatgtaactgaaaaagaaataaaaaaaaaaaaaaa

SEQ ID NO: 3293 - DNA, 151 bp, Homo sapiens
tttttttttttttttttttgagacggagtcttgctgtgtcgcccaggctggagtgcagtggcacgatttcagcccactgcaacctccacctcccgggttcaagcgattctcctgcctcgatcccgggaattccggaccggtaccagactgc

SEQ ID NO: 3294 - DNA, 744 bp, Homo sapiens
  misc_feature (616)..(616): n is a, c, g, or t
tttttttttttttttagaatatttgtatatacatcatgagatatcttgggatgggacccaacttcatttatatttcacatacaccttatacacacagcctgaaggtaattttatatagtattttaaataattttgtgcatgaagcaacatttgtgtacattgaactattagaaaagcaaaggtgtcaggtgtggaattttccacttgtggcatcatgttggtgctcaaaaactttttaattttggattttggattttgggattagggatgtttaacttgtattaggattaatccatcttgtcatgttgttctatgtgtagcttcttagttctagggaataaattagaaagggatgggaaatggcatcgtttcccctgcattgggaatcaggacatgccggcttgtgagcaacaccaggtggctctagggaagaacttactcactatcgggatcttgaaacaccagcagtggactctctctgctttgaaattcctagaagcaaatcataaccacatgaagacaaggactggaccagatggtttctgctggtcctctccagttttctgactcaatcctgaggattcagccaagatagaaataactttccatcttcccnctcaggcctgtctttcatgctcttagaggtgcagtctgatagaagagcaacagtcactacagccataaggatctagacctggtgggcaatcctcatgcaggccttttaagctttccaagagcttttca

SEQ ID NO: 3295 - DNA, 708 bp, Homo sapiens
  misc_feature (47)..(48): n is a, c, g, or t
acttgcgtacttggccagtacatctacgtattagtcatcgctatacnncatggtgatgcggttttggcagtacatcaatgggcgtggatagcggtttgactcacggggatttccaagtctccaccccattgacgtcaatgggagtttgttttggcaccaaaatcaacgggactttccaaaatgtcgtaacaactccgccccattgacgcaaatgggcggtaggcgtgtacggtgggaggtctatataagcagagctcgtttagtgaaccgtcagatcgcctggagacgccatccacgctgttttgacctccatagaagacaccgggaccgatccagcctccggactctagcctaggccgcgggacggataacaatttcacacaggaaacagctatgaccattaggcctatttaggtgacactatagaacaagtttgtacaaaaaagcaggctggtaccggtccggaattcccgggattacatctccaagtggctcaaaaggccttgacacagggaacctgcacatatccaggatatgtgtaaccagcgatggtgacttgaccttgccaagacctgtgattccttcaggatacaatcagtgagaaataaaaacacatcttgggaagtgggaatcctggagtttatgccatttgcaatattaaaaaataaaaatgcaagttattatttcaataataaaaaaaaaaaaaaa

SEQ ID NO: 3296 - DNA, 743 bp, Homo sapiens
tgccgtaatgccgctgcatagcccagacagacctagggacttcctacttgggcagacatctacgtattagtcatcgctataccatggttgagcggttttggcagtacatcaatgggcgtggatagcggtttgactcacggggatttccaagtctccaccccattgacgtcaatgggagtttgttttggcaccaaaatcaacgggactttccaaaatgtcgtaacaactccgccccattgacgcaaatgggcggtaggcgtgtacggtgggaggtctatataagcagagctcgtttagtgaaccgtcagatcgcctggagacgccatccacgctgttttgacctccatagaagacaccgggaccgatccagcctccggactctagcctaggccgcgggacggataacaatttcacacaggaaacagctatgaccattaggcctatttaggtgacactatagaacaagtttgtacaaaaaagcaggctggtaccggtccggaattcccgggataaagaagttaagaactttgaaaaaaaattagatgaatggataactagaataaccgatgcagagaagtccttaaaggacctgatggagctgaaaaccactgcacgagaactacgtgacgaatgcacaagcctcagtaactgatgcaatcaactggaagaaagggtatcagcgatggaagatgaaatgaatgaaatgaagcatgaagagaagtttagagaaaaaaaaaaaaaaa

SEQ ID NO: 3297 - DNA, 718 bp, Homo sapiens
tttttttttttttttaggtataaaaaaatttctttaatcagaaaggatttatcttccctcaacacaaatgcacacattaatagtaaaaatacatatatacataaatatttacacaaattagaagtcacagtggacagctgtatgccctgggctagaggttgagaagatgagcatcagcagcaactggaggatggcttctctgctgctcccggtgtcctatggtcatctttctggccaaggtgggtagactgggaggggatagggtatagctccagtctgatggcagagttactggcaaactgtagcaacgaggaccctctccagatagtttcataggctcaccagggatgacaggagatgctgtagtaggtgggactggggtggttggggcagagtgggtgaagggttgcactccatgctggaggaaaagaatgacgccaatgccggttccagtgcctaaaggaccatggctaaaggagatagtacctggggagctgagaggggggttgcaaattggagtggtgtggatccaggtgaggttcatagctggccattgtgtgaggtgccaaggctgcttggttttaaagctagatgtcctactgtgtctggtccatcttttccataggagatgcaggagaggaagcagctgaatcacttgtggtggcttggaaaatgctggtcagctgatgcttgcaacagccaatgatgacttctggca

SEQ ID NO: 3298 - DNA, 616 bp, Homo sapiens
ttttttttttttttttttttttgcttcagctgttgtttattgacatacaggtaggctctatagcaacaggcctggaggtgctgcagtagtgggggaaaatggaaggtggagggtggagtgtttgctgcaggacagctgagtggagggtggggacaggtgcaaactggagaggcctagagagctagagaagcaagtaagggccagtggccagagtcggcttcaatggaacaacagcccagtgccctaaggcccctaactcttgctggctgtttcttgaccccaagccagggattgggagtcctctgggcatccattttttctaaaggaactggacagagtacacacaggaaaggaagctgtcaccctcttgccatctggctccaggggcctccagtccagcattcctcctttcttcccttgattgggtggggccacaatgatgggcaagccaggcatctgggcctgtaccactagagcaggctgcaaacacagacatgtatcagtagaggcgtatgaatcttcttccctggtgtcccaaacctaccagtgccacggttacagcccagagtgagtcctacaagcgttgctaggcctaatggatggcgctgaggagaaa

SEQ ID NO: 3299 - DNA, 689 bp, Homo sapiens
  misc_feature (53)..(53): n is a, c, g, or t
acttgccagtacatctacgtagtagtcatcgctagtaccatggtgatcggttnttgcagtacatcaatgggcgtggatagcggttgactcacggggatttccaagtctccaccccatgacgtcaatgggagtttgttttggcaccaaaatcaacgggactttccaaaatgtcgtaacaactccgccccattgacgcaaatggcggtaggcgtgtacggtgggaggtctatataagcagagctcgtttagtgaaccgtcagatcgcctggagacgccatccacgctgttttgacctccatagaagacaccgggaccgatccagcctccggactctagcctaggccgcgggacggataacaatttcacacaggaaacagctatgaccattaggcctatttaggtgacactatagaacaagtttgtacaaaaaagcaggctggtaccggtccggaattcccgggatgacatattatttaataaaatattcagttttatgggtactttataaagtacagtaatttttcatttagaaagtatcatctttcaggcatgaatgattctagacactaagatatgagcatagaagttcagaagtaatcatctgcaaccatgtgtgtcctataatggggaataaaacagatgagaataaaaaaataaaaataaaccataaaatccctaaaaaaaaaaaa

SEQ ID NO: 3300 - DNA, 736 bp, Homo sapiens
tttttttttttttttttttttttttttttttttttttttttttttttttggggaatcagaatctgtttttatatccctagagttataaacatttgtatcaaaatatttacaattatagtatatgaaataatctattaacgaagaagcccaatacagtactagaacaatccaccagagtaatgcaaattacatgagacataaatgtcacagaaaaaaagtaaaagataagggaatacatggtttactccagtcatagttcaacttcttaacaaaatgtgagtattccctttggatatgtctgaaatgtaagtatgttttttgcactaagacagccttctataatcatgtgataatgaaatcataatgacaaagttcatcttcccacagtttttgctggccaatctctctaacctcagcctaggtaattgggtggcttgccctcaacatttccttaactagaataaacatagagaaatagaattagtaataatccttttacataaataccaaaaatcatggcataacaactccccaaaaaggaaaggtataaaagaaatgaatgaggagaaagctaataaagaacaagtaggcaagatgtctcagattctccctggggtagatcttctcaggggcgataaagaaaacgtcttcccaaaaaacccctttagacagaatcttgagatggttaaaatagctgtccaggggcaagcaatgctgcttaacaggaataacctac

SEQ ID NO: 3301 - DNA, 736 bp, Homo sapiens; identical to SEQ ID NO: 3300

SEQ ID NO: 3302 - DNA, 583 bp, Homo sapiens
tttttttttttttttctctaatcttgtcttcatgctttatttcattaagttaatcttcaatctctgatatcctttcttctgctggatctatttggctactgatacttgtgtatgcttcacgaagttcttgtgctgtgtttttcagctccatcaggtcgtttgtgttcttttctaaactggttattctagtcagcaattcctctacccttttttcaaggttcttagcttccttgcattggattagaacatgctcctttagctcagaggagtttgctattacccaccttctgaaggctacttctgttagttcgtcaaactcattctccatccagttttgttcccttgctggtgaggagttgtgatctttggaggagaagaggcattctggtttcggaattttgagacttcttgtgctggtttacctcatctttgtggattcatctacctttggtcttgatgctggtgacctttggatgggggtccagtgtgggccactccttctcgtgatgtcgatgctattcctctcctgttgtcggtccccttctaacagtcaggcccttctgctgtatttctgctggacgtt

SEQ ID NO: 3303 - DNA, 681 bp, Homo sapiens
tttttttttttttttttttttttttgagagtggaaaatgttaccttttagttcacactcctaatcccttagtccccataaaataaacattctaaagtgtaagcagtagaaataatggaaactccacagaaacagaaataaattagtttctttcagtcttggtggaggtccttttgccgaacaccatactccactgtgaacagaattcatcttgaacgaagaagaaatctttggcctatttcaccatgtctccagcattgcataacagacatttttcaaattcagtttcttctccaactgcagcaaaaaggcaaagagtagtctgtttcaggagtctgcatcgggtcctgtgagagccttgtccacttagaacaagcctttaacttgttctgtttcggtatcaagatctatgtcataaaagcagggccgggtgggcagtcctggcatggtgctcatcgttccgaccaaagggtaaatgaacccagcgcctatgctggcccggacgtcactgataggtaagatgaagtcccttggcaacacctttttcgtcaggttggtgagatcacagcaacggtgggtctttgccatgcagatgggcaaattccaaaaccctgttcggttgtaacgatctatatgggcttgtgcctcaggagagagtccacatatcttggctccatagaca

SEQ ID NO: 3304 - DNA, 681 bp, Homo sapiens; identical to SEQ ID NO: 3303

SEQ ID NO: 3305 - DNA, 664 bp, Homo sapiens
tcgctatacccatggtatcgttttgcagtacatcaatgggcgtgtatacggtttgactcacggggatttccaagtctccaccccattgacgtcaatgggagtttgttttggcaccaaaatcaacgggactttccaaaatgtcgtaacaactccgccccattgacgcaaatgggcggtaggcgtgtacggtgggaggtctatataagcagagctcgtttagtgaaccgtcagatcgcctggatacgccatccacgctgttttgacctccatagaagacaccgggaccgatccagcctccggactctagcctaggccgcgggacggataacaatttcacacaggaaacagctatgaccattaggcctatttaggtgacactatagaacaagtttgtacaaaaaagcaggctggtaccggtccggaattcccgggatcaagaccctacttctaacctccctgttcttatgaattcgaacagcatacccccgattccgctacgaccaactcatacacctcctatgaaaaaacttcctaccactcaccctagcattacttatatgatatgtctccatacccattacaatctccagcattccccctcaaacctaaaaaaaaaaaaaaaaaaaaaaaaaaaaaaaaaaaaaaaaaaaaaaaaaaaaaaaaa

SEQ ID NO: 3306 - DNA, 671 bp, Homo sapiens
  misc_feature (221)..(221): n is a, c, g, or t
ttttttttttttttttttttttttttttttttttttttgtgtgtctcacatatacattgtatgtgtttttaataataatttagaataactaatgataagtccaataaaaggcaacttttttgaaggaaatatcaaattggaaaacttcagttttcaaaagaatcagcatctaagaagctctccatttatgttccatatttaatgctagaaatctctcttangatatgtgaacagtactactagtagtttggagaaaagtaactctctaaaaaatagcaagataggtaaattctggtatcaaaatgtgaaccaaaattcctaaaaatgtacattgtaaaattcaacaaaaatatataaccctaattccttatttaaattaagggatctgtggttagtagcaaatgctgccttaagtgatttctcagtagtgctgctttgttattcttttcatacatttgatatgaaaatcaggataaggaacaaaatcctagtcactagactactagggggctcaaattctatacatattctcgtgcaacaacattgaataaattaaccgtttctcgagacattatcagatcgaagttatttccgttaactaaatgcaataattcatatattttaagcagtcaatgtactattaggttactattacgtgtcacttttcacaa

SEQ ID NO: 3307 - DNA, 653 bp, Homo sapiens
tttttttttttttctgttaatggagtggcatttcatcacattccacacatacagtatgttttaacagtttttacattctgataacgactttggtgaaaaagcagtgaataatgtgttaacattgctaaaaatgaccttaacatttatattttctgaatatgttatttgaacaaataacctctatcttatttaatatatttttgctcacatttcctaagtaacatttatatgtgtatgtaaagactaaaacctaacacttacccatgttcagtaacaactgagtagagggtgcgccctaaaattaattctgaaaaaagtttatatgtcttcaagttgctgtcttcatgtgaattgctatttgaagctaagtagctgataatttctagacatattcattcttttgtcctaagagccagtcgttctgaatattagaaagaacatattcatgtccaagaagcttcatgctaacaggcaagacaattacatgaaggataagtgtcaacataataagcaagtatattccttatagatatttgcttggaatggtcaacgctttatggggacatattcctttggaatgattcaacccagaagaggattccttcaacatgcactcagagttctcatgtcttgaaatatgagggttgagccta

SEQ ID NO: 3308 - DNA, 626 bp, Homo sapiens
tttttttttttttgagatggagtttcactcttgtaccccaggttggagtgcaatggcgcggtctcggctcactgcaacctccacctcccaggttcaaaagattctcctgcctcagtctcccaggtagctgggattacaggtacacgccactacacccaggtaatttttgcatttttagtagggacggggtttcaccatgttggccaggctggtcccaaactcccgacctcaggtgatccacgcaccttagcctcccaaagtgttgagattacaggcgtgagctactgtgccaggcctcactttagcctttaaatttagcacctgtgagtttatcggggtagcaaatgccaggacaggataacaccatagagagcccatcagcacagcagggcttcttctccctctattcttgaagcattctagctttgcaccccttaagtcactcaattgtttggcaaacctggaatggtttcccttcaacaacagctgaatcccaggatattccaagtcttgatgattagggagtgaagccaatatcttttcaaagtctgagctcaccccctgttgtaaccattattgcctgtcaatcttactctagtcttgcattaccacaatttccacgctca

SEQ ID NO: 3309 - DNA, 707 bp, Homo sapiens
tcacacaggaacagctaggaccattaggcctattaagggaacactatagacaagtttgtacaaaaaagcaggctggtaccggtccggattcccgggatctgtggctcacacttgtaatcccaccactttgggaggctgaggcgggtggatcacttgaggacaggagttcaagaccagcctggccaacatggtgaaacaccgtctctactaaaaatacaaaaaaattagctgggcatggtggcaggcacctgtaatctcagctactcaggaggctgaggcaggagaatcactcaaacccaggaggcggaggttgcagtgagctgagatcacgccattgcaatccagcctggacaacaagaatgaaactccatctcaaataataataataataaaataaaataaaaaattatccaacaggccaggtgcaatcgctcacgtccgtaatcccaacactttgggaggccgaggtgggcagatcatctgtggtcaggcgttcgagaccagcctggccaacatgacaaaaccatctctactaaaaatacaaaaattagctgggtgtggtggctcatacctgtaatcccagctacttgggaggctgaggcaagagaatcacttgaacccaggaggtggagtttgcagtgagccgagattgcaccactgcactccagcgacagagcaagactccatctcaaaaaaaaaaaaaaaaa

SEQ ID NO: 3310 - DNA, 658 bp, Homo sapiens
tttttttttttttttcaatattaggtaaaacttagtaatattttcacttaaaattaaaactctaaattagttaattaacattttaattgaaatgtcaagactgacctatttataactcacatgcctaaaataccaaatgtgcacagattcctaacgcaaaagtagtaatactgttgagttgatattcttaaacatttctatatccaattctacctctttctgaaataagacttagctggggaataatctgggtcaatctgtcaatttctgggcatcacttttttttttgcattgctttctccgcttgttggaagttgcacagcaatcaaagatattggcctagatctttattagattcttacttgctgcctcaatcttgagaacactcaaaagtggtgcccctcagccatggcctttatgttcaggtgacaataactcattcttttgctgctcaagcaaaatttcaacttctgctcaaaatggtcatttaattagattttgcctttctttgggtcctaagatatgtgaaagtatcttatgtcaacataaaacaccctttgaattgaggaaagcctgtattcttctattccccctatttttagaacttcataactctaggaatgtaccatgtggtgtctggtgtgctaagcgttatgag

SEQ ID NO: 3311 - DNA, 731 bp, Homo sapiens
ttttttttttttttttttttaatttcaatggttatcaatatgttacagaatgaattgggtttattacaattggtgaattgctccaacaggagctcttcaagggaaagaagatggcagttaggactcagaataagtttacaaaagtgatcattgttatccagtcagaatgtgcatgggggagtacttctcacctataacataacaggtgatcatattgcattaaaatattcaatcgtgtctttaatagcaaaacatcatattggaattttcttcctgaatatgtactatatttctaaacatcatgtaacataacactcattgatataatgtaaaacagaataagctaatattggtcacaagtatcactgagatattttaagtactaagaatacatattgacagaaactgattacataaatacctattcagttcattaccagttatatctattattctcattcactagggaataatcacacagaaataattatctttaaaggagttaccaagagagctaacatgatatccaattagttctttaaaacaaaagcaaagccaacagccagactacatgtattttaaatgatttttttgctggtgcatcattctcctgtccatgttcaacagtgctctcttcattggctgctccattttggtgatggccataccaaatggctttagttcattccatggtccttatgaagtagagagtccagcaggactgatttccg

SEQ ID NO: 3312 - DNA, 709 bp, Homo sapiens
tttttttttttttttcatttctttgcttccttaccctgcaaggattatttccccttcctccatactccctggcagtgggtcctgctcaaaagcacgtcccttctcattttgccttaatccagggctcaggcaaataggatgtgaccaaacctcacttgggcagtaattaaagtgatgtacactttaagccaaaaaggttgggactaagcagcatgatgagagtggttgatgagagacaccagggctgtctcttccctaaatatacatacctttgtttccatagttaacacttaacaggccaggcatggtgactcacacctgtaatcccagcactttgggaggatgaggcaggcagatcacctgaggacaggagttcgagaccagcctggccaacacatagtgaaaccccatctctactaaaaaaaaaattcaaaaatcagccaggcatggtggcacatgcctgtagtcccagctacatgggaagctgaggcaggagaatagcttgaatccaggaggtggagcttgcagtgagccgagatcgtgccactgcactccagcctgggcctgacagagcaagactccatctctaaaaaacaaaataaaacaaaaacaaagtgatttctcttgtcacactcagatggcctagacacatgggcatgtgaggtcccaaccctttaacagccccatctggagctaggaaccacgagcg

SEQ ID NO: 3313 - DNA, 722 bp, Homo sapiens
  misc_feature (47)..(47): n is a, c, g, or t
catgtgatgcggttttgccagtacatcaatgggcgtggatacggttngactcacggggatttccaagtctccacccccatgacgtcaatgggagtttgttttggcaccaaatcaacgggactttccaaaatgtcgtaacaactccgccccattgacgcaaatgggcggtaggcgtgtacggtgggaggtctatataagcagagctcgtttagtgaaccgtcagatcgcctggagacgccatccacgctgttttgacctccatagaagacaccgggaccgatccagcctccggactctagcctaggccgcgggacggataacaatttcacacaggaaacagctatgaccattaggcctatttaggtgacactatagaacaagtttgtacaaaaaagcaggctggtaccggtccggaattcccgggatgttgaaccctttggtaaactaaagacccttttataatgcacatattcccaacaaaattaatatattttgtgagattaaacaatgcttgtatatgcttgaactttcttaaaatatgtccatgtcatactattatgaatgtacatttttatgagtcataaatattattttcaaaagcactacaggcccatgaattacttcctcacttttgcagttgattactgaaatgtaaatcacaagaatttgtcaattaaatcattttaaactgcaaaaaaaaaaaaaaaaaaaaaaaaaaaaaa

SEQ ID NO: 3314 - DNA, 705 bp, Homo sapiens
tttttttttttgattacaaatcattaattcttcagatccctttcttcatcttgaccagatcacatggctaagaatttgcaaatattaggttggtgcaaaagtaattgcagtttttgccattacttttaatggcaaaaccatgattacttttgtatcaaccaaatagttcttagatttgcaatgaggagaagtggtagtatcaagtgtggatgagctctgacaagaagaagcattaatgtctttgctatagtttggatatggtttgttcgtccgcaccaaagctcatgttaaaatttgattcccaatataatggtattgggaggtgggtcctagtgggaggtatttgggtcatggaagcagatccttcatgaatggcttagtgttgttcttgtggtagtgagagaattactctggcaagacaggactagttctcaaaggaatgcattagttccctcaagagtgggttgttgtaaaaccaggacacaccttgggttcagtccctcttcagatgtgtctgcttcccctttgtccttcttcaccatgttctgatgcagtacaaaagccctcaccgaaagcttgatcaggtgccagtgccatgcttcttgaactttccagcctgcagaactgtaagctcaaataccacctctttctcttataacttactcagcctcaggtatactgtatagcaacaacaaaatggatacg

SEQ ID NO: 3315 - DNA, 734 bp, Homo sapiens
tttttttttttttttttttttcaagtggagtggagactctttacttgcggttgctctcagaaaccacatctctactcgtgaaccaggagtttggggatggcaaggagaaggccagtgttgattctgacagcaatcttctggctctcattcgagatgtcttacttccccagtaagtatcatgcagttgtattcatgcagagaagtgtaggctatccaggaagcttctgtcaaactaggttcagtgatggggttggggtcttgatgtccttatgtttatacacatatgcttgtgtactcattataaaaaaagtttagacaggtgcggtaactgttagactgcagaagactcagaaggtctcagttcatctttgaggacatccatttaaagcttaatctgttttttgccagaagcatgattttgaagttatgcagatttaaacgtgttcatggctcaaggggtgagggttatgattcaaggtctatattacaagactactggaacatgaaattgagacttctcctggctctactcagaaataatagagatagaggtaatccccttctccaaactcttggaatagaacttaggtctagttctgagcaggactttctcagggttgggtggaggtggcggaacaggtactgagtatggagaaacggtttcggtatttctttttaccttcattgctcattaagcaaacccacagcaggatgactactgagggccctaatgc

SEQ ID NO: 3316 - DNA, 626 bp, Homo sapiens
tttttttttttttcacaatttaggtttacttaaacatgtaactttggaagtcagcatggagtttgggcccagaatggaaattgggtgtcagagatttgtttttggtcatgtcatttgactgtaccagtcagctctatgatggcagaaaactttcacattgttttctatcactgcctcttgccaaggtccactggggttatttttactgttgatgttttcctgagcttttgcatttttttctgtgggctggtccttttatacactttaaaaatcagcttctcctaaaatcaggactttactgtaggcaaagttctctgaaagagcccacaaagtcacttttataactttaaccccgactagttaaaagcactcactatgttgatgaaatcctatttctagtttgggttgccctagagacatgattcatgtccccctgtgacatggattcaagtgcaagtagtatatctgggaggtgatcctaacaaacacctgtagaggagtggagaagtgagacagggaacgggaaggagccagcatcgggttcagtgtcaattaagtgaccactataggcacaggagcttaagttgctgagtaactcggggagccagcgtaagagtcatgataca

SEQ ID NO: 3317 - DNA, 643 bp, Homo sapiens
ggatttgtttttggcaccaaaatcaacgggactttgccaaaatgttggtaacaattccggccccatttgacgcaaatgggcggtaggcgtgttacggtgggaggtcctatataagcagagctcgtttttagtggaaacgcgtcagaatcgcctggagacgccatccacctgtttgacctccatagaagacaccgggccgatcagcctccggactttagcctagagccgcgggacggataacaagtttcacacaggaaacagctattgaccattaggcctatttaggtgacactatagaacaagtttgtacaaaaaagcaggctggtaccggtccggaattcccgggatcgcgagcggccgccctttgttttttttttttgcatagaggtgttcatggtagtctctgatagttattggtatttctgtggggtcactggtaatggcttcattctttctaattgtgtttatttttatcttctctcttttcttttttattagtctaactagtggtcaggcttaaaaatccatgcacaatcaacaaaaccaagagttggtttttagaaaataaattataagactgaccactagttagactaataaaaaaaaaaaaaaaaaaaaaaaaaaaaaaaaaaaaaaaaaaaaa

SEQ ID NO: 3318 - DNA, 704 bp, Homo sapiens
ttttttttttttttttttttttttttgagacaggtcttgctgtcgcccaggctggagtgcagtagtgcagccatggttcactgcagcctctggctcctaggctcaagcgatctctcgcctcagcctcccgagtagctgggactgcaggtgcctggctaatttttgtattttttgtagagatcggtcttgctttgtcgcccacactggtctcaaactcctggcttcaagtgatcctcccgcctcagcctccgaaagtgctgggattacaggtgtgagccactgcactcagcctcagtcattgtttcattcattcatcacacatctgagtactgcagtgtgccaggatgacagtgaggtaggaacacagaccagcacggaggtgggacagagcttcctggagaagggcttttcaaggttgaataggagtttgcaatgaggaaaaaaagtcacatgatctttctttttttttgagatggagtttcgctcttattgcccaggctggagtgcaatggcgtgatcttggctcactgcaacctctgcctcccgggttcaagcaattctcctgcctcagcctcccaagtagcatggatcacaggcatgtgccaccacgcccagctaatttttgtatctagtaagatggggtttcaccatgttggtcaggcttgtctttgaactcctgatctcaggtgatccaccaacttggc

SEQ ID NO: 3319 - DNA, 720 bp, Homo sapiens
tttttttttttttttacaattaacattcactttattcagttttgtcctctcaacttagaaggcaacaaatgaccacattaaaaagggagcatttcagaatatatatacataaaattggtctgggtaccctaaggtgtttgcgttgatagaaaattgacaccccaaactaagtgttctacttagcttctacaatagttattcctagaccttagattagtcattacatttttatttaaggtactatgttactttcatgactacaaaatgaggcactcgtacaaaacaggaatgaaaacatacatatactgtcttgtctttatgtcgtattaatgccaaagatattgtcagggattattttaaagaagcccttactcatgatggctatttttaaaaatggcacaggacagtaacaggctgaaaagaaaacacctggttgaggggacaaattaagtaaatacaagacagcttaaccaaggaagtcagcgaatctccacaaatgaggcttttaataatactttactggtaagacattttagttgggtttttttttgatggctgaataacatcctaaagaagtattttaaatataatcttttaatttctacaatgtagaaaacttctcacagtaagtagagagcttagagtactcaaccctgaaaatgaaaataagtagctagcttggaagtctaaaaagcgccagtgtcttatggcactacttct

SEQ ID NO: 3320 - DNA, 659 bp, Homo sapiens
tttttttttttttttttttttttttttagtagcacgattattttattatatgctttataaaaaaacaaacacccaaagacatacaacacaccgccctcaccccccagcggccattagggagggggcttatacttttcctaatgtagatctggccatcttataaagcagaccacattatttgttctccatatatacctgtagatatttctctcccctcaaatatttatatctcgactaaaaaaaggaggtgcaaagagtatataaagataaatgagattttcttgctgtgttatagtacaaacaccagatgactaccagtggagtaacaggtcaaaacaaaaacacaaaccccaccttcagtgaggaatggaaggtctgttaccgacctcaagtagctgaatcacctgctgtaactggcacctccctgacaatcatgggtttgtagggacatgggccaggttgatggcttctacttgtatccagaaggctaatgtgtcctacacccctttcttagtaactaaagacgaactaccgggagaacccagtatccggattctgaccagaggtattaacatgcacaaggaacaattactgtatgtccaagatagccaagcaaataatattttaaaacaacatggttcaaatgtcaagattgtaga

SEQ ID NO: 3321 - DNA, 659 bp, Homo sapiens; identical to SEQ ID NO: 3320

SEQ ID NO: 3322 - DNA, 679 bp, Homo sapiens
tttttttttttttttttttttttttgagtcggagtcttgctctgtcactcgggctggaatgcagtggcacaatcttggctcactgcaccctccagctcccaggttcaagtgattctcctgcctcagcctcttaagtagctggaattacaggtgcgtaccaccacacccagctaattattattattattattattattattattattattctgtacttttagtagagaggggattttgccatgttggctaggctgatctcaaacttctggcctcaactgaaccacttgcattggccttcccatattctgggtgtcatacagttttaagttctcatactgttcatgtccctgagtgcccttcttgtcctcgtacacacactttcaagtttgttagtgtaactctttgagcatagtataaatatggacatagtatatttgttgtgactgaaatatcatagactatagattaaatgctttgagtatatgcaaatcctgcaacacagaacctgagaaaaatgtgggcacagaaaggaatctgtacttgaattacaatctaagcttaaaatgattgccttattatatgtcagataaaaataaggtattgttttactagaactaatttacatgtctaattatgtcagaacttgaaatcatatacctgacttcctcaacaaaagtgc

SEQ ID NO: 3323 - DNA, 682 bp, Homo sapiens
ttttttttttttttccactgtctcctagttcaggccttaaatagccctcacctggtccactgaaatgatgttctaaggtttcctacctcaaatattctcttctgttaattttaagaattgatacatgtggtgatagctgtctcccctctgctacctgataagtacttccaatattcattcacttcaagtttctcctctgtaagaccttccctgtccactccaggtcatatgggaatcattattcctttctttgtgctcctggcatgttccttcatagcacctgtgacactgtattgcgcaactatttatcttactaaaccacatgcttctggagcgccgaagccatagttaatttatccatatatccattgcagagtgccttgaacagtattaatgctccactgacatggttgagtgttagaggtttgggaatcattgcatagggtagagaatgaaactatgggaagggatgaaatttcccttagggaagtccaggagcaggaattacatttgttgagatcctactccgctgaaggaagcgggactttaggtttggccccagagactctgcactttccactaattacatacagactgaagaaggtccgttctatttggcaattacaagtcagtttgttaaattctgatgagagaagtcagagaagattgaggcgccaagcca

SEQ ID NO: 3324 - DNA, 637 bp, Homo sapiens
ccattgagtcaatggattctttggcaccaaatcacggactttccaaaatgtcgttacaactccgccccattgacgcaaatgggcggtaggcgtgtacggtgcgaggtctatataagcagagctcgtttagtgaaccgtcagatcgcctggagacgccatccacgctgttttgacctccatagaagacaccgggaccgatccagcctccggactctagcctaggccgcgggacggataacaatttcacacaggaaacagctatgaccattaggcctatttaggtgacactatagaacaagtttgtacaaaaaagcaggctggtaccggtccggaattcccgggatgcgagcggccgctcgcgatcggtggtcatcatgcgccagctttcatccccgatatgcaccaccgggtaaagttcacgggagactttatctgacagcagacgtgcactggccagggggatcaccatccgtcgcccgggcgtgtcaataatatcactctgtacatccacaaacagacgataacggctctctcttttataggtgtaaaccttaaactgcattctagaagcacacctctttttgacatacttcgggtatacatatcagtatatattcttataccgcaaaaatcagcg

SEQ ID NO: 3325 - DNA, 737 bp, Homo sapiens
ttttttttttttttttttttctttgctcacatttaatttttattttgattttttttaatgctgcacaacacaatatttatttcatttgtttcttttatttcattttatttgtttgctgctgctgttttatttatttttactgaaagtgagagggaacttttgtggccttttttcctttttctgtaggccgccttaagctttctaaatttggaacatctaagcaagctgaagggaaaagggggtttcgcaaaatcactcgggggaagggaaaggttgctttgttaatcatgccctatggtgggtgattaactgcttgtacaattacgtttcacttttaattaattgtgcttaaggctttaattaaatttgggggttcccttcttagagcagctcgtactgacgaaggtgcatgcgctgaatgatgtcacggcagtcgttgaacacacggcggatgttctcagtgtccacagcgcaggtgaaatgagggtagcagtagtgacgcccatctccactggcagtgctgatcctcagaaactcatctcgaatgaagtacttggcccgggtcacgcgtgggtcctctccgggctcgggagtagcatcctcaggagtagtgtagcgagcaaattctggaaagtagtccctcaatcttcgatttcccagcaaggactttctcagcgagcagatcttgcttgttgaggaacaggatcacgagatggtgcgcagcatctgttgttcca

SEQ ID NO: 3326 - DNA, 669 bp, Homo sapiens
ttttttttttttttttttttttttatggctaaatccatttattccgaaataaaaagcaaaataaacaggagtcgcatcaccagggcgccacgaccccatccccgcctccttcctctgtcctatgctatcaataaataagtttcccagccccaaataattattagaacctcctccccatgtgccagctccaacctctgctaggtatgatacagggggcggcccccctggaatatacaaaatgttacacagatacaatatgtacactggggaagcagggccaccccagcagcccgtgccctcgcctggtctacagttagccccactgtcctgcctcagctgcctctctgtgtaagaagcatgggagcccccctgagggaaaaattgctttggtgagagtaaggaggccatgaggcctcttccaaagaggccaattatatgagcctctggctattaaataaacaatcatcatcatccagaaatttcaaggagtcagccctggccaaggtggctaaggtctacacatttgtctccccccattagacaggcgtcttatttgctactgtaagagtaagggatgactgggaaggggtggcaggcacatgatgggggcggagcctccggcccacttctccaggctttgctgacagtggcctgctgtttaacaacttt

SEQ ID NO: 3327 - DNA, 734 bp, Homo sapiens
agccagtacgccccctatgacgtcaatgacggtaaatgcccgcctggcatttatgcgccagtacatgacctatggactgtcctactggcagaacatctacgtattagtcatcgctattacccatggtgatgcggttttggcagtacatcaatgggcgtggatagcggtttgactcacggggatttccaagtctccaccccattgacgtcaatgggagtttgttttggcaccaaaatcaacgggactttccaaaatgtcgtaacaactccgccccattgacgcaaatgggcggtaggcgtgtacggtgggaggtctatataagcagagctcgtttagtgaaccgtcagatcgcctggagacgccatccacgctgttttgacctccatagaagacaccgggaccgatccagcctccggactctagcctaggccgcgggacggataacaatttcacacaggaaacagctatgaccattaggcctatttaggtgacactatagaacaagtttgtacaaaaaagcaggctggtaccggtccggaattcccgggatgaaattttaaaaattcttcgaaataattaatcaaagaagaaatcttagcggaaattatatatttgaatgaatttcaaaatgagtgggaaatggctaaaacaattctgagaggaaatgtatagctgtaaatatttatattggtaaagaagaactcaaatcaagaagtaagaaaaaaaaaaaaaaa

SEQ ID NO: 3328 - DNA, 798 bp, Homo sapiens
tttttttttttttttaattatactttaagttttagggtaccatgtgcacaacgtgcaggtttgttacatatgtatacatgtgccatgttggtgtgctgcaccattaactcgtcatttacattagggggaggggggagggatagcattagagaaatattatcactctgatgtaagataacccctcttattttaaaaaataatcttgctgcggggctatcacaaccacattaccttcacaatacaataatccaatactacgaacccaggcgaagggcgataggcatagttaaagttaaattgcgagtgcaattgcaactactcattccatacaaactaacagagcatatttaacacaagactcaaagtacaaaggtactgggtgatgatacagaataatcagaattaacattttgagtttgggttatttgctaaattttccattacacattctacagtgtcgagtaaggtgagagctgcagctaaaggacttcccgcattgactgcactgaaagggtttttcaccagtatgaattctattatgttgacaaagtgtggaggaagtattaaaggccttcccacaggcatggcatgtatagggtttctctccactgtgtgttctcttatgagtacaagggaagagtgcgcactgaaggctttccacattccttgcattatacggtttttctccactgttgtgttctcttatgagtaaccagagaagaatgggcgctgaaagactttccaacatttcgtgccattcattacgggttgttcaccagtatgaatctcctgtgccgc

SEQ ID NO: 3329 - DNA, 833 bp, Homo sapiens
  misc_feature (429)..(429): n is a, c, g, or t
  misc_feature (470)..(470): n is a, c, g, or t
  misc_feature (477)..(477): n is a, c, g, or t
  misc_feature (676)..(676): n is a, c, g, or t
tttttttttttttttctcacttcctctacttcttccacttcctctacttcccccacttcctctgcttcttcttcttcatcttcatcctcctcttcttcaataggttcatcaatcttctcttcatcctcctcatctccttctatttgctgatcctgagaatggtcttgaatttcaaaaggattctcacccttaacaaaacgttcatatcgcgccttcactattggattatttaaaatgcttgtagcagtcaagacactctctctttttatttggttccctttaattaggccctggcttcctccctttggaattattgaatctcaaggaagaattttataaggtgtgctgtgctgtgaacactgtgacactatattgtgttaaacgcgaggggaattttataccaccactgtcgcaacgccgctgtcgcanagtgacacgtgctctctcataccctttcactctagtggtgnactctantccatacgagatacacactcttccctatacactactcttttctcaatatatttttaacattacttcgttgttgtgattattgttgtcctgttgcttaccgaatagactgttttcttgcaatttattcaccatacactcatgcaaaaactccataactactttatcaaatttagtttgtttctgtatatgatctaatgtntcctgatgtgaagaactttccagatgcagttcaatatctttttcttcaaatgttcgaaatttacaaaatgaacatgttaaatgccattctgtatccatctccgtattctcactgtttttctcttctgcgcctttgttctctcgccgagcctccattc

SEQ ID NO: 3330 - DNA, 675 bp, Homo sapiens
tttttttttttttcccctatcggcaggtagcagagctctatccaagggatcagaagctgtaagcatgtgaaatttggaatctttgggttatcccagtgtgaggtatttctatcaaaagggtgaagtatgtcagacctgtgagacagaacaccgtgccttcctgtataggattaaattacaagcataggcccacgtggtgcctgcttgtttagtaggacctttgtgaaaaaggaatggtctgtccattattttggaggacctttatgtatactgtggccgtgggtttccacagggtctaggtaaggctaaattaagatgttcaatttctttcactcttagttctttaagctaatttctagataatagtttttttcactctgtagttataaatctgcatagctaagactacatactgatttaaaagagtctcacacattcattctgtaaatattgagtgcttgttaaatatcaggtccagtgcaaagcaccgagaaataagtaagacagtttttttctcaagaagctcgtactgaattcggcaatggaaaagtataaattttacagagagctatcatcataaacgatagttcagtattgtgagcaatgttcgggatcctttttgggcagtggctgaagaggagggcagaacgttagatcaggaagagccttcatgga

SEQ ID NO: 3331 - DNA, 733 bp, Homo sapiens
  misc_feature (663)..(663): n is a, c, g, or t
  misc_feature (731)..(731): n is a, c, g, or t
tttttttttttttttcatacagtctcggggttttaaaactttgaaatcaaggacacgacgtctccagtctacctccgagagattagctgaaacacagaatatagcgccatcattcgtgaaggtaattagacctttttatgatccaaaaagcaaatattttcaagttgttagagtgaggagcttcaatatctgatttcttttgttggctgatagatattcttccttctttccactaataataagggattagtaacctgtgtaatcattatacctctaactcttctgggcaccagacttgcctctccacttactagatttttttcccacaaacctacacctgtcgaggtgttctctgtattaatgagcagcatccacccaagctaaaaacctggctatcaacctacgtttgtccatgttgccttacctcccacatccattaaccactaaagtcctgttgatccaacctcctaaatatttcttacatctgttccactgccatagataggctataactatttgttgcctaaattactgtaatgaatacttgtttagtctccttgcctctagtcttgctgcgttcagtccagcctccagactgccacccatcaatctttctaaaataatgatctagttatattactctgctttattgcttacctccanctggatacactgggaatttcatcatttgatctctacctgccatgtttctcttctcaccattccatatngg

SEQ ID NO: 3332 - DNA, 732 bp, Homo sapiens
tttttttttttttttaagatggagtttcgctgtttttgcccaggctggaatgcaatagagcaatcttggctcactgcaacctctgactcccaggttcaagtgattctgctgcctcagcctcccaagcagctgggattacaggcgcacaacacgacacctggctaaatttgtatttttagcagagatgggatttcaccatgttagccgggctggtctcaaactcctaacgtcaggtgatccacccgcctcggcctcccaaagtgctaggattacagggattacaagcgtgagccaccgtacctggcctcagtttttaaataaaaagcaaatctgcaaacttttgggtttgagacttttagttttagggttgtggacttcccaatggaatgtatatgttatttgtttcccttatagcatatatcgtaattgcctattcattatttaatatataatctttaatctgaatttattttgaatttgtctaatcagcatgagtctaataaagacaccaaatagtctaaacaatgttagaattcttctattcctctatctctattgtatggtgggtatttaacatttcataatcaatggaaacattctacaagaaactcttactactgcttttgtgaaacaccagaatgcgtaagcatcttaacttcttactccgtaaataaaagtgctagtgatgtgattgaattgctgaatccagagaagtctctcagtcttaagaat

SEQ ID NO: 3333 - DNA, 710 bp, Homo sapiens
atgctcccctcttcccatctgaaagtcaggtggcacattcactagttgcctggaatttatctgtctctagctgaatgagagctggaaaggggaaactgggcacagtggtcagagccctggagctgtcaggagtgccggttcccgtgcctactctgccactgagtcactagcggccattggacaagggacttggtttttctgagttatcacctgtctgctaaaggagaacaggcgtagggttcagaggcagtgctggcaacaacagaccaggagagagggggcctgttttcaaccccactcacgaaatccttactaatggcagcaagttctgagccttcctttctttgcttctaaagtgagaaagtggatctatataatgtttaaggtagttttttttttttttgagagacaagagtcttgccctgtcgctcaggctggagctcagtggaaccatctcagctccctgcaaacctccatctcccgagttcaagcaattctcctgcctcaccttcccaagtagctgggactacaagtgtgcaccaacacactcagctactttttgtattttagtagagacagggtttcactacatgttggccaggctggtctcaaaccctcagggtgatccacctggctcggctcccaaaaatgctgggattacaggtatgagccaccgtgcccagcctaaggtagtactaatactcgaaatc

SEQ ID NO: 3334 - DNA, 616 bp, Homo sapiens
ttttttttttttgtccataaatttgtctgaccataaggcacccctggagtctctctaaatctgctgtgattctaggagctgcccaatttgtgaatcattcattgctcaattaaagtcctttaaatttaatttggctgaagtttttcttttgacagatggtgtcagaagtgggatctgaagaagagcttctaatgacccccaggagcactgagtgaacatgcaaggtaactgcaggacccacttgtatccactaatctctcggagcggctggagatagtgggtaagttctctctcagattttggaggtccagtggatttgtgttttgagttctctgagtttctttgagcaaatttctgatccaaactgggtttggaagtcatgacacaaactggagggtctaggaatggatttaatctggtaactaactggcctggatccagttagaggcctcttacatctgactaggtcagaaagaaactggtagcaaatgataatattgtaggggtgtaaaatttggcttttaaaattttgtggggatttagtgttctacccctttgtatcatttttcttctgcacgtaggtagcgaaaaacaattattggctaagttaatcaag

SEQ ID NO: 3335 - DNA, 665 bp, Homo sapiens
tttttttttttttttctgtaagatgctttatttcattgaccaacaacatggggtctgaaaacccagcgggaggggtctttttatcacagagccagtcccaggcgagctgatgcatctctgctcctctgcccctcaggagctctcatcctccaaccccagctgcccccacagccccaccccattcacagaaagagggctaccacgtgcctcagcccccctgcccaggctgccagctcccaggtccttttggagaaggactgatctaggcagggaggagagaaggccaacccctccagggctcactgaggaagtccaaagcctttcagaagcagttcctgcagtgacgtaatccacagcctgggatctgcacggccctgagatgcctgcggcaggctggccaaggggctggtgtgaagaaagagggcagggcccataagctgtggccaacaggggcaggggccctgcctggagtaaagtgctctggcctaggctgcgtgggtttcactgccctgcagccccagcctcccttccctctgatgccaggcacagggagcctagtcctcactggagttgtcaaactcctcccagtcagacacactcatcacctcagaggcaaagtccgggtcggcctgcctgcgagtcagggtccgcggtgcggctcaaga

SEQ ID NO: 3336 - DNA, 777 bp, Homo sapiens
tttttttttttaaacctcagagctggtataaagttgaaaaaactttggaacgtgtgttccacaggatcatctccatgctggcaaaattccagaggctaccccagctgtttctccctctccccaagagtagcggccattgcctttggggagagcctggagatttctcttgggtggctttggaatttctgtcctgttgaagccaaagaacagaggacacacaatgtgttcaatgtgcacgttatctacacgcgtgtgcgggtggggtgctttccacctcagtgtatctagatgcactttgtcttttggatcatctccacggaattacattgtacagatgcacccaaagtctcataatctgcccattttacagttgtggatagtcagtggcccaccttctcagaaccatcatagtagcacagtgaccacatgtgtgaattctggagtcagacagattcagtttcaaatcccagttctgccatttctcatactggataatcttaggcaagttgcttcatctaccccagcctgagttttcccctctaacaaatgaaaacactaacagcatctattgagacatcacctacctcacactgatgttgagagaattaatgaagtcatatgttgatccattttacagatgggcaagccaaagcctgatcaccataccagagacttatctgagttacacaaagtccctacagaagaactggggtgaaagtctggttctgcactttaaattcaaatctctggggagcagtctctccctcagaggtgtga

SEQ ID NO: 3337 - DNA, 761 bp, Homo sapiens
tttttttttttttttgtagtcttttgtgttactgttttttgtcatgtgatctaaaggtgttgtttgtcataaaagaagcagcataagagcagaggcccaggagcctgtttttcaagatagcctcacagtacattaagttcgaggttctcattggacccctttccatttgtacaaactttgctgtgggtcatccttaaaaccaaatgaagttcttctctcttgatttttggttcttgttctgcaaacttggcagtgatccagacagaaacatcacagtttccacttgaggcagagtattgactgtgactttagatttactttatccttgttaagtggtaatccatatatcagactgaataattctctattgtagttttgaagctcaaatcacgtagccactaagaagctgaagaaatgcctagggcgagatctggggaaggcctggacaggccaccctccaagaagctccatgtgtttagttatccagaagctcccaggtacggtttcaaagacagggaaataatggcttgttgttccctctttgatcagggcaagctttgcatctttttcctcaggtggatgcaatgagcaatgaagaagcttttcactcaaacctgccctaccttctatatacatatcgaccctgtaagacaaaaataaccaaaactgctgagtgccttctgccttagatctcatgtgtaaacacttgagaccgtgaagctttaggtgacaggaaattaatccagctccactgcgtgcct

SEQ ID NO: 3338 - DNA, 755 bp, Homo sapiens
ttttttttttttttttgagatggagttttgctcttgttgcctaggctggagtccaatggtgtgatctctgctaaccataacttctgcctcccaggttcaagtgattctcctgcctcagcctcccaagttgctgggattacaggcgcccaccaacacacctggctaattttttgtatttttagtaaagatggggtttcaccacattggccaggctggtcttgaacttctgacctcaagtgatccacctgcctcagcctcctaaagtgctgggattacaggcatgagccaccacacctggcctccgcttacatttttaaagtcttattgtatgacctctaacatatgatcctggagaatattctgcatgtgcttgagaataatgtttattctgttgctattggatggaatgttctgtatatgccagatctgtttggtctaaagtataattcaagtccaatgtttctgtattttttgtctggataatgtgttcattgttgcaagtggggtattgaagtctcctactgttactgcatttcagtctctcctctcatattaattagtaattgctttatatgtttaggtgctctaacattaggtgcatatattttataaatagctatatccccttgatgacttgaccattttatccttattttatgaccttctttgtctcagtttacagttttcgacttagtccgtttgtctaccctctgtttttttattttttgctaccctctagcttctttagtgtccct

SEQ ID NO: 3339 - DNA, 413 bp, Homo sapiens
ttttttttttttttttttttttttttttactttaagttctggggtacatgtgcagaatgtacagttttgttacataggtatacatgtgccatggtggtttgctgcacccatgaaccccactgtcaatattagatcaacgagacagaaaaattaacaaggatattcaggacttgaactcagctctggaccaagcaaatctaacagacatctacagaactctccaccccaaatcaacaggatacacattattctcagcacctcatcacacttattctaaaattgatgacataattggaagtaaaacactcctcagcaaatgccaaagaacagaaattattacaaacaggtctctcagaccacactgggaatccaattagagctcacgggttaagaaactccctccaaacgtggat

SEQ ID NO: 3340 - DNA, 770 bp, Homo sapiens
tttttttttttttttgtaaaagagaagtgttcaaacaaacctatttctccttttctagcttgtctgttgatggggaaggggagaagtatccaggagaagcccacaaaacttcctttgctcagattctagagtggtctggtttacttttgtatattttatttaataaaacagttttcctttttatagttagttatttgaaaaactaaaaacatgtaaaagtgacgtatttaaacctggggttgaaaatacaggaaataaagaatatgtttttctgcttctaacctacttgagtaattgaaacatgcctgcaaatattttagtgtctgtgttttcccagatttcaataatgataatgctattatctgaagtctgcctcttcagatactgtgaagaatgatatggtaattatatccaagattatgagcaaatctttcactacctagccttttggctaaaagaggattcctatatgtaggcaaataatagtaatagaaatagctaaaattcattaagtatttcctgtgggccaagcattgaaccaagcacttgtcttgtattacctcattgaatgcctacaaaacaacatcacaaatagtgcatgcacccttgagtgtaattgcataactgactgggccttgtcatgaaagcatttatagatagaaaatttctcagacattgaatctcattcacagatttatgttttcttctgtcagatgagaaatagcatgagttattgttcagggtttcggacatatgtccttgtgccatac

SEQ ID NO: 3341 - DNA, 678 bp, Homo sapiens
tccagcctccggatttatcctagcccgggacggataacaatttcacacaggtacagctatgaccacttaggcctattttaggtgacactataggacaagtttgtaccaaaaagcaggctggtaccggtccgggattcccgggatcgctctgtggcatacaggagacacagagtcccaggtgcggcttctttggaaggacccgcgtaacgtgggttggaaggacaagaagtcctatcgttggttcctgcagcaccggccccaagtgggctacatcagggtgcgattctatgagggccctgagctggtggccgacagcaacgtggtcttggacacaaccatgcggggtggccgcctgggggtcttctgcttttcccaggagaacatcatctgggccaacctgcgttaccgctgcaatgacaccatcccagaggactatgagacccatcagctgcggcaagcctagggaccagggtgaggacccgccggatgacagccaccctcaccgcggctggatgggggctctgcacccagccccacaggggtggccgtcctgagggggaagtgagaagggctcagagaggaccaaaataaagtgtgtgtgcaggggaaaaaaaaaaaaaaaaaaaaaaaaaaaaaaaaaaaaaaaaaaaaaaaaaaaaaaaaaaaaaaaaaaaaaaa

SEQ ID NO: 3342 - DNA, 510 bp, Homo sapiens
ttttttttttttttttttttttttagtgttcaagacttctccaaagcatttactgacagtaaaaaatacaagtacacttaggcagtcagagtacaaaggactgtcaactgaaagaaggggaaggggtattttcaatgatgaaaatcaacttcttagcactcaactttttggcagaggagtaaatactgcaaacagaatgacaagcaagacgtgccctcagggaactttctacctgcttctttctttatgctggatgcctgcctttctgcaccctgcccttctcagcctttgccaggggtctagacgttcccattgacctcttcttatctcatgctctatcttcttctgctttttcctgtagcccagtgtcctctttcctcttattcccatctgttcctttatgcagaaacggtgttgaactgtagacttaagtgagggcatgtcttgtcagctgtcgtatatgtacatctttaacacagggattggtctgtgtgcgaggtgtctcttagt

SEQ ID NO: 3343 - DNA, 686 bp, Homo sapiens
cattgtggacagctacgagagacgcaacgagggtgctgcccgagttatcgggaccctgttgggaactgtcgacaaacactcagtggaggtcaccaattgcttttcagtgccgcacaatgagtcagaagatgaagtggctgttgacatggaatttgctaagaatatgcttatgaactgcataaaaaagtttctccaaatgagctcatcctgggctggtacgctacgggccatgacatcacagagcactctgtgctgatccacgagtactacagccgagaggcccccaaccccatccacctcactgtggacacaagtctccagaacggacgcatgagcatcaaagcctacgtcagcactttaatgggagtccctgggaggaccatgggagtgatgttcacgcctctgacagtgaaatacgcgtactacagacactgaacgcatcggagttgacctgatcatgaagacctgctttagccccaacagagtgattggactctcaagtgacttgcagcaagtaggaggggcatcagctcgacatccaggatgccctgagtacagtgtagcaatatgcagaggatgtactgtctggaaaaggtgtcagctgacaatactgtgggccgttacctgatgaggctgcttaccaagtacgaaatagtcccgatgatctgagaacatgtcaaacagaa

SEQ ID NO: 3344 - DNA, 662 bp, Homo sapiens
  misc_feature (639)..(639): n is a, c, g, or t
ttttttttttttttttttttttttttttttttttttttttttggggagaaatctttaaagttataaataagtgtgaaccaaaaagcactggagccaagtctcaatcaatgtagatgtttctggtgccaaggttgaggatgcacctgggaaaaaggaacacgagatgacaggagcatctgagatttgtgcttcttccaaagacggttgggagacttcaatatttaaaagggaaacagtgggcattagaggaaaaaagaaaaaggaagtgtgaataaatgaagtagtttccttctttccaggctttaatcagtgttgactgaattcgcactttagatgtgacaggagagggtttagaggaacactcaactgggcgttcatctcctgctcagtgaatctggattgtatatattagataaggtactcagggtagaggaagctcatctcctgctcagtgaatctggattgtatataagataaggtgcacagtagaggaagcagtcaaatatgcatttgtttcaggcgagtggagggatgactcccaggcctgtctgtccactgcctgtcaagataagccattcatttacattgtcagcatgacaattcaagagaatggtttcgggtaaagatctttgggccagncaggaattttccttggctagcag

SEQ ID NO: 3345 - DNA, 743 bp, Homo sapiens
tacacatattataccaaagtagatatacagtaaatagttataaatgtagacaacaaaaaaatgggacattcaaactagtcacaggacaagagcacaatgtacattaggaatttatactaacaaattcaagaaatacttactgagtggtaaacttgtttcaggtgctatattagatattacgggtaaaaattataaataagatccatcctctgctcataaaggaccttatcagcctaaaatcactctagtgcagaatatagtcaagttaaccctgactataaaatgaaaatttcaggagaaatgcctagttctagggtaacttcttgtaatatggcaacatacaggaggtaattcggttttaagggaaagtcagataaagctttctgaatgaaataagacttaactgctgtaatgttttagacatttcctaaaaataaaatatagaaactacaaccatcactagcatgtgtcctgggtttatgtagcaaatttaaaaacaacatatgcagattactttcttccagtgtattcaaataactaacaaatggccctattcttgttgatattcaagacagaatactaagtgtactagtatttgattctctagatcctttgattaaggtagacaggcagatcacatagtgcaaagtcacacaaacagtgaacagttagggtcatgagggtgatggctgagctgatctgctatctcaatctcgacgtgacggtcttgaccggctgccatc

SEQ ID NO: 3346 - DNA, 173 bp, Homo sapiens
tttttttttttttttttttttttttttttttttttttttttttttttttttttttttccttctcctccttcttttttcttgggctctcccttctctctgctcttattattaaagtgattttaacggtccacgtaaagtgaaattgtaaaaaaatagtctccaagtttggccaa

SEQ ID NO: 3347 - DNA, 709 bp, Homo sapiens
ttttttttttttttttttttttttttttttttgtagtgacaaggttttgccatattgcccaggctggtctggaactcctggagtgagccactgtgcccggccatgaccagcactttttaatgaaaatatctgtgtgtagcacacagtagacttatttttgcttcaatttacatatcgatgagtgtgttcctttccaggttccctcgttcatccaccctgaatgaagacagatactcacctggtaatggcctgagatctgactgaagcctgagaggtgactcagccacaagacactcagggttcattagaattgtctagtaccaggtctgccttcctccaagcggtgagaccttgagggcgacttgcgcgtaacgcctcttgagatctctcctctttctcactatttaaaggagcacggagcatatatatcctcgtgctcgtccctgtgctcatgggggtggtgatattgagtctcatgagatggggcgctcgacccctggggacgaaatccttcagatgtgatgtcgttgacaacaatgttgtatgtgatgcagcagataatataagtagctgtctagagcacggcggcactccttgcggcggcaaattaaattatagatgataacccctgatgtcctggaggaaactcatcattcttccacataatgctgctatccatactactagaagtggaagttgctgcagggaa

SEQ ID NO: 3348 - DNA, 731 bp, Homo sapiens
ttttttttttttttattgttgttccaagccacatcatatgtcagagttaagctcttgggtcagatgtctgcacttggtctcagaagtggtcatgtggccgatggctgcctgggcctacccttaaagctgaagcagttcccattagtaggatttgtaggctagcaggcaccatgattggcatgtatagttcagtaagggaggaaaaaacctggcccaatatcaagaccacttgaaattcctccaaatgtattcctgccctttaaaatattatcctgctaacagctttcattctaagttgaacctttattcccacagagaaactaaaatagctaaatgtgttgaaagcattttcacttttccattttcttcctgttttattcagtctctgacagtgcagggccactcagcatagtctacaggactctatttctaatgttagtgatttctgctgaaaatgatatagcaacttcagatagctattagcaagatggatcattctaaccacatgcctttcacataatcctttcccccaaagctctggggagctgtagaggcatactgtaatccagcactgtccccagattgacaacagctagaaaaacatgtaaatgtcccatccacatgtagatacggcagcagtgtgaacctaagttccttactatatcataactcccagggaaagtgaagtccccaacttaagcctagatctgagatctatactaaattctcgg

SEQ ID NO: 3349 - DNA, 720 bp, Homo sapiens
tttttttttttttttttttttttttttttttttttttttttttttttttttggggaagaagccttggctttattcgctctgtggggacactgttccgttcagaggcccctcccagccatggggtgggggacagtggtgggcgtgggaatcccagcgagcatcctggagggtgcgtcgtctccatgtattttgctcttccccatcttttccatggggtcccctgccagggtcaagcactaatatgtggtgaaggcagcaaacagcgtcggcgtccctttaggggtggggagagggctgtagcaccaagaaccccctcccccgcccacgacatccctgaaaaggagactaaaataaagccccggggcctttctacgtaggggctccacttaaatatggaatggtggtaggcagagaggcggtggcccagcaatccttaagtccagattaccagctgtggggaggcttccagggggccaggagcagggctgggcagttccagccacagacacgtgggtggagagacggaaatatctccaagggggcacagtatcagaggagcaggatggaaggggctttactgcctgctacgggatcctttttaaagaaatgggtgtgaagccgggcacgtggctcatgcctgtaatcccatcactttgggaggccaacgcgagcaggatcactgagatgcgagtccgagacaagctggcaaaatggtgaacc

SEQ ID NO: 3350 - DNA, 718 bp, Homo sapiens
agtgacgtcatgacggtaatgcccgcctggcatatgcccagtacatgaccttatgggactttcctacttggcagtacatctacgtattagtcatcgctattaccatggtgatgcgttttggcagtacatcaatgggcgtggatagcggtttgactcacggggatttccaagtctccaccccattgacgtcaatgggagtttgttttggcaccaaaatcaacgggactttccaaaatgtcgtaacaactccgccccattgacgcaaatgggcggtaggcgtgtacggtgggaggtctatataagcagagctcgtttagtgaaccgtcagatcgcctggagacgccatccacgctgttttgacctccatagaagacaccgggaccgatccagcctccggactctagcctaggccgcgggacggataacaatttcacacaggaaacagctatgaccattaggcctatttaggtgacactatagaacaagtttgtacaaaaaagcaggctggtaccggtccggaattcccgggattgctggcctcataaaatgagttagggaggattccctctttttctattgattggaatagtttcagaaggaatggtaccagctcctccttgtacctctggtagaattcggctgtgaatccatctggtcctggattttttttagttggtaagctattaattattgcctcaatttcagagcctgttattgg

SEQ ID NO: 3351 - DNA, 798 bp, Homo sapiens
tttttttttttttggtatcttaattctattgttgatgttagcattggaataaaatgaaaaaagagtctgtggtaatgaccgtgactattttgggcacttaggaacctgttttgttcactggaacaatgaggaaaaacctggatccctttaatgagcacacggatgaggaactgtggaatgccttacaagaggtaattgataaaatgtaattatctttagtctgttagcctcagtatgtgtatatgtacctttacagcattgcaggaaattaagaggagcttagcggtttaactaactttgttcaccacccaggagatcattgaggatgtggatatgctataatgtgtatactgatgatgatgaaaaccaaaaataaaatttccctggttctcattttaattttcttcctgttgtccaaaacagtttggtgttgttttatttgtctttagcaatgcgttaaactagaagttgtatttatgagttgagatcctattagtgactaagttactctgcaccatttattttactgctctgttcttagggaatttctagtaagggaagaccatagtcgtttttcattaactaaaagatagatcatatttatgaaatgctttaagttttataagaaagtgtttataacaggtcaattatacagttggaatgggatcataattatttattgggcaaaacgtgtaattttaatgcagataacagaaacctgtcagctctgctaagtttatactatatgtcgattctagagatttctattattatgtggtccgtggcccttctgaaatt

SEQ ID NO: 3352 - DNA, 696 bp, Homo sapiens
  misc_feature (496)..(496): n is a, c, g, or t
  misc_feature (503)..(503): n is a, c, g, or t
tttttttttttttttttttttatcgaaggctttactggcaagcaggaaatgtggggaagtgtggatgttagctctgagattggggtgtggtcagacatctggccaggtccatctctgaccggctcctggtcaacccccagggagctggaagagtgccagcgaaaccacgagggtgatgaggacgacagccacgtccgggcccagcaggcctgcattgaggccaagcacgtgagggtgccccccacccacatgtgggtctgtgtgtgtgcacgtggcgtggaagcatccccgccttgtgttgggtctgtgccccatggaggagggaggtggggtgtctcccccaagcacagcactcaactcttcacaggacaagtacatggcggacatggacgagcttttttctcaggtggatgagaagaggaaggtgagtgtgtgtcgcttgctgccgatggctggcaggtgctcgtgcagtgccccttttcagcctctgaccgtngtgcccnctgtgccacagaaagcgagacatccccgaactacctgtgtggcaagatcagctttgagctgatgcgggagccgtgcatcacgcccagtggcatcacctacgaccgcaaggacatcgaggagcacctgcaggtgaggcctgcggctgggggagcagggccagtggcctggtcctgggccccatgactgccctct

SEQ ID NO: 3353 - DNA, 729 bp, Homo sapiens
  misc_feature (656)..(656): n is a, c, g, or t
ttttttttttagattaattcttcattagtccacccgtcaagcttgcaataagccccaattaaccagaattgacatgatattaaacgtgtgttggggcccagttgatggtcaattgcaacgttcacttacgagtcagctccacggttactacttctggaaggttctctgtacaggaagataaaaccccaactagaagtgctgaaagctgtctcagaaaatctcctgctaaggatccaggtgatatctgctgtggaaaacatgagatgtccccgttccccttttccacagagaaaccctaccccatgtggcccgtatgtgttactcatcccttggtttgttgcagtagctctttgattgttttatcacatttttcagcttggagatgacacagcctgccattactcatttgcgttcacagtgattcactacggtagcacatagtcagactgtgcccagtcactctccactcagaggaagtcatagttgattcttaagatatttttagctgtttttggtttgggtattttaagaattttgcaacacctgctgaatcaagccgagaccttcccaggtgtcatgcatcagggctggaaatcaacagaataaataatcaccaactttgttctaactccaaataaagaacatattatggaatnaaaaccttagatttggcatgggacaatgacaccttggttcctgcttgtctctgttcctttctgcctccatatt

SEQ ID NO: 3354 - DNA, 694 bp, Homo sapiens
tttttttttttttttttttttttttttttttcctagagggtggatattttatatttctaaatcttacactgtattgtgcaaaattggatgctgatatgtttattgaacgactatattatgcaagatgactctaatttacaattagaaaaaaaaacagttttcattgtgttgtaaaggtttcattatttttgtcatcagattgaaggatagatgtacataataatgttaattagcctaagcttttaggaaataatgccaattaaccatggccacaggcttagctttcatataggccaaatctgtatgagatatataaaactatatgaggtatgtaaatttaactcatttaacatttcagttcactcaacaaatattaattgcatacctatagatgttgggaattgagctaacacccaaatccagagaggatcaagaggattaaggcggacactgtgccaactctcatggagcttttattgcaatgggaaaatagaatgaaatttggtagaaaaatttgtttaaattgcatatcataaaatattctgaagaaaattagtaagggattgaaatagagacttgcggaggtggggaaaaggagaaacttactttagacagtagtgagcaaatgcccaggttgagagatgatgtctaagctgagacttaaagaaatggagaaaagaactgggtttattga

SEQ ID NO: 3355 - DNA, 726 bp, Homo sapiens
tttttttttttttagagacaggtctcactatgttgcctaggctagtcttgaattcctggccttcaccactagatggatggtctggtgaccagacatatcctggaaaatggtgtcccatcttctaagggggtcatctccaagctggcacctcagctgtgtctctgagaaacctttctgtcactccgtcaaggcagcagacccagacccctacaagcttcactggggtggtaggcccctgaatttccaaaggtttattcaaccccattccttggggaaagcccacatggttgttctttaacccaggttatattggttccctcttcctggttcctatcctaagctctccattgaatctatattttctattccaactgtggccgaatatgaatatctgtatgtctctacagaatatttacagtatgtattacagtatcccttgtggactacatcatgactgaaggtggaaagggttaacacagacctgggaaaggctatgaaaatacactctcctatgtctcatatgaatgaaaactgcttatgtgtctccttcctgagagacaaaaagtaatatatgtgctaggtaaatgtgtgcatatcctatgccagaggctgtgttaatctgctccagcaaaactgctgcatccagcacagcagctgcaattgagattactacttgcttgtttgcagcagttgaaccacctggtttctgcagggatcagactatgg

SEQ ID NO: 3356 - DNA, 710 bp, Homo sapiens
tttttttttttttttttttttttttttggctttttaaaatcaagattttattaaaaagaaaccgtttcaatcaagcaaacaattcacaaagacattttctagaatagtgagaataataaaaaccatcatttttggagaggccgattccttgccagaacctggggtcatgggcttggcacccatcattcttgcgcaccccatgaactgtaagagagatcttatccctttctggaaatgagcgaacgggttcagagaagtctagtgacctgtccaaggacacagagcccctgaaaggtagctctgttgtctgcaccaagtctgtgtgactctggcaccgttcccggggtcattcacagcagggacccgctcagacctcggcgggcagcgagaagaacacatggagattctgacttccagcacaaaggggcatcctgccttgtgtttttgtttcccatttctgagcattctctctggattacagccgtgaccgccgtatcgcagcgtgtttgcccagcccggtttgagttgtaagctggtgaaatagaagaatccttgtgaaaatatgaacacacttttatttaccaaaggtaaatgaaacctttcactgttctgaagggtttccatttttctgtcttttgtctcctccctttgattaccataacattaacttcaacaactggcagatccaagtctagattcccggcagctcc

SEQ ID NO: 3357 - DNA, 774 bp, Homo sapiens
ttttttttttaattatttcagatttcaattgaatatccatatttggtaaggaggctgatgcttttgttgctgtaaaatcatgcagtgtattgacatgaagttggaatttcaatgtacctattttggtagtgtgaaacaccaagttcataaaattatagtcttctactcccccaaagggttaatcttgcctgcttcctagaaaaaccagtgcactgagaacagcaggtttttgcaatagagaaaaaatttaataatcgcagtctcagccaagtgaaaggacaggagtttattattactcaaatcagcctccatgaaaatttggaagctaggattttttaaggatagtttgggggacagaggctagggaatggggaatgctgattggttgggttggggagaaatcatagggagtcaaaacttgtcttcttgttctgagtctgttcctgggtgggggccacaagaccagatgagccagtttactggtatggatggtgctagctggtccatctgattgcagggtctgaaaaatacctcaaacacaagtcttaggttttacaatagtgatgttatttacaggagcaattggagaggttaggaatcttgtggcctctggctacatcactcctgagccataatttctaatcttatgactaatttgttagttttacaaatgtggtcttgtccccaacaaggaagaagttgttttgggaggggctcttatctttctcagagttacataaagtaatctccatataaatgcttacaggattaagg

SEQ ID NO: 3358 - DNA, 742 bp, Homo sapiens
ccactggccgaacatcaagggatcatatgccagtacgccccctatgacgtcaatgacggtaagggcccgcctgccattagcccagacaggactaaggggactttcctactgggcagacatctacgtattagtcatcgctattaccatggtgatgcggttttggcagtacatcaatgggcgtggatagcggtttgactcacggggatttccaagtctccaccccattgacgtcaatgggagtttgttttggcaccaaaatcaacgggactttccaaaatgtcgtaacaactccgccccattgacgcaaatgggcggtaggcgtgtacggtgggaggtctatataagcagagctcgtttagtgaaccgtcagatcgcctggagacgccatccacgctgttttgacctccatagaagacaccgggaccgatccagcctccggactctagcctaggccgcgggacggataacaatttcacacaggaaacagctatgaccattaggcctatttaggtgacactatagaacaagtttgtacaaaaaagcaggctggtaccggtccggaattcccgggatacaggccggatgcagtggctcatgcttataatcccagcaatttgaaaggcaaggtaggaggatcgcttgagcttgagcttgagcctgaggccgcagtgagctatgaccacaccactgcaccccagtctgggtgacagcgcaagaccccaactccaaaaaaaaaaaaaaa

SEQ ID NO: 3359 - DNA, 709 bp, Homo sapiens
tttttttttttttttttttttttttttttttttttttttttttttttttgagagagaaacaccacatctgtctcatgtaattaccatcatctggacatgagtactttttaaaacatcattgatttattctgagaataccaaaaaatgacctttttatctttctcaatatgtcaagaataaactatcagtttgggttgcctgttcaagctaaaaatctatttggtttttacttccttgccaaggagagagggttacagctttatatttgtgtggctgatagtcgcccttgtgataagcaagacagtttagcagagtcctgagtcatcagcaagacccccaactgattgagtcaatgtggagaatctggacagaggaaagctttcaaattcatgatctgaacctttatttttgggccatctttcctttctgcaacatcttcttcttttaagtataaagtttctactgtaccttaccatactgaaagacaaatatcatgaaatagacaaactttaaaaatacaatgtctatatacaaattattttgaagtaaccatggataaaatactatttaataattatcatttgtcaagggacttttactagactaaaaaacatcagagaacaatttcgtattcaaaatatttgaacactttcaattttcaagtctatgtacttaaaatattagtactttaggagaattcactatgttg

SEQ ID NO: 3360 - DNA, 663 bp, Homo sapiens
cgtaatttgcaatatccatagttggagcagcaggggccgcttatcatggagtcaccctgagaagggtgaccaggaaactcagctagatcccccctcagggaagcttctgcccactccccccacctgctctgaggctctttgtccttctgcatgtgtgcacagctctggcttcatgcccttctgggcctccagctgagggaacccccgtggctggtggtcaacatgttctctgaacttgagaactcagttctgcaggtctgtgtgcctgtgtcccattaacacagtgagtagtactacaggagccatgagatgtagccttgtaggctgggtttaagaaaaacaaaaggccagtcaccgtggctcaaacttgtaatcctcactctttgggaggctgagatgggaggattgcttgaggccaggagttcaataccagcccgggcaacaaaaaataaaaaaaattaggctggtatggtgacacacacctgtagtcccagcttcttgcaaggctgagtgaggccagaggattgcttgagcccaggagtttgagcttacagtgaaccaagatttccccactgcactccagcctgggtgacagagcaagactctgtctcaaaaaacaaaacaaaaaaaaaaaaaaaaaaaaaaaaaaaaaaaaaaaaaaaa

SEQ ID NO: 3361 - DNA, 726 bp, Homo sapiens
tttttttttttttatttttaaattgacagataaaatttatggatatttgtcatgtacgacatgatgtcttgaagtatatatacagtgtggaatgatgaaatctagctaattaacatatgtattgcctcacacacttatttttgtgatgaaaacactttacatccattcgtagcattttttgagaatacaatacattgtgtagtcactatgttgtacaatatataatgtacaatatagtttaagagtaaacttatttctcctgtgtaactgaaatttaagacaatacaatgttaataatccccttatttaaaacaaattaaataggtgagctagtttggcattcctacttgataagagatacatatacgccaattgttgattacatattttatgacagagagaatagtttattacatttttataaaacaatgttggaataactatcaggcaataaatattttaactataaagtaattatttaccatgtaaatacctctattataaatctatagagtttacatccaaatttggagaacaagcaggaaatagagggaagtcatgagagtaaattattaaatagaacttggaagaatttgataacctgtttaaaaccaagactcataatctctacgtcaggtttatccatactaggtcgtttttattactcaaagtgttttgcttacaaacattcattgggttcttactgtccttccaaagcacctgctt

SEQ ID NO: 3362 - DNA, 841 bp, Homo sapiens
  misc_feature (432)..(432): n is a, c, g, or t
  misc_feature (640)..(640): n is a, c, g, or t
ttttttttttttttcttttgagacagagtcgcactctgtcacccaggctggagtgcagtggcacgacgtcagcccaccgcaaactccacctcccagttcaaggttcaagcaattctcgcgcctcagcctccagggcagccgggatcacaggcacgtgccaccgcgcccagcaaatttttgcactttcagtagatgggggggtttctccatgctggccaagccggtctcaagctcccggcctcaagtgatcctcacgcctcggcctcccaaactggttgggaccacaggccacgaacccccacaaccagagccaacagatattccttcctttttaaggcgtaatatattccactatgtgatgtcgctgtgtgctacatatctgtgcacattaatttcatctgttgggatgtgggcacttttgttgcgctcctncactccccgcgcgcgtacctcaactcgaatgtaacattagacttgaccttaacttgaatggtaacttgagtggggggtgagatataaatgatagtgtggtttacataatttataagtacatagattagctactttttcttgaggacgagcgatgcgctgccctctgcttgtccctacccatagcatataggtggagagtgaacaccantcaatgcactcgacagccacgacacccatacctctgcatgccgcaaagccatgcctccctaagtaggcgagggaccagcaggcagtgtgacaccacaggccggttaacctatttcaattctttgcatagatacgggtccagcagtgttagccaggctggtctccaactcctggctcaagcatcctcccgccccattgtccc

SEQ ID NO: 3363 - DNA, 147 bp, Homo sapiens
ttttttttttttttaagacagagtcttgctctgtcacccaagctggaatatagcggcgtgatcatagctcactgcagccttgatcttctgggctcaagtgatctcccatctcactgagtagctggaactacaggtgtgtgcccccaa

SEQ ID NO: 3364 - DNA, 713 bp, Homo sapiens
tttttttttttttttcccttctagcaacaggatgagggtgtaaaaaggtcatggaccaaggcaatttggagaatcattattttcagagtctgtcctgtaatgacagagctgtggctttgtgtgctctatcttccccaaggatccagtgtccagagtcaggggtgtttctgagcctgagcactctgcagctctccgagagacctgcacaggagtgctgagatcctgctggcttccctttcttatctgtgaagtgaagatctgagagctgagccctgcctacgttcaaggggtgggagagtatctgtgaggcttttaggcctttgaaggcaggtgctgtaagagtgtgagataaaagtttccggagatgaaacagtgatcaggaggcctctggagggctgccatcactgcagctgattttcccctctctctcaccaagcccttgtcattcagtttgtggccaggtaaagacttaagttgaggcggggaacatggtactgtaatggcctgtgaggtctccttcctcatccctccactggggaaatgggaaagaagaaaggagagaaagaaggaacgtttgagggggagggaaggggaggtctttgatggcatctgttcctaagagctcaggaggagagaggcattaagctgccagtgccggctgcttccaggatgtctcatgctccttcagccttctgcgttgtggtctctgagct

SEQ ID NO: 3365 - DNA, 681 bp, Homo sapiens
acgcccacttggcagacatcaagtgatcaaaggccagacgccccctatggacgtcaaagacggtaaatggcccgccggcattatgcccagtacatgaccttatgggactttcctacttggcagtacatctacgtattagtcatcgctattaccatggtgatgcggttttggcagtacatcaatgggcgtggatagcggtttgactcacggggatttccaagtctccaccccattgacgtcaatgggagtttgttttggcaccaaaatcaacgggactttccaaaatgtcgtaacaactccgccccattgacgcaaatgggcggtaggcgtgtacggtgggaggtctatataagcagagctcgtttagtgaaccgtcagatcgcctggagacgccatccacgctgttttgacctccatagaagacaccgggaccgatccagcctccggactctagcctaggccgcgggacggataacaatttcacacaggaaacagctatgaccattaggcctatttaggtgacactatagaacaagtttgtacaaaaaagcaggctggtaccggtccggaattcccgggatgagctggggttagaccgtcgtgagacaggttagttttaccctactgatgatgtgttgttgccatggtaatcctgctcagtacgagaggaaccgcaggttc

SEQ ID NO: 3366 - DNA, 706 bp, Homo sapiens
  misc_feature (526)..(526): n is a, c, g, or t
ttttttttttttttttttttttgtgttcattcttttattgtccgttgttttaacctgactgaatacaagatcaacaagagcactgtactcctggcaattattacatatgttagaacatggattttgcactgtagacaacatttaacaccagtctatggggtactgcattgctttttataaagttcaaaataaagatttattttcaaacaagtgactttggtttatttcatacattacactttttcttgcagaaaaaaataaaattgtacaactgcataaatataaaattcttccaccatgaaaatggttaaaacattcataaagacacagcaccagcatgtgatgcctccagaaaggaaaaaaggaaagtaaaagaaaatgtataaagcaaattaattagccctgtcactagccaaagtgatgggcagatccagatctcagacacagctttagaacataccggaggacaaggcaagagatgtcaagacagcattcaatacaagcataacacaacccatcacctttntgtgttttctgtagtgtcacttaaaatttaaagggccagttccccccatgaaaaaccccacccaagccccaggaaaaaaataagaataaagagctaacagcacaggaaaagactatggagtatgtaaaaatgctcatcgatgggccattacctttgaagagccaagacaaagaacgaaaa

SEQ ID NO: 3367 - DNA, 203 bp, Homo sapiens
attctcctctctcagcctctcgagtagctgggactacaagtgcccaccatcgtgccaggctaatttttgtatttttagttgaggtggggtttcaccatgttggtcaggctggtctcgacctccatgacctcaggtgatccacctgccttggcactcccaaagtgctgggattacaggcagtaagccaccatgcaccggactca

SEQ ID NO: 3368 - DNA, 699 bp, Homo sapiens
ttttttttttttttttttttttttttttttttgtatttttagtggagacggggtttcaccatgttggccaggctggtcttgaactcctgaccttgtgatctgccctcctcagcctcccaaaatgctgggatgacgggtgtgagacactgcaccctgccaggcccaggacagtttcatatgaaaggtttacttgccatatgggcttctctgacctaaatgcagtaaattcgtattattttcattttttatttcaataggtttttggggaacaggtggtgtttggttacatgaataaagttctttggtggtgatttccaagattttggtgcacccatcacccaagaagtgtacactgtacctactgtgcagtcttttatccctcaccatcctccaccctttgccctgagtccccaaagtccaatgtatcattcttatgcttttgcatcctcatagcttagctcccacatatgagtgagaacatacgatgttggtttttcattcctgagttacttcacttagaacaatagtctccaatttcatccaggtggctgagaatgccattattttaccatgcacgtaaattacttacatcagatacataaatgaacacacaggtaggtcatagatagctagatggaccgagcagacagatacattcatgccgccaaacacttattggttggacttagacgactgaaa

SEQ ID NO: 3369 - DNA, 624 bp, Homo sapiens
tggagcagaataccagttgcaaatttgcgtcccaaccaaattacgaggtctccaggttgcagcagtgaagaagctgacgaggactcaggtatttaaaggcagttcttgatcagtcacacctctttccacagtgactacagagtctcaagtataaaaaccagagttctagaaacagagtgaaggcaagttaaccatgggaaaagattaggagtaaattcccgaagtcctgttcagaaggactctcaatcactcagctcttaaagcaacctgtcagttttcctccctttgaggaaaaataagcaaaaattggccaggtgcggtggctcacacctgtaatcccagcactttgggaggccgaggcgtgtggatcacaaggtcagcagatcgagaccatcctggctaacacggtgaaaccccgtctctactaaaaatacaaaaaattctccgggcgtggtggcgggcgcctgtagtcccagctacttgggaggctgaggcaggagaatggtgtgagcccgggaggcggagcttgcagtgagccgagatcctgccactgcactccagcctgggagacagagtgagactccatctcaaaaaaaaaaaaaaaaaaaaaaaaaaaaaaaaaaa

SEQ ID NO: 3370 - DNA, 678 bp, Homo sapiens
tttttttttttttttttttttttttttttttttttttttgagatggagtcttgctgtgtcgcctaggctggagtgcaatggtgctatctcggctcactgcaacctctgcctcccaggttcaagcgattctcctgcctcagcctcctgagtagatgtgattacaggaacgcaccaccattcctggctaatttctgtattttttagtagaggtgggatttcaccatgttagccaggctggtcttgaactcctgacctgcagtgatctgcacaccttagcctccaaaagtgatggaattacaggtgtgagctacggcactcagccgatacatatactcttaaacacaagtttttcttcagaggacaaatcacaatacatggctaaagcaaagagttaccaaaaacagacatcaaagatgaacagcaaaatttcagatgtgaagtaaagacacccaaaactaaccttggctgatttgggcagcaaggttgtagactgagatttagctattcaggagagctacctggccaaataagaaactgtctagagtccaggcacggtggctcacacccgtaatccctagcaccttgggaggctgaggtgggaggattgcttgagtcccaggagttcgagagcagccaggacaacatgggtgaaaccccgtctctactcagacatccaca

SEQ ID NO: 3371 - DNA, 683 bp, Homo sapiens
aattggatcctgaggagaatgtcaccacctctttgacaataactagctttcagagctgaacacagtgaatctggatactgtgtatatgtttaaatgagttaggaaatgacatcacattatttatttcttcttttgtgacttagtaaattgacttggcctatagtaccgacttgtgatttttatccaaagaggtattcagttgtgttcataatgcagcataaatgttcaccttgattttgtggaagttgcacatcttttcgtagaaatctatttttagtaacaattcttatttgcctaaacatgtgccaggaaacttatgattagtgtttttcaaactctgtaacaacagcaacaaccaccaaaaactctaccaggtagttttgtatggcttttagtatcagcgtagtatctgtattatgtgcccattagaatttttaacatccaatgataaagtaattttctataaaataatctatttccaaaaaacagaggaaaaaataaaacctcaatacagtaaattagaggtcaaaatatggttccacaattgattattcacaattccaaaatcagaaaaatactccaaaaacttaaaatattcccacaagttctgcataaacttgttggggacaaaactgacctgaagatataaactgtagtgttctttattatgtgaatattcaatg

SEQ ID NO: 3372 - DNA, 734 bp, Homo sapiens
ttttttttttttttttttttcttggaaatttttttattctccttgccaacatttctttgacattttattacttaattatgtgacattaagaaataatttggttgcatattattttcaaaaagcagtaagaaagtagctattgagaaagaaggagggccataggtttttcaataaaacgttagaaacattataaaaaacgagactcccattacatggaaacacatgatcaaagatcagactaacacacattcaaacaggcttggttcgaaatagagttctccatttctttcagatgagccttttttcttaggctctttcagaagcacttcacaatgaacagaggtcttgccagctcatttcattagcggagaagcaaaggtatgatggcagaatcatgagaagatggaaataaggcctgaggatatggcttgatctctgagaccaattatcttttgagttattcaggccaggatagaagcttagagaggatcgaggcaaaccatgaagggaaggggaatgcaggacaatgcccattactgggctttaccacaaactccaaatctcctggacccacttcgcaagggttgtaaagttacatgaggaaggagcctgcatggttgtcacataatacaatactttcacttgtcttattttttaaggtgcagtcttcaagacttcattttaaaaaatcattgtataactgtaacacgacaaatctggacaatgcccaactg

SEQ ID NO: 3373 - DNA, 724 bp, Homo sapiens
tttttttttttttttttttttttttttttttggcgagcagtcagtactttaattcaggtcaggctccgacacctggggagacggggtcctgcccgccccaccctgaggtggaacccccagctgctcctgggcacagaatcatttacaaaaataaatatgaaaaaagcagcaactctttagtgatcatggaattaatctgacagcaattaaatgtgtttaagcatctggcatatctcctcaattgcaccaaaagaatttggaagcacttggtttggtctcaaaggcaaaaggaaaggacgaggaaggggccaggcctcccgccaggcccccgcccccctcacatttctgagtccgcatacatcccgttgattaagtagtccacctgggtgtagtccttcttcttgtagctctcataggcctgcagggcaaacaaaaaccaagactgtgatgaaaagggtcaccccgagtaacagcaccaccagaaggagagtttgtctaccacggcctgggtgaggggctcagtggtgaccaccatgtactggccttgggtgctgggctggcacgagtccgtggctggcatcttagtgccccctgagctcctgggtgttggcccagctggaatcagtacctggtgtggcttcagtctctacctgctccggtgcctggatgtgcctgcccagcggcctctgggtatttggcctggggcttggcttgggtcgtcggg

SEQ ID NO: 3374 - DNA, 724 bp, Homo sapiens; identical to SEQ ID NO: 3373

SEQ ID NO: 3375 - DNA, 743 bp, Homo sapiens
  misc_feature (632)..(632): n is a, c, g, or t
  misc_feature (662)..(662): n is a, c, g, or t
ttttttttttttttttatatttggaagaagaggtcaaggggcatcttgcctctagtggacaagggccgtgagctttacacagccctctgtatttattaggtgaaagagacagcaagaaagtgggaggatggttgtcgggtaattgtcagtcagccgtttggttcacagcgggcttgtgaacaataggcgctagatttctcaatagataacttccaggagcccggcgccagtggcatgatgtccctcagcaaacattttggtggcaaggcagtgtgagtttgcccacatcctgcattcatgataaacagttcgctgtttgatcatatagcctccagcggaatgctgagttggtcacgtcccgcgggcctttggctccctgcagggtaactctgtcttagggtaactcttaggctccaccttagggtaactctgtcttaggctcttaaactcttagggtaactcttaggctctgtcttagggtaactgtcttaggctctgtcttagggtaactgccctgtcttagggtaactcaattcttcatcacagctgcaggtcacctacttgcagaggaagagtctgctttagtcacctgccacgtggacaagcttgggtgcatcctaaggatgtctgtncgagggagaaggtggctggtgtcatgtgtntagtcccttttccagcttcaccagacaggcagtcactgctgccacggggagagggctggaggccaagggcactctgttgtc

SEQ ID NO: 3376 - DNA, 709 bp, Homo sapiens
tttttttttttttttttttttgactaagcaaaatttgtacttgtttaataagaaaatcacttctttaaaaaaatagttctttacatgctgaggttcatctatgcaatgcaagagctgaaaacagattcgagaaaggctgttcctacaagggaaggtcctgaggttacaacgccggcatggccgggaaaacatggctgcagcgatcccagcttcttgctgcccacaggggtggcacatctgggcacacactgtgagctgctcagaggcactctggtgggcagctcccatcgcctcagtcagtgtctccgtccccttcactgccttccaggggactgggcacctgcagaagaagaccacatggagaataagaggcaagcactctctccactgctcctggatgcccacaggggcccatgacaggcttggcacaggagccttgcccccaccactccctcatcaggagcagagtctggtgtttgttctcggtcattctcttaaccaggtcaggaacctgcgcagggaaagccaagggctggggacactagaggggcctttgttgggctccttcacatcctcacaggtcgcactgaccacaggggaaaataaaatggggccatttggaaactcaacaaatgcaggtgcctcggaagtatatatgcctctcatcagtggagtccacagcagtccaattctggccaggcagatcagc

SEQ ID NO: 3377 - DNA, 666 bp, Homo sapiens
ttttttttttttttttgggatatgacctttattgaacttatccaccagagtggaaataatgtctgtacaaaaccaaatgtttgttactataacttctgcatcacaattaaaatccaaacagttttttaaaaacagtcaactcaatcaaaacccactacttcagaatcaatagcttctttgaagccacagtaacacttaaatatggttaagactcgaatgcagaaatttggttggttggaaagctaattaaacttccaacttgctcaaatagaattacaaaaaggcaaaattgtgtttttcacagagatacagtccactggaatcaccaacactggacagctgttagagtatttagagtcctgagataacaaggaatccaggcatcctttagacagtcttctgttgtcctttcttcccaatcagagatttgtggatgtgtggaatgacaccaccaccagcaattgtagccttgatgagagaatccaattcttcatctccacgaatagcaagttgcaagtgacgaggggtaatacgctttacctttaagtcttttgatgcatttcctgccagttcaagtacctctgcggtgaggtactccaggatggctgcgctgtacacgcggcagtcgcgcccacacgtcctgactggtcgtcctagattttaggt

SEQ ID NO: 3378 - DNA, 666 bp, Homo sapiens; identical to SEQ ID NO: 3377

SEQ ID NO: 3379 - DNA, 722 bp, Homo sapiens
ttttttttttttttttttttttttttttttttttttttttttttttttttttatgtggataatatttatttgtatcttatctatagaacaaatatttacagatacaaacggaatcacagcaaagttgctataaaaccatccagacctctcgatggccacttctgaaaacatccacggtgaagggcaggccaggcctggctgtggagtgggccagctgagtacctgggcgtcagccaagggaaatggttggggattatggcttcagcactctgccggagcacattcctgagcgctgacaacgtggagccctcaccgcccccacctaccccaacctcaatggggaaggaaaggggcctgagctgggcagggctgcccgggctcactatgtgcctgctccaggagtccctggcccctgtgctggcaggagcatccctgagctggaccgggaggcctctctggcctggggctgctccctgcccggcaggctgcttgtttggcagctggaggtggcaagagctgctggtgctgccagggcgttttggccaggaatgagctcccagggcagccctgaggaaagggtcttaggaagcgcctcccagctcactactaggagctggggactgtcagtgctgactggggctggggtacaggagcacctgcctctcctttcttttggcttaaagtggggcacggaacagccggaaagggccaagccgcccagc

SEQ ID NO: 3380 - DNA, 648 bp, Homo sapiens
aaaaaaatgaggccatttctctcccttttatcattgaactggaagatacgccatctttttatattttactccaaagggaagaaggctcatcataattgaaatgaccctagttctaggactattctaaaatgcacatatccacctcaaaagatctctggaaaacctagtcaaatctctttctctgaccatcatgcctcacatggagctaataatgaatgtctgcaactgattgagggactttaaaaaagatggcagtcctaggacaaactaacttgctttgttaggacacaactaattcctttagtcattcactcactcaacaagtatttattaagcagctataaattgcttcaatcattcaataagtagacaaaatgtaacaaatataatagagtaaggaatcaatttctacattcccatttttgagaaattcctagcatgcacttcacatacagtttatatgcatgcaaatgagcttacctctcttacagcatagtcgtggtgggaaggagactgacaataccaagctggtgaattcaaacccagaggcctcaagctttggcacacctgaaaaagcattacaaattatgtaaattcccaggaattgctgaaaatattacttacctaagtcttaataaacatgaaatt

SEQ ID NO: 3381 - DNA, 702 bp, Homo sapiens
ttttttttttttttttttttttcattatctcagtttactttaatttgcttgtttacacacacgatctgtgtgtacataacagtggcaagagccattctctaaatacaatctggtacccagactatgacagatgcacgtggaaaatgaggcgtcagtgaattaatctcaacatagaaaggcaaaataagcatggcagtattctatgatcacagatgcccccagagcctgggggtaaccgacacttttcaacataatacaggacaattttaacaaaagacccagactccaaatggcacccaaaatatattcgtttctctgccttctctagaggagtcagaaagttctaaaggcttactcaagaaacaaggaggcagggagactatggcctgctaagcacagatgctgagcactttacatgcaccatttctcttcatctccacctgacagacgatgaaaacgaggtttgccatgatcacacagctatcaggagtggtgccaagatatgaacccacatctcatgttgcttgagacccaaatcctttcacttatgtcaggctgtttcacataggaatagaaagccatgctcccaaggaagaggcaagggggctaagcatggacaagtggcggaagcctcatcgatacagaagctctgcaattgacactttccacatacagtgaaattagtgaagagcccgaattaga

SEQ ID NO: 3382 - DNA, 701 bp, Homo sapiens
tttttttttttttttttttttattgaaggctacagtgatccattcgagatgtttttaagtgaactttgcaaaggctgtttcttggtgtgttttttttttcttgacagagtcttgttctgttgcccaggctggagtgcaatggcacgctcactgcaacctctgcctcctgggttcaagcaattctcctgcctcagccttccaagtatctgggattacaggcacccaccactacacctgactaattttttgtatttttagtagagactggttttgctatattggtcaggctggtcttgagctcctgacctcaggtgatctgccctcctcggcatcccacagtgctgggactacaggcgtgagccaccacacctggctgccaaagactatttcttgtcatgtgtgatcatgaagtctgtgttcctttagctcatgttcaactgatgtttgacagagatttccttgaatgccgggagctctcccagtttttagagagaaagactaagaacaagtgggaggaattagactcattaatggatattgacactagttaacacacagcagctagggaggaatagaataattatgtggtcctgaagcacctcccacaagagactccttagctccagggaggagatggcaactttctgctgagacaacttggtcggggagatctaaaccagggcactagaggacttaagaca

SEQ ID NO: 3383 - DNA, 670 bp, Homo sapiens
tttttttttttttttgcaattaccctaagtttattttgtgtcagttacagcatgatggggatgccaatcacagagctctccttgcaggtaggttagcatttctattctaggtccccatattcaaaagcgttcataacttggtcataaaaactaatcatggaatgaatcttggcatataaaagtcatttctcagaagattaaaaaaatacaaattagaaaaaagccccaagtgctttgccattctgatgttacccacaggccccaaaatgaattagcaagtcagcaagtccttttcacttatttttttctttctccaagaaaactgtgtacttcagggcctttgggtcagtttttaagctgacttgtctggaaaaggttatcacttggagggaaagaagttcttttccagcctggacaatatagttgagactcggtctctataaaaaatttcaacaagacacaatcagccagggcatggtggctcacaacctgcagttccagctactcggaaggctgaggtgggaggatgacttgagctcaaggagttcaaggctgcagtgagccatgatggtgccaccacactccagcctgggtgatggcagagtgagacccattcttagaagcaattcagtgtcttctaatacactgctcattgggaatatatcttttc

SEQ ID NO: 3384 - DNA, 718 bp, Homo sapiens
ttttttttttttttttttttttttttttttttttttttttttttttttttttttagaacgcaatacctatgaacacctctcaaaacaccagtgctcttatgaagtcaagttgagaaggatagagactaaaaaatgatcatgttaattaactatttctatgtgcgtcttccagggttctaactaatccctcccaatgtgaagatgactcccatgaggcacccttctcattttcttcaccaggaagacttacctcttggaagccttctttgaattagttttcaccaccagttcaagttaggaggcttcccctgtactctcagagccctcaggtttagtacatgtgacaacatattcaaatctttaagagtctgttgtccctattaagctgtgaattccttaatgacacacttgtgtctgagatcccagcaactattcaaatacccaccaaacatctttcacatgatggttacaacttggctaagctaaacgtcaaaggtggggcaaaaatctctatgctcagtgtgaaaggtccaaaggtaatggcttattcccatgtgggctgcctgcacagaattaagagaatcttacaagaaagggacacctggaaaacattagcattaacttacgctggttggccttccaattgagagaactcatccatggctgtattaaccagccacaagaaattcaatcccgaaggttggtgcacaagtatgct

SEQ ID NO: 3385 - DNA, 686 bp, Homo sapiens
tttttttttttttttaagaaaaactacatgtacataggagagtttcattaccattagacttgtatgtaggacttaaaaaaaaatggccttaataaaattacaagcaacccgcctggatgcggttttcaaaagaaggcattgaggaccatgctaggaaacctcataccccatccgtccaacctccggcgggcgccactgcttgtcctctggtcttcggtgtggacagataggagaggagggatgcccacctcggagcatcccaggcccgtggcccattttcagcatcctgaagccagattcacagtgacattgtgttaacgtgacgaccttggtccatttatggagttctttttccaataagaacctggtggaccgaggtccgagcttgccaggggacagtggggcccacgcgagtacccggggcccagccaggagccagcagccaggcgtccctgtgttccagaaggattcacgcccctcctggaacctgggcgggcctccagggggtctggtatccacggacttagtgtgtgcgtacgtgtggtacccaaattatcactactacatattcttgatattgccaagacttctgaaacaagacagcttaagggaatcagactttagcttgtgatgttgaaaatactgtgattgacgagccgcttcctgaggggcaaggcccacgtgga

SEQ ID NO: 3386 - DNA, 95 bp, Homo sapiens
cgccgcctgataactggcattttgtagatgtggtttgactatttctgtatgtctccatctattgatgagggtcttaaaaaaaaaaaaaaaaaaaa

SEQ ID NO: 3387 - DNA, 674 bp, Homo sapiens
ttttttttttttatctggagcacacgtgaccttctaacattggtacattaactatctgtttatcattgtcttcttcaaccagaaggtaacctacagtagggcagggatttttgtccattttatccataaatgtatccccagatgccaagaagatgtggctaatatacagtaggtgctcagataaatattggatgaagtaaataaatcatttcacagcaacatagggagcatttagcttcattttccagaaaaaataaaagcactcaagctagtattaagcacaagtcacaggatttgcccctcttatgtcaatttgatgtgacataaattggcataaattttataccttcaagggtataaaaactcagacgaaatcatcttctcatttctctccttcacactgttaacacagtaaatgttctgtagtctgagatttatgcaaaagcaaaaaagaaacggaaaaatcccaagccaaacaagcaaatataagcaaaatgagcgaaacttttatttgcatctactgtgtgtcaagctaaatggactctgtgtattattggaagttaaaaataatccccttgagtacaaatgagagagaaaaaaaatgtaatcatgggcaactgtaaattactttaaacagtgtttcttggagcctaagtgcagaatggcatactcct

SEQ ID NO: 3388 - DNA, 590 bp, Homo sapiens
tttttttttttttttatagtttaatgtattttaatagcaaacttacaggaacagcacagaagacagacaacattaaaaacatgtacttgcatgtaggacaactcagttagaaaagtatagtgaatggatggaatctactgtatgataaaaatgctacaaacaccatttagttgccatcaataagaaatttacttgttttaaaaaaatccaaatgctggcattgtccagaaaaatttaacaggtttatttataattattataaagttgaaccgctgaaacttgttcactgaaacattttaacttgcattaatgctttacgtctccgcatttatattaaaaattcacacacaaatgaaaatggaaaaactgccaatacctgatttctgtcccctattttccactcgcaatcatatacttaggtaccttgtgaccccatggaaaaaaaatatctaacgttcagaactaccaataacaggaagaagagaaatgttttgtaaaagattggagaatgaaatgttacccatcatagtggattcttcaagcacgttctccaagtatgcggcgatgcataacggaatgtctaaaggcat

SEQ ID NO: 3389 - DNA, 590 bp, Homo sapiens; identical to SEQ ID NO: 3388

SEQ ID NO: 3390 - DNA, 861 bp, Homo sapiens
  misc_feature (190)..(193): n is a, c, g, or t
  misc_feature (206)..(213): n is a, c, g, or t
  misc_feature (221)..(223): n is a, c, g, or t
tgtaatcggtttgacagaaatcatgggcgtggataccggtttgactcacggggatttccaagtctccaccccattgacgtcaatgggagtttgttttggcaccaaaatcaacgggactttccaaaatgtcgtaacaactccgccccattgacgcaaatgggcggtaggcgtgtacggtgggaggtctatnnnnataagcaagagcnnnnnnnntcgtttannngtgaaccgttcaagatcgcctgggagacggccaatccacgctggtttgtggaccctccaattagaagtacacacgggggaccgaatccaaagctctgccgggacttctagccactagggccggcggggagcgggaataacaaattttcatcacagcgaagaccagcataattgacccactctaagggacgctcacttataagtgaggaacaacaaattaagtagaccaacattttgttgacaaaaaagaacagcagctggtgtatccgccttctcgcgagatattctccggcggatataatacttatactaccaccctataatgagagagaaatcatatagtgtatagataataatgtacacaggaaacaacatttctcttccggaataacgcttggcggtcaaggatttaaaaccacctggaactgaccaattaacagcccaatatctacaatcaaccaacaagtcattattaccctcactgtcaacccaacacaggcatgctcataaggaaaggttaaaaaaagtaaaaggaactcggcaaatcttaccccgcctgtttaccaaaaacatcacctctagcatcaccagtattagaggcaccgcctgcccagtgacacataaaaaaaaaaaaaaaaa

SEQ ID NO: 3391 - DNA, 709 bp, Homo sapiens
  misc_feature (614)..(614): n is a, c, g, or t
gctctaggcagcgtccgcgtcggggcacgagccaatggcgcggtcaggagcactcacctgatggtgccgaggggagcacgtgtctttggagtttgacaaaatctgttcgggtcgtaaaatgctctcagagcgctgtgggggactggaagtcatttctgatggggtcattagggaaatgggattgagcgcacctggaaggagagggcattcaggttgcaggaaaaataatagctcatgtttgtgtgtgtggtagaagcagcattttaagcactacgtgaattaactcatttaattcccagagcaagcctatcaaattgatatatattactgtatacccattttgcagatgggcaaatgaggcatagattagcttgcccagtgtcatgtagtaataagtggtgaagtcaggattttgaacccggagggtctggccccaaaaactgatctgaaaccattgtaccgtggcattgagtagagacaccgatagcaacatccaggccatcctagaattatgcatagttgagtttaactaacaaaatagggagtgagaccagaaaaataatctgggaccaaattatagaccatatttagagccatgtgaaggtgttggcgtntatagatgctatatttgtcaaaaatttatccccagagttactagaatccttactagaagcagtgaatttactgaaggaaagagaacagctagaga

SEQ ID NO: 3392 - DNA, 712 bp, Homo sapiens
tttttttttttttttctggtgaccttcaagacctcaaaaatcattatactaaaatatttgtaccttataagacatattttactgaaccctatcaacacctcttaatagttctttttatcaatgcttctttagttcagtaatctggaatacatcctggtttgaactataaaatataatatccacgaatatgtaaaactattatgaatccataaattttttaaataaaaattttaaatgcaatacctctggtcctagcctaataagtttgccttaaatcttctatttttactttctcttatggtcctactctaaaaacatatttaagtggaataaatcacatattaagggatttgccacataattctaaagacggtgcattgtttcacgccagggccctaacacactgtcagagaagtctcttcagtttccatttttttattgaagaagttaacatatgtttggttgagaactcaagtctggaaaataggaagcattgtgaagtgtcaggattaataggtcttaaaatttaacagcaagctagaaagcctgggtggtagagtctgtaggttgcaaagtccctggtcacagagtagggtagagaagttgaataacacattatagaagtaaatataaatatgcaggctaatttaccatttctgctactgggtatcactttttcttgctttaagttaaatacattatcttcctaacc

SEQ ID NO: 3393 - DNA, 236 bp, Homo sapiens
ttttttttttttttttgtttttaattatgaagtggatgctgcatttaaaaaatattgcagaatgtttatcaaggacatttaatcaagtctggagtgcttgaataacgcttttttttataaagaaaaaattgagagagaaaactgtaaccacctgaaatgatttatattatcctgttttcttctaatagtaagtttgcttgtaaggttgtttatacatatgcattttgagttcaacg

SEQ ID NO: 3394 - DNA, 620 bp, Homo sapiens
ttttttttttttttttttttttttggagacagagtctcactctgtcgcatgggctggagtgcagtgctgcgatctcggctcactgcaacctccggctcctggattcaagcaattcccctgcctcagcctcccgagtaactgggattacaggtacccatcacaactcccggacgaattttagcatttttagtagagacggagtttcgccatgattggccaggctcgtctccaattcctggcctcaaatgatatgcccgacatcgcctcccaaagtgctgggattatagccatgagccaacacgcccagcattcatattcctagatcaccttaaaaattcattcacattaagttggtcatggaaggcccaagatgaggtcaatcttgcaaaggtaagacaccatgtaggttatatctgagatcccgaagagattacataatactccccacagttcgaaaggtgtcccaaaataattcaatatacacctaatgggactaccatataagatctccattgtcctgtggactcctttcacagggaggcttacatttttcccctcgagagatttaactacgatgcttgatggtgcatcctgagacttggaaagccccctggactata

SEQ ID NO: 3395 - DNA, 452 bp, Homo sapiens
atggaatatatgcttcttgatcctattattaacaagccccatttccctgctgaaaagtcaaacttcataacaaggagatagtaaaataaaagcatagtcatctttgttccttcgattcccctgaagttagaacccttcctgcaatctgacacgttgaagttgggctatggcttggattgtccgtagcagacgcgatgggacgggtcaaaacttgaatttaccagtgaatgtagcagtctgaagatataagttatccacttaaagagaaagcaaaatagaaaaaaaatgcacaacacaaaaatgtctggcccttggcatcataggcctgcagactggtgcacagtgattccatcaaacgtataagaaaatgcaaagctcagtgaagacctggggctgacggacgtggggctgacatgatgccagagctggtgtagacgcggattacatatgaa

SEQ ID NO: 3396 - DNA, 713 bp, Homo sapiens
ttttttttttttctagtctttgtcattttatagatgagtaaaatgccattcagagaggttaatatgtttagactcaggcttgtatttaaagtttcccaaaatacaacttagtttgaagtaagaagactgtgaactcagagagattaatatgagctgaagattctcaaggataccattcttttcctttgatagtcatgatgataataagaacatttgtacatttgagatgaatcattttcaaagactttgttaactaatggtgcagcttagtttgcaaatgcggtattattttgttttaaaaaaatagaacaaacgagaaagtgtctacttattatttaaacttctcctttaaagagataagtaacatcacgctgctctcaaatgggaataacaaagtgcattaacaatttcaaattactgaatcttataaacgaaatttaccatagacagctttgccgtgtccatggttactcaattgttccaaatatttttactttcctttgcctctggcctccttgacctccacatttaacagctagtataataaataaatattttattgcattgtcagtaaccgaactgtatttggtcaatattcatactttctcccagctcttcagggaagatgtcgagcatagcattctgtgaaatacaactatgcttaattccaactccaatctgtatagttcctttcagaaagtagtaatgtcatg

SEQ ID NO: 3397 - DNA, 605 bp, Homo sapiens
tttttttttttttttttttcagctttcttcaggaagaattttaatggtttaaaaatatgtatgtacaaaagcagcaccagcatttggtgcttccggtccacaggcgccacgtgtcttccaggactatctctgtggccagttgtacctgaagcctctgtctgactttccagttggaaaggacatgcttttgtttcccaccgactgtttaatttttttggctgcaatgcatttcttgccagacggggtctgtttatttggatcaaactgagaagaaactttggatttgctgtttccagcaaaagccttgaagtctgactggctgtagtcgtaaggcgtaaactctttttctggtggctctgggtcctttggcttcttggacaattttcgagtcgtttcttctcttgtttctgttctgtggtccttgggtcgcttgtagctcgctctctcttcttttgcagcattttctagcacgactgctgtcggacggagatggcctggttctgctggcagatattgcacgcctcctttgactgttcccgggcagctgtatgctcaagctgacttcttcttgacagcttctttaaagtcttatgtacttgtcctgg

SEQ ID NO: 3398 - DNA, 605 bp, Homo sapiens; identical to SEQ ID NO: 3397

SEQ ID NO: 3399 - DNA, 669 bp, Homo sapiens
ttttttttttttttttatttttttatttttttttttttttttctgagacagagtttcactcttgttacccaggctagagtgcaatggcatgatctcagctcactgcaacctttgcctcccaggctcaagtgattctcctgcctcagcctcccaagcagctgggattacaggcatgtgccaccacacccagctaattttggtatttgcagtagagacagagtttcaccattttggccaggctggtcttgagctcctgacctcaggtgatctacctgactcagcctcacaaagtgctgggattacaggcatgagccaatgtgctcagccataatcccatttgggaagggtcacatcactcacagagttgtgtcacaatgccctctgcaggtaggagcaaggcaaaaagagtaattaccccctgggttttagagcaagaaatatgtcacaagtggacactatgctcaggtaccaggcatggaaggttaacataacccttgggctgtagagccccagtgatatgtcacaattgcccccgtgttgcaacagatgccaaaggcaggaagaagagtccatcacctgagtgcgaaagaccaagtaagtgttattagacttcttggacaatgccaatgcggagaactagagtcacattacctagttggtgggtctagc

SEQ ID NO: 3400 - DNA, 633 bp, Homo sapiens
ttttttttttagagacattatgttttcccatctttcccagatgtctttagaaagtgagaaaggtagtattgacaagatacatctgctctccattaaaaaggtatttttgtctatttctgattacaacctgcatacgtaatccttaagaaacacagccacctttttccataaatttacttagttgccaattactctgcccatgtctgtaatttgtaatcccttttttattttttttttttttgatacagagtcttgctctgttgaccaggctggagtgcagtggcatgatcttggctcaccacaacctccgcctcacgggttcaagcgattctcctgcttcagcctcccaagtagctgggatttcaggcatgcaccaccacgcctggctaattttgtatctttagtagagacggggtttcactatgtcggccagactagtctcgaactcctgatcttgtgatccacccacctcgactcccaaagtgctgggattacaggcgtgagccaccacgcccggccttgtaattctttatttactgggtaacttacagaatctcagtataagattgatgctacttgagatttaccactaaaaggttttccctgaaaggctatcacttcaaaccaacaaca

SEQ ID NO: 3401 - DNA, 685 bp, Homo sapiens
tgcgggtaaatgccccgcctgccattaagcccagtacatgacctatggaactgtcctacttgcagtacatctacgtatttagtcatcgctattaccatggtgatgcgttttgcagtacatctatgggcgtggatacggtttgactcacggggatttccaagtctccaccccattgacgtcaatgggagtttgttttggcaccaaaatcaacgggactttccaaatgtcgtaacaactccgccccattgacgcaaatgggcggtaggcgtgtacggtgggaggtctatataagcagagctcgtttagtgaaccgtcagatcgcctggagacgccatccacgctgttttgacctccatagaagacaccgggaccgatccagcctccggactctagcctaggccgcgggacggataacaatttcacacaggaaacagctatgaccattaggcctatttaggtgacactatagaacaagtttgtacaaaaaagcaggctggtaccggtccggaattcccgggatggccgcccttttaatcatggccaacaggttttgttttgtttttgttttgagacagagtctcgctctgttgcccgggatggagtgcagtgagccgagatcctgccattgcactgcaacctgggcgacggagtgagactctgtctcaaaaaaaaaaaaaaaaaaaaa

SEQ ID NO: 3402 - DNA, 673 bp, Homo sapiens
ttttttttttttttggtaacacccctaggtgccctttagaggcctccagttggtcacaccctatgaaggattggcctgtgaccaatcagtggctgaagtggagacttggctcatggtcaattagaggctgaagtggaaacttctgtcttgttatctcaggagctaggatgtatgctgtatgctgcttaatgttgcctagaactggctgcacctgctgttcttttgcttctgccttaacccttggttaccctaattcccaattctcctgcctcacaatgactcacacgtttgacagttaccctttctctttcaaggaggcatgagaaaacctctaattagatccatggaggctgtggtcacaaagaaagcccccaattcacacacataccgtgattctcagccttcctgcccatcttcaccttccctcagcttgggggatatctaggatctcttgagaatctataaactaagaagacaaaggggaagaagttgaggaaatcaagaacaagttgggaccactaagcctacctttttgaccccatctgtggtgggggctgggagtcgtggagttctggctcccaggtgatcaggccttgtggtaaggacaagtctctgatagtagggagctggcgtggagtcctaatctcatgacttcaacctgatatatctgggc

SEQ ID NO: 3403 - DNA, 690 bp, Homo sapiens
tttttttttttttttttttttttttttttttgagacggaatctcactctgtcgctaggctggagtgcaatgatgcgatctcggctcactgcaacctccacctcccgggctcaagcgattcttatgtctcagcctcccgagtagttgggattacaggtgtccaccactatacctggccttttatttttattttttttagtagagacggggtttcgccatgtatgttggtcaggcctggtctcgaactcctgacctcacgtgatccacccgcttcggcctcccaaagtgctgggattacaggcgtaaaaggatgctctaagatatcattacaatacaacaacttgcctaatcttgattcctgaatcacattaattcttaaatggccctactatgggtaaacaatgtttagcctagacggtggcaatatgttactaaacatcaggtccaagattgctatccgaaaagtggcagcccatctgcatctatggaaagaaatattcagggtttaatttacctcagttgatttgatttgtcatctatatagaaaacgatgtcttacagtgatatatgtaaatgatagcaggtgaagaactaacataagagtgcttgatgcttataccaagagaaagtctgactatgtaaacaggcaaatgatgttactactttacatagacaatgggtatcatcctaa

SEQ ID NO: 3404 - DNA, 671 bp, Homo sapiens
tttttttttttttttagattagaggttggcaaactttctctgtaaagggccatatagtaaatactttaggatatgtaagccaactctgtcattgtagcatgaaagcagctaaagaaaatacacagacaaatgagaatggttgtgtttcaataaaactttatttggaaaaacaggccatgggcagtatttggttcttgggtggtagtttgctgacccctgctttacagttgacttgagatttttgcttcttaactgatgtacatcttgactgatacagagttaaaggttggaatacataaaatccaaggcttcttctaactcagagacttgaagaaacacataagaaaagacaagagggcaggcttggtggttcacacctgtaatcccagcactttgggagaatgaggtaggctgatggcttgagtctgggagtataagaccagcctgtgcagcatagtgaaaacccatgtctacaaagaatacaaagaattagctgggcatggtggcatgtgtctatagtcccagctacttgggaggctgaggtgggagggtcgattgagctcagtaggtagaggctgcagtgagttgtgattgtaccactgcactccagcctgggtaacagaagcagactctgtcttcaaaattaaagacatgaccagaaaagagaaaag

SEQ ID NO: 3405 - DNA, 650 bp, Homo sapiens
tttttttttttttttttttttttttttttttttttttattttttttttttgagagagggtctcgctctgtcacccaggctggagctcagtggtgcaatctcggctcactgcaatctccacctcctgggttcaagcgattctcatgcctcagccacccgagatagctgggattactggtgttacaccagcccacctggctaatcccaggggccctgttctgtccttcccttcatgctctgccagctgaaggccagtggctgccagggaattccccaactgccaccccacccatcccagacaccttccagatcctccagagtgaagcagagaaatactgagacatcagcctataggaaggagatccaggagaggaaaaagacacaagttttattaaagccccaaaacagtggctagaaaaactgaaaaggaaagagagcagggaggtggggagaagaaacaaaggacattaaaaaaagagacacgagaacacgcagacaacccttttccaatttagaaatgtcaagttaacaccgacagaggtcatagaatatccacagaagccataacagtacaacaaaatgggcctacaaggtggatggggcaaggtgtgagccggggctcaccaaggggacctctggggacccactccg

SEQ ID NO: 3406 - DNA, 647 bp, Homo sapiens
ttttttttttttttttttttttttcacacaaatcatcggcatttatttcctgggtcctaggtgtcacttatcctggtggacagggcagaggtggtcagatcgttttgagccaaaatcccttccctaaaaatggatctgtggagctccatgagggaacctcagagatgcacaatgacagtttagctaaaatggcttaaaaaatgtgaattgattgtcagctctctccatatctgctgaaaaaaggtttaaaatttttaaaaagtttaaaagtgttttctaaaaaagggacaagcaggtctggacccagaagattgggctggagaggaggtgttggtgtatgggacagggtccctgcccgggccgctcgcgagaggagcgtcctgtgtgggctgctcactgtaggggcaggccccgcccaagtcccggagccagctcaataaataaccatcttgtggttacagtgtcttgaaagttgtacctgggcacggttgcgaaaggtggctgggaatgtgaagccatgtgggtgtggcgcagagggcttccccggagttggaggccacagaggcctctgggagagccattctcagatctggcctgagtttatctgggacatggagctcagagaagacgctgctgggcagagcagg

SEQ ID NO: 3407 - DNA, 718 bp, Homo sapiens
ttttttttttttttttttttttttttttttttttttttttttttttgatgtaatactccattaatgatgtccagccaaagacctccagaaacactcttgtacttgaataaggctggttcattacttgttgcagtgagggagaacacacattatgggaattatgggtgtctcagtaagagagtgttagaaaggaccttgtaagattggactttgattgggtgatttgaggcagggtctgaggtagcagggattccctctagattggatggtgttagaaagccgggcaattctctgattatggatctcaatgacttttatctataggaaggggaaactatagggagaataaagttgtcattggtaaagaagtagcagtcctcatttcagaccaagagatagggtgtaggtattatgtgggtggtacagtgacttgctttgtctgtacttagacaaaattatgaagtggccctgctgtggtctatatgtaatcatgatctcaaagttgcctggtcagaggctggtaactgtgagatggttcatgtctaatgggagaatcacagggtctacctgtgagagccaggccagcttctgggtgtcagggctgctcttatccttcctcaatgttacaactacaattctaaagaatttccaatgatctaatgaggaagaatctttcctctggaaaagtgatagacaccaagtttcgggaaaaacactc

SEQ ID NO: 3408 - DNA, 663 bp, Homo sapiens
ttttttttttttttttgagatggagtctcactctgtcacccaggctggagtacagtggtgcaatcttggctcagtgcaacctccgcctccagggttcaagagattctcctgcctcagcctcctgagtagctgggattataggtgcccaccactacacccagctaattttttgcatttttagtagagacggggtttcaccatgttggccagactagtctggatctcctgacctcgtgattcacccacctcggcctcccaaagtgctgggattacaggcgtgagtcactgtgcctggccctattttcttgttttaataaaaattaatatcaattctggatacttacttgtgtttattaactttataccagtaatatttagttttattcttattaaaggagtaaaaacactcaaagatacattggctaatttgcatgatgagagtctgctcccccctgcaatgagggaccgaggtgagtcacaggaaggggacaaaacaagagccctattgcaggcaacatagtgagactccatctctacaaaaacgtttaaaaaatcagctggacatggtggctcacacctgtaatcccagcactttgggaggctgaggcaggaggatcacttgaggccaggcgtgggagctgcgtgagctattgatcggacact

SEQ ID NO: 3409 - DNA, 636 bp, Homo sapiens
ttttttttttttttttcgcattcaacttaaatgcttttattgacaatgtcttggaacaataagcaaacaatgcttaaatttttcattcaaattcactttccacatgtcaaaagacctcaaggtagaaaaaaataaaataaaaatataaatatctgagaatccatcttaataaataaattaaaaacacaataaaacgttttcatggaaaactgttaatgtcagaacattcagaccacctcaacaatgcatgatcagtaacattacaatgaacattgatgttgaagaaaaactacagtacatggatatagctatttatttctatctaccagaaaataaagtcgtatcttttcttagtataatattggtcatttctaatcagaacacactattgccaggaacacagtagttattgttaaaatcagctgcactagatacaatttgaaaatatccagcaccaggttaattccaataatgaacccaatagattagttaatgctatgagaagactaaggagaaagagaaaaagagacacagacccaggcctggctcaacatgctactaactaccagctctctgaagtgtcactgggaacatacacactccatgcgttttgctacatctccggaagagggtgac

SEQ ID NO: 3410 - DNA, 684 bp, Homo sapiens
tttttttttttttttgagatggagtctggctgtgtggcccaggctggagtgcagtggtgcaatcttggctcactgcaagctccacctcccgggttcatgccattctcctgcctcagcctcctgagtagctgggattacaggtgcctgcaaccatacctacctaatatttttgtgcgtatttgtagtagagatgcgtttcaccaggtttgccaggctggtctcaaactcctgacctcaggtgatccacccgcctgggcctcccaaagtgttgggattacaggcgtgagccactgcacccagcccacatatacttttatttttttcagacagagtctcacttatgttgcccaggctggagtacagtggtgcaatctcagctgactgcaacatccaccttatgggttgaagtgattctcctgcctcagcctcctgagtaggtgggactaaggcaggcgctaccatgcctagctaattttgtattttagtagagacagggtttcatcatattggccaggcaggtctcaaactcctgacctcagatcctcagatctgactgcctctgcctcccaaagtgctgggatagcaggaatgagccaccatgctggcccacgtacacattttaaatcaggatttaagtaaaatagtttagatttctgaaacagtttttccagaagaacctatctg

SEQ ID NO: 3411 - DNA, 89 bp, Homo sapiens
cagtctatgaccattaggcctatttaggtgacactatagaacaagtttgtacaaaaaagcaggctggtaccggtccggaattcccggga

SEQ ID NO: 3412 - DNA, 717 bp, Homo sapiens
ttttttttttttttttttttttttttttattcaaattttattggaagtttacaaatgtattacagacatcagtaaaacatcatatccattttacagggcacggatctcaagcaaagtgttcagaacagtctctggcagagcccacaccaaaggcctgttgcacgaccttcttaacaagatagcttgacactcaacacagaacacagactctggcctgcctcaccttcccaggccctttgaggttttgtttatgcacttgaaatgaacagcaggagatggacaaagcaatcctgtggaggaaagaatgagtttaggagaggaaaacctgccgaagtcctaatttgctaaaacaaaacattaattaaaaaatggaggactcatagtccttacaatgttcacgtcagggtctatgatagaatcatgacactttatggaaagatctgaaagatcaactaggtaggtttaagaacagaccttatgggtaagtaactctctctgaaacaatttagaaaagcttggtcagtgacctgttgaatatcaatggccaaattgccaagcagagtgaaggggatatctcagagaactctcagaatagaaccaagcagattttctctatcctatggattcatcgtattcaaaacccaggagatgttttcctaaccactatgttgactttcccctcctttatattccttggggaaagctactttgttcagc

SEQ ID NO: 3413 - DNA, 630 bp, Homo sapiens
tttttttttttttttttttttttttttaccttttattttcttttagttcaatatttcaaacaaagttatagaagcagttccttatgcacatgtgcaaaaatttttttgtgtatatcaattagaagtggaattgctgtgctataaattttactaatattatatattattatatataatattatacacacacacacacacatatatatatatatgtatgtatgcaggacatgaatcctttaagagtcaaaatgcattgcagaaggtcttctcaagtctctactttatttttccatgttacttatgatttgttttcttttctgatagagatgtttctactgtagtcagcatttccccaactgtatctcttacattttgcaatctcatttaagaaatcctttgctcatgataaaataaagatttatctcttatacttggttatatatttaatcaaacataattaggtcaaaataattcactgcaaatacaagattgtgtatattatcaaggatagatccaatttacaagttttagctatgcatgcctgccctttacactgtaataattaacagatattccttatctactttattagataaccagttgtctcatcaacttttaatttcgtcgcaa

SEQ ID NO: 3414 - DNA, 700 bp, Homo sapiens
tttttttttttttttatttaaatcagttttatttaagaatttccaacaatgacaactcttataaaaagcatccaagcacaggacacagaactgcagcaaacagcattcttatgggtagctaacagacattagaacttccacccttctttgagacacctgagctcactggtgaactctgcttcaagtcctcctgcaaagcacaccacaagctcagtccatgttctcagcccatcagcttcagttcacattgccacacttacatatcagtaacagaagagaacacacaccatacagcattcacagcagttgacaaaggggtagggggagtacaagtatcatttcacttaacacattcatctacatgtgggttatctaagaacaaaaactcacttaaaagtcttccaacagatgtggatgtcctttgaatgcaaaaaacattcgtacattattgctatcatagctctctgcacactctctcaccaaagccacaggattgagagacacatctcgccaagttaaaaaatatccattatgcaccaccaagtctctgcacgcgctctctcctttctcgctcatactagacctttcatgcctcggcacaccatcaatcccacacaatgtttcacaagtacagacagccttctggtgcatatcacagctgcgtcatagcgttgatacggactcatgaataagagtgcgg

SEQ ID NO: 3415 - DNA, 629 bp, Homo sapiens
ggtaggaaatacagatgaagaggactgcaatagaagcttttaatgaaacaattaaaatatttgaagagcagtgtcacacacaagaacaacatagcaaagaatatattgagcgatttcgcagagaggggaatgaaaaggagattgaacggtaagtctacttagtacctccaagggcatcagtgagacaggatttcttttcttccccaataatttctgtcttgttttcttttaccccctcaaactgcacagccctactattggaaccacttgactgtttccactaatggcaccaaattgaacttcctctctcctctgctctttgttcattctcccaaacggataaactcctgcttatccgttaggacttcaggttagatatcatcttttctagaaactgttccctgattccggagaccaatttaggggctgtatttcgggtcccctacaagtgcctggtcctgatccctagtgtaaacatttactgaatgccacgcccactcaaactgtaaactcattgagagtaggcatggttggcttattttccctggtagccctagtacctacttatgtatgggagtacataatgggtgctcatcgaatatttttgaaattgaatatcaactttgggc

SEQ ID NO: 3416 - DNA, 90 bp, Homo sapiens
ttgggtatgggcagaactatgacttgcttttaaccaatgggatatggcaaacgtgatgggatgtcacctctgtgattaagttagcataac

SEQ ID NO: 3417 - DNA, 759 bp, Homo sapiens
ttttttttttggtcaagagaggcgggaaaacaggtgcaggactgctacatcggtaagcgtaactaatccgataagcagaggtccatgggtggttacgcaccctggaaaagaataagcattaggcccttacaggacgctctaggactaatgctcattggaaaatgactaggggtgctggcatccctctgttcttttttcagatgggaaacgttctcccccacaaggcaaaaacgcccctaagatgtattctggagaatgggaccaatctgaccctcagacactaagaaagaaatgacttatactcttctgcagtaccgcctggccacgatatcctcttcaagggggagaaacctggcctcgtgagggaagtatagattataacaccatcctacagctagacctcttctgtagaaaggagggcaaatggagtgaagtgccatatgtgcaaactttcttttcattaagagacaactcgcaattatgtaaaaagtgtggtttatgccctacaggaagccctcagagtctacctccctatcccagtgtccccccgactccttccccaactaacaaggaccccacctttagaccaaacggtccaaaggagacagacaaaggggtaaacaatgaacagagtgccatattccccgattatgccccctccaagcagtgggacgaagagaatcggccagcagagtgcatgtaccttttctggtctcaacttaagcaaataaaatagaccagaaatactcagaaaccgga

SEQ ID NO: 3418 - DNA, 671 bp, Homo sapiens
ttttttttttttttttttttttgtttaagttccttatagattctggatattagaattttgtcagatgaatagtttgcaaatattttctcccattctgtaggttgtttgtttatactgttaagagtttattttgctggacaaaagctccttgttttaattaggtctcacttgtcaatttttgcttttgctgcaattgcgtttgaggatttaaccgtaaactatttgccaacaccaatatcaagaagggtatttcataagttttcttctagtattttatagtttttggtcttacatttaagtctttaatttatcttgagttaatttttgtatgtggtgaaaagtgggggtccagtttcattcttctgcatagggctacccagttatcccagcaccatttactgaatagggagtcttttcctcattgcttgttttgttggtcttgtcaagatcagataattgtagctatgcagcttttttcaaagaacttaaagcagagctacaatttgattcagcaatcccgtaactgagtatatacccaaaagaaaacagaccactttgccaaaatgacacatgcactcatatgttcatcagcatgctattcacaatagcaagacatggaatcaacctagtgtttatcactagtggatcggatcaagaaaatgtggtgtata

SEQ ID NO: 3419 - DNA, 695 bp, Homo sapiens
ttttttttttttttttttttttttttttttagagacaggtcttgctatgttgtccaggctcgagtgcagtggctattcacaggcatgatcatagtgcactacaaacttaaactcctaggctcaagcaatcctcccacttcagtgaataactgggactacaggcatgcaccaccatacctggctcacagagtatattcatgaacattacttcatttgatccccataaaacacttgctaggtgttaatatggttggttgtgtccccacccaaatctcatcttgaattgtaactcccacaattcccatgtgtcctgggaggaacctcatgggagataatggaatcatggaggcaggtattacccatgctgttcttgtgatagtgaataaatctcacgagatctgatgatttttaaaatgggaatttccctgcacaagctctctctttgcctgctgccatccatgtaacgatgtgacttgtttctccttgccttctgccatgattgtgagatttctccagccaattggaactgtaagtccattaaagcattttcttttgtaaatggcccagtctcaggtgtgtctttatcagcagcgtgaaaacagactaatacacgtgtgtagaacagatttaatagtcacatcttatagatactaaaaatggaagctgagaggaaacgaagtgacaagatcaactta

SEQ ID NO: 3420 - DNA, 684 bp, Homo sapiens
tttttttttttagagtgcagtataccaaatcagtgagcaaagctatttatgactcctcaaagtaaaaaatctgtcttctccctcagtcacagagtgaccctgcacacctcctacctgccattcacctcagagaggattttgaagttaggaaagctggagaagatttagatttggggacttgtaaatccctttctgagtttacaagtcagatttcatacaaattatatttttgcctatgtatatgcatgtctatgtatattccagccagtgtatatgcaatataatggcaaaattaaaacataaaaaaacagcaaacaatggcacattcaggtgtaaaggaaatcaattacatgttataaacttttagacatgaatctgtttccattcgagtatctttttttttttttcaaaatttgggatctggggggtcacacagcatattattacacaaagaaccacttattcaagatgctgcagtgtcaggtaatgattaagagtacaggatccacggttttacacagtggctcacgcctgtaatactaacgctttgggaggctgaggcaggcagatcacttaagatcaggagttcccagaccagcctggccaacatggtgaaactgcttctctaccaaaaaatacaaaaattagctgggcctggttgtgggcccttgtattccagctact

SEQ ID NO: 3421 - DNA, 796 bp, Homo sapiens
  misc_feature (637)..(637): n is a, c, g, or t
tttttttttttttttcagctaccagtgaggctgcgcatctcaacgtggacttgttttccactcatgcttccatactagcagattaatattcatgtgctttgcatacttttactttggcttgttttcctttttctcattggtttgtgggagtttcttacacattctagttcaaaagtccttgtgagctttaggtgaaacaaatgatttctctcattctgtcatttctcaatgaaagtagtctgatttgtccttgatttgatggaaaaccagagtttggatgcaaccaaatgtgtcctacaaattggtcttttttttttttttcctggttggttaaactcagaattttcgagctttaacacccctatcccaattaccccaaatcacctcagcttccctcaggctttacataggaactggtggcgacatcagtgaaggcctctctgggcaacttccggttcacattggcgtccaggcgtgatttcttcagcatgtccattgacgcgcatgttcaatatcacttttggagctatgctctgcagatagttactcatggtgtaacgcggtggagggcgtgtccgttatttccattgtaaacttttcttcagcggctttgtcaggagaacaacatggtcgtgcncagatgagttggtcactggaggacgccatcttcaagatggtcgtcctacgccagggaaggcctgggtctccccggcagtctggagctgtgcctactgcgggccccgtgggttattctccatttttttctcgcttctttctgaaaaaccttatttacttt

SEQ ID NO: 3422 - DNA, 713 bp, Homo sapiens
ttttttttttttttttttttttttttttttttttgtatttaaaaaaattatgatatgtgtttaaagctacttgagacatctaaggaaatcagtcgtctctctttctaacgagcaagtgtgtgctctcacactcacgcaaagctcttctctaaatgtgaacttttcatattgaggtaccatatgcccagtttcttcctagaatctattctcactgcgttcaccgtttgcgtcccagcactcccttcgtctgatttgtagcactccctgtacctgccccggctgcgttgcacggagactgcactggtcgcctctcccctggtgaatcctgcagtcactttctggtgatggagctcagcggcccagcacgagagcatggaaacagctgactgctgactcagagggaaagcaagccacccacgaatctcattgcagctcgctgctgcatccctatcccataatcccttgcctggtttgctgcagtcttttcaacagacgctcagtgagaaaaagatgtcctgtaagatcaagaccgattggtgtgaatactgaagggggtcttccacttgttaatgacccagaaacattcctgccgacttccagccttctctcatttcctcccattttttctcttcctctgttcttgtgcattgagctggccatccactacttagagcagaaagatatgctgggtcctggatgatggctgccctgcc

SEQ ID NO: 3423 - DNA, 685 bp, Homo sapiens
ggccgccggcataatgccagtacagacttaggacttctactggcagacatctacgtattagtcatcgctattaccatggtgatgcggttttggcagtacatcaatgggcgtggatagcggtttgactcacggggatttccaagtctccaccccattgacgtcaatgggagtttgttttggcaccaaaatcaacgggactttccaaaatgtcgtaacaactccgccccattgacgcaaatgggcggtaggcgtgtacggtgggaggtctatataagcagagctcgtttagtgaaccgtcagatcgcctggagacgccatccacgctgttttgacctccatagaagacaccgggaccgatccagcctccggactctagcctaggccgcgggacggataacaatttcacacaggaaacagctatgaccattaggcctatttaggtgacactatagaacaagtttgtacaaaaaagcaggctggtaccggtccggaattcccgggatgatagaagttctcactttgggctgtgggtttcagcttgaaggtggggttttgctaggtcccacccttgtctgcctagaatttctctgcctctagcctctatcgatgttgccacttttttccctcattgtagcgaagagcaggaacttctgtgtatatctgaaagattaaaaaaaaaaaaaaa

SEQ ID NO: 3424 - DNA, 713 bp, Homo sapiens
ttttttttttttttttttttttttacagtcacatgcaggcagggaccagctcaacccttctttaatgtcatccagggagggggccagggatggaggggaggggttgaggagcgagaggcagttatttttgggtgggattcaccacttttcccatgaagaggggagacttggtattttgttcaatcattaagaagacaaagggtttgttgaacttgacctcgggggggatagacatgggtatggcctctaaaaacatggccccagcagcttcagtccctttctcgtcgatggtcagcacagccttatgcacggccttggagagcttcaggggtgcctcctctgtgaccccggagaggtcagccccattgctgaagaccttagtgatgcccagttgacccaggacgctcttcagatcataggttccagtaatggacagtttgggtaaactgtaagctggcagaccttctgtcttcattttccacggaacttggtgatgatatcgtgggtgagttcattttccacggtgctgtagtttcccctcatcaggcagcgaagaagatggcgcgtggcattgcccaggtattacatcagcagcacccagctggacagcttcttacagtgctggatgttaaacatgcctaaagcttcatcataggcacttcacggtggtcacttggtccacgtggaagtcctcttactacggtgtccttgac

SEQ ID NO: 3425 - DNA, 713 bp, Homo sapiens; identical to SEQ ID NO: 3424

SEQ ID NO: 3426 - DNA, 734 bp, Homo sapiens
cagtgtttcaccattgagtatgatattagtggtatggtttttggatatgcgacatattttcttttacaaataatagaccaataaagtctattctaaagaatagaccaacaaacaattgtccacttttaccctgtttctttaagaaagcctgagtaagaggcaaaattttggaaaatacttgttttgctctaacgtgctgcagttattagataacatttgcttaacagacacggtatttttccactcctctgagattatatattgcgtcactagaccactatagacattaaataattatatagtggtgcgctatttagatataggtgaagaggtgtaattaataatatggtggtaataggtgtatgtggtggtcgatcagcaacagccgaccaggtgggcgcccctcctgctgtgctgaaggacctctctttattcattgctggttgtacataacatatcattcaccatcgttgtttgctattcaataaacgagtggactgaaggtctgatttcactgcccagagtagaataggtccagcctccctcacaaagaaatcaagcagaaactcccatctaaaaaagctgggcttggctgggcatagtggctcatgcatgtgatctcagcacgttagggaggctgaggtggaggatagtctgagcccagagagttccagactagcctggacaaaatagtgagaacacatttctgcacacacaacacaaaagaaaaacat

SEQ ID NO: 3427 - DNA, 547 bp, Homo sapiens
tttttttttttttttgaaagaataggtttaatttattagttgctctttagcaaaggctatatagaacattattggggtgaaaattaaattctagttacagattcatgaaacttgaagccaaattagttttatgagactatcaactcccctttcatcctcctacacagcaaggtacctcatagtctatataattctttgccgtttttaaatgatttaagcagacataatacataatgcagttgatattaaatatcttgaggaatgtcaatagaactactttcactcttaggcattaactgatcacttataaatgttctgtttatccacttttcattttagattttctccttaaaaggactttatgtgtgaactagtcatcattatctgctattcgtttgtatacatgcatcgtaagtcttccaaaataacatttaaagtctttcttaatattgctttaaaacatgttacacctttaaggaacattgccattttaaaaaacttacagattcagggcacctggactccagggaaaggaacattggttcca

SEQ ID NO: 3428 - DNA, 278 bp, Homo sapiens
ttttttttttttttttcagattgtcaaaagcaatttaatttttggaggaaaaactgcatacgcagtacaacttatatctcaggcgaaatgtctcagaatcttcctgctcattggacagaaactcagcttcaccacattgccagccgggagaccatggaagggaactggcgccactgcccccagctgcccttcccaggggacaacttcaccaagatgtggaaatcctgggcccaccccacagtcagtcatcgctaccataagcattcctggcaccacca

SEQ ID NO: 3429 - DNA, 278 bp, Homo sapiens; identical to SEQ ID NO: 3428

SEQ ID NO: 3430 - DNA, 663 bp, Homo sapiens
tggagcaacatgcatttccagtctcagtggattcacctgccagtgtccagaaggatacttcggatctgcttgtgaagaaaaggtggacccctgcgcctcgtctccgtgccagaacaacggcacctgctatgtggacggggtacactttacctgcaactgcagcccgggcttcacagggccgacctgtgcccagcttattgacttctgtgccctcagcccctgtgctcatggcacgtgccgcagcgtgggcaccagctacaaatgcctctgtgatccaggttaccatggcctctactgtgaggaggaatataatgagtgcctctccgctccatgcctgaatgcagccacctgcagggacctcgttaatggctatgagtgtgtgtgcctggcagaatacaaaggaacacactgtgaattgtacaaggatccctgcgctaacgtcagctgtctgaacggagccacctgtgacagcgacggcctgaatggcacgtgcatctgtgcacccgggtttacaggtgaagagtgcgacattgacataaatgaatgtgacagtaacccctgccaccatggtgggagctgcctgaccagccaaatggttataactgcactgccgcatggttgggtggagcaactgtgagatccactccaaagggaaggtccggg

SEQ ID NO: 3431 - DNA, 510 bp, Homo sapiens
tttttttttttttttttttttttttttttagccaaaatgcaagaggtttttattggcacatgtggtgcccttgggtggcattgattaccatcgggtttctaaaggattatttgacagggcttagcacaatcagctcatgaactgccctcctctgctccacctctcccttttgcatcttgttggtacagcttcctgagaaacgctggttgtctgctgccaattcagctcatccagttgcagagggaacaagctggccctttgccccgcggtgcagaccttcaaatacaggtttccacccggatggcttgtacttggccttcagcacctccagtggtggcggtgggatggtggcacaggagtgcggagctctggctgcccaaaaccttgcagtaccaatcttagcagacagttggtccggatttcggcaggatctgacgaaacatacaggcatttcagcccagtgtcgacagattccccgggcaatttcccggacccgggtacccagaccct

SEQ ID NO: 3432 - DNA, 639 bp, Homo sapiens
tttttttttttttttgacagaccaatggtttattccaaaggggaaagcccaagctggatgtctccctcctaaaaggactctctgcttccatccttgtgccctccagtttgttctcaatgcagcggctgaacgatcctattaaaatgtaattcagatcatatcactcctctgctcaaaatacgccagtagtttcccatctcactcagagcaaaagccaattgccatgacctttaagatctcagtgacttcattttactggcttccttggtgaccctctctttcatgcacattctgtcccagggatatcagacctcagggccattgcacttgtgtctcctgcctggaatgcatgctccttcacctccttcaagtttttgtttaaatatcaccttcttatagaagatttccctgaccaccctatttaaaatttcagcattctccccttgacccctaattatctcttgactgctttatcttttctcttagggcaaggatttttgtctgttttgtccatccccagtgtctaggatatgcttagcaatgaggatgctgaatgaatgagattagtaatattggaaggcagagggatcattgatggatccaagttcagaggacggtggaatccaggcaacatgagcc

SEQ ID NO: 3433 - DNA, 700 bp, Homo sapiens
ttttttttttttccacaggagccatcttaatggatgtgaggtgatctcttaatatagttttgattttaatttctcaaatgattagtgatattgaatgtcttttcatatgtttgctggacatttgtttatgttttatgaagaagtatctattcaagtcatttgaccagttttaaatcaagttatttgttctttcatttgtttgttttctgctgccctataggaatttgtgatatattgtggattctaattccttatgagatatgtgatttccaaacattttctcccactttgtaggttgtcatttcactctgtggattatgctcttcgatgcacagaagttttaaacttttaatgtagtccattttgcctatatgggtggtattggtaccacttcctttttttatatcttgcaatgagtaaacaacctccacacacacacacacacacacacacacacacacactcactctcttaaaaaaatattttggtggccaggcacggtggctcacacctgtaatcccagcactttgggatgctgaggctggtggatcatgaggtcaggggttcgagaccagcctggacaacatggtgaaaccccgatctttactaaaaacacaagaaattagctgggcgtagtggtgggcgcctgttatcccagctactcaggaggctgaggcaggaaaatcgctgatccatgaag

SEQ ID NO: 3434 - DNA, 704 bp, Homo sapiens
tttttttttttttttggtttagcaagaatatccaaattttttaaggtaaactttgcaagactttttttaaaaggagtacatatagccattgtcttctctgagtttctgtaaagaaaggaaaaagaggagtgattgagattgtcagagctgtattagcaagtggcagggcccagaccacttgggagaatgtcctgagagtcaaatgctcaggctttgaacggggtacatacaacttgcgtcatttctgggaaccacagacatcttgaagagcaatgaatttaatttgaaaggacagtggaggagagaggaagtactccggctctgtgagtcatcagaataataaggcagtggctgccactttcaggtctgttgcctgtggaaagatgtagatagggccttaaagtcccagcttcctctcacactatacattcaggtggcttcagttttatacacgctcttcctgcagaaaggtatctcaagtaccttcaaaacaacgctggctctctcagttacagtataaactttaactcatgatcccatcctgcatttccactgaggaagtatttggcaaggaaagtagcaatgttaataatttccacaccctgagagtcgaccaagcatgatctctcatccttgcaataatgctgtaaggccagaaacatgggaactgcaaccaactattctagagctgaaaaacagcccaa

SEQ ID NO: 3435 - DNA, 524 bp, Homo sapiens
catacacatttgagactattagccataggcaatgggtcttgcacgatgccctgaagaataacatactgacatgttccagaagggctgcgcgcccagcagaaaatgcacacgactttcaaagtctttgaagagtagccagattccctgggacattgctgctacctaggttaggcactttgtgaatctcatcctcaggagaaaaaatagtatccttaaataacaaaactactataacacaggacagataaatgagtgtcttctctctagatctccatttcttgaggaagtgggacgaagatctgatggtctgtaaattaccattttcagttctgacattcctccaatctttggaacgataagttgccctttaaatggttcccaatacaatattaactttaaaccatggcatgaatacatgtagatacctaaccaaactctatgtagctctataaaagtctctttcaagatctaccacttaaacatgaatccaacctttaacttgatggatatatatcaagaatata

SEQ ID NO: 3436 - DNA, 675 bp, Homo sapiens
  misc_feature (62)..(62): n is a, c, g, or t
cttctactggcaggaaatctacgtattagtcatcgctattaccatggtgatgcggtttggcnagtacatcaatgggcgtggatagcggtttgactcacggggatttccaagtctccaccccattgacgtcaatgggagtttgttttggcaccaaaatcaacgggactttccaaaatgtcgtaacaactccgccccattgacgcaaatgggcggtaggcgtgtacggtgggaggtctatataagcagagctcgtttagtgaaccgtcagatcgcctggagacgccatccacgctgttttgacctccatagaagacaccgggaccgatccagcctccggactctagcctaggccgcgggacggataacaatttcacacaggaaacagctatgaccattaggcctatttaggtgacactatagaacaagtttgtacaaaaaagcaggctggtaccggtccggaattcccgggataaaagaaattttgcctgccattttcagaatcatcttttgaagctttctgttgatgttaactgagctactagagatattcttatttcactaaatgtaaaatttggagtaaatatatatgtcaatatttagtaaagcttttcttttttaatttccaggaaaaaataaaaagagtatgagtcttctgtaaaaaaaaaaaaaaaaaaa

SEQ ID NO: 3437 - DNA, 721 bp, Homo sapiens
acgtcaatggattttgttgggcaccgaaatcacgggactttccaaatgtcgtaacaactccgccccattgacgcaaatggcggtaggcgtgtacggtgggaggtctatataagcagagctcgtttagtgaaccgtcagatcgcctggagacgccatccacgctgttttgacctccatagaagacaccgggaccgatccagcctccggactctagcctaggccgcgggacggataacaatttcacacaggaaacagctatgaccattaggcctatttaggtgacactatagaacaagtttgtacaaaaaagcaggctggtaccggtccggaattcccgggataaaaaaaaaaaaagggcggtttagccatttacctacggagggttgggtagacatctaaatgactaaattggccggttgccgtggctcacgcctgtaatcccagcactttgggaggccgaagcgggcggatcatctaaggtcaggagttcaagactagcctggccaacgtggtgacaccccatctctactaaaaatacaaaaattagccaggtgtagtggtgcgtgcctgtaaacccagctgctcaggacaccgaggcaggagaatcacttgaatccgggtggcagaggctacagtgagtcaaaatcctgccactgcactccaaactgggctacagagcaagactccatctcaaaaaaaacaaaacaaaaaaaaaaaaaaa

SEQ ID NO: 3438 - DNA, 640 bp, Homo sapiens
  misc_feature (632)..(632): n is a, c, g, or t
ttttttttttttttttttttcttttcttttcttttcttttttttttttttttttttttttttttttgagacaggcctcgcggggctcacggcctcgcctcggtatcgcagcgggtcctctctatctagctccagcctctcgcctgcgccccactccccgcgtcccgcgtcctagccgaccatggccgggcccctgcgcgccccgctgctcctgctggccatcctggccgtggccctggccgtgagccccgcggccggctccagtcccggcaagccgccgcgcctggtgggaggccccatggacgccagcgtggaggaggagggtgtgcggcgtgcactggactttgccgtcggcgagtacaacaaagccagcaacgacatgtaccacagccgcgcgctgcaggtggtgcgcgcccgcaagcagatcgtagctggggtgaactacttcttggacgtggagctgggccgaaccacgtgtaccaagacccagcccaacttggacaactgccccttccatgaccagccacatctgaaaaggaaagcattctgctctttccagatctacgctgtgccttggcagggcacaatgaccttgtcgaaatccacctgtcaggaccctaggggtctgtaccngggctggc

SEQ ID NO: 3439 - DNA, 715 bp, Homo sapiens
tgccaagtaacgcccccttttgacggtcaatgcggtaaatggcccgcctggcattatgcccagtacatgaccttatgggactttcctacttggcagtacatctacgtattagtcatcgctattaaccatggtgatgcggttttgcagtacatcaatgggcgtggatagcggtttgactcacggggatttccaagtctccaccccattgacgtcaatgggagtttgttttggcaccaaaatcaacgggactttccaaaatgtcgtaacaactccgccccattgacgcaaatgggcggtaggcgtgtacggtgggaggtctatataagcagagctcgtttagtgaaccgtcagatcgcctggagacgccatccacgctgttttgacctccatagaagacaccgggaccgatccagcctccggactctagcctaggccgcgggacggataacaatttcacacaggaaacagctatgaccattaggcctatttaggtgacactatagaacaagtttgtacaaaaaagcaggctggtaccggtccggaattcccgggatcctggctgggccggccgggctcacatggtttgtacaataaatacatctgtggggcgggctctccgcagccgggaagggccaccgccacggttcagtccagcaaaaaaaaaaaaaagggcggccggccgcccttttttttttttggttctattttgttggtt

SEQ ID NO: 3440 - DNA, 174 bp, Homo sapiens
tttttttttttttttggattcactgctggtgagctagtgtgattttggggggctgttttgtcatattactagagttggttttctggttccttcttatttgggtaggctctgtcaaagggaaggtctagggctgaagactgttcagattcttttgtcacatggggtgttcacttg

SEQ ID NO: 3441 - DNA, 669 bp, Homo sapiens
aaccatgtcacacaagaaacagctatgaccattaggcctatttaggtgacactatagaacaagtttgtacaaaaagcaggctggtaccgtccggaattcccgggatctgtctcaaatatttcttattaaaagggcggccgcaggaagaagaactcagatagagtgagctactctgaagctgcaagcagtgaccatgcgcagggttctgatgtgtctctcatggcttgtaaagtgtgagacagctgccttgtgtgggactgagaggcaagatttgttcacgccttccctttgtgacttcaaaaaccctgactctctttctgcaaaggcacctgaatgtgcctgtgttcctgtaggcataatatgaggaggtggggagaccaacccacccccatgtccaccatgaccctcttccctcatgctgacctgtgttccgtctccaataattaatcattcctgctccatagacgtgaggctgagatgtctccatctctatctcaactttatgtgcactgagctgtaacttcttacttccctattaaaattagaatctgagtataaatttactttttcaaattcttgccatgagaggttgatgggttaattaaaggagaagattcctaaaatttgagagacaaaataaatggaagacatgagaaaaaaaaaaaaaaa

SEQ ID NO: 3442 - DNA, 452 bp, Homo sapiens
ttttttttttaaacgtcttttcatcccaagattagtcagttggattactctgccctaatgtctccagctctgggcagcaagtctaaccttccccacatggctttcctcttgccctaactactttctgccctcacctggatgcattaggtgcaattacttttgcaccagcctaatatcaatcccaacttcatcatctgggacctgaagccagacataatctttattcactgcaccagaccaaaagatatggattttgaagtcatcaaatcctgggttcaaagtccggttggctatacccagatgggtgatggatgggccaattactcaacctctctggtccttaatgtactcatctagtgaccatacagatacatattcctactttctccggcttcatttgcgagcacagatataggtatcaaataacgatagctagaccataatttaaacct

SEQ ID NO: 3443 - DNA, 722 bp, Homo sapiens
tcgctatacccatgtgatccgttttggcagacatcaatgggcgtggatacggtttgactccgggggatgtccaagtctccaccccattgacgtcaatgggagttttttttgcaccaaaatcaacggactttccaaaatgtcgtaacaactccgccccattgacgcaaatgggcggtaggcgtgtacggtgggaggtctatataagcagagctcgtttagtgaaccgtcagatcgcctggagacgccatccacgctgttttgacctccatagaagacaccgggaccgatccagcctccggactctagcctaggccgcgggacggataacaatttcacacaggaaacagctatgaccattaggcctatttaggtgacactatagaacaagtttgtacaaaaaagcaggctggtaccggtccggaattcccgggatggtttaatgtgtatgcctattttatttttgtcccctagattgagttttgaaggcaggaaccaagccctttatttatctggcagtctgagggtatggtaaatgattggagccatctggctgcagtggtcaagggagattgccttgggaagttgaacttgagctagaggccaagtgcactgaattttggtgtctttccatgtggttttggctgtggcagctgggccattacaacttcataatcacatgtcatattggttgaactcagtgaagtgttagcaaaaaaaaaaaa

SEQ ID NO: 3444 - DNA, 738 bp, Homo sapiens
  misc_feature (668)..(668): n is a, c, g, or t
tttttttttttttttctctgttagggaatttctaggttaattgtaacactctccttgggagacctactcatataaaaataaaggagtgtgatctctttttaaattctttctattctgccaatagttgagaagaaaagcttggtatggtggtcagtctcttctaagtatatactgtacacaatttagtttagtgttacagatatcaacaaatcaccacctgcagtagtcttaaatcacaatctacttattgatttctaaatgccacaaagtgttttaattttccccacactgttatttctaatgacatcaagatgattctccatgctttctcaaagccaaatgcaaagtgaaaacagacagccagagaaagatgctgtgcaagtaaaaactcacatttccttttctaaagttttggttttgtttgtttggaaaaggccatctctctaaagtttattctagctacttaaatcctatgatttttacctatattcctttttcaaagtaagtttagcagcacttgaggtgtaagacagctggtcaggatttcaagatttaaaaattactcattttaagagtgtcagaattgccatcctaactttcccatagcattgcaatatgtggatgaatatatactgattagatctgtgaggtcctggacagactctggnttataatataaaaacaggaaatcagaactgtcaggagctctgggatcattgagctaatctactctaataa

SEQ ID NO: 3445 - DNA, 548 bp, Homo sapiens
caatgttgtgggagaagttggccccagatttttccccaaatggtgaaattgataataaagagggtattatcccgataccccacaggtaaatcctgtgttaggaaactgctagtaagaaacaagagaggcagctcataagagtctcaatggagttttctatttttaaatttttttggactaaagttttactacttaaaattttttactttaaaattttccaaacatatgttgaagtagaaagaatagttcaggcagggtgcagtggctcacacctgtaatcccaacattttgggatgccaaggtgggaagatcacaaggtcaggagtttgagaccagcctggccaacatggtgaaacaccatctctactaaaaatacaaaaattagctgggcgtggtggcaggcacctgtaatcccagctactcgggaggctgaggcaggagaatcgtttgaaccctggaggcgaaggtagcagtaagccaagatcatgccattgcactccagcctgggcaacagggtgagattccatctcaagaaaaaaaaaaaaaaa

SEQ ID NO: 3446 - DNA, 717 bp, Homo sapiens
tgacgtcaaagacgggtaaaatgggcccgcctggcattatgcccagtacatgaccttatgggactgtcctacttggcagtacatctacgtattagtcatcgctattaccatggtgatgcggttttggcagtacatcaatgggcgtggatagcggtttgactcacggggatttccaagtctccaccccattgacgtcaatgggagtttgttttggcaccaaaatcaacgggactttccaaaatgtcgtaacaactccgccccattgacgcaaatgggcggtaggcgtgtacggtgggaggtctatataagcagagctcgtttagtgaaccgtcagatcgcctggagacgccatccacgctgttttgacctccatagaagacaccgggaccgatccagcctccggactctagcctaggccgcgggacggataacaatttcacacaggaaacagctatgaccattaggcctatttaggtgacactatagaacaagtttgtacaaaaaagcaggctggtaccggtccggaattcccgggataaaaaaaagagtcagaggccctagggagcagttacaagggcctgcatcatctttggcagacagagaattggagtgaagaaaacgttaggaaaggaagaaaccattgagaagatgcaggaataaagtaatctatatacaagctttgattaaaacttgaaacaaagaaaaaaaaaaaaaaaa

SEQ ID NO: 3447 - DNA, 772 bp, Homo sapiens
tttttttttttttttattattactattattattttattttattttattttgagacagagtttcactcttgttgcctaggctggagtgcactggcacgatctcagctcaccacaacctccgcctcccgggttcaagcaattctcctgcctcagcctcccaagtagctgggactacaggcatgtgccaccatgcccagctaatttttttgaatttttaccagagatggagtttctccacgttggtcagcctggtcttgaattcccaacctcaggtgatctaccggcctcggcttcccaaagtgctgggattacaggcgtgagccacagcgcggggccaagatgcttatttatttatttttttgagacagagtcttgctctgtcgccagtctggagtgcagtggtgcaatttcagctcattgcaacctctacctcccgggttcaagcaattctcctgcctcggcctcccgagtagctgggactataggtgcgtgccaccacgcccagctaatttttgtctttttagtagagttggggtttcatcatgttggtcaggatggtctcgatctcttgacctcgtgatccgcccgcctcggcctcccgatgtgctgggattacagatgcgagccacaacccggcaagatgctacttttaaaagtaaactctacaccttccattgacctcaagcacctcttggccacagtgccaggacaagcaccaggacttacagaaaaaccctcaaaggtgcgtatgaaagcacaagagtcccttatca

SEQ ID NO: 3448 - DNA, 712 bp, Homo sapiens
tttttttttttttttgatttgtcactagaatttatttataaagggaagacggtgaaaaattcatgattgaaaaaagtttaataaaattaaaaggtacaggtgatactgcattttttggctctgtttcactaggcaatgtgtaagttgagggttacatgtagaaaagttgtatatgaagtagaaaagatgcagctatcctcactttttaaaaataggccaaagactttaaaactggtcaatatcacaagtgatgaaggaaaattacattggctggacatccttttacatttctgaagtgcaacatttaaaattaaagttttagtgaacactgaatatgcagcatgaagatgcaatcacatatttgggctcaacatttcaaaatcagaagtatatttcagtaatacggttgaactttaattgaatagtaattggtaacttgtaggttttatggtacagattatgttttaaggctatcttgtaaatattttgttactattttaacattttctatttttactctttagttctgtgaggagtatactttaagacaattgttcagtggtttaatacaagccctagaaaaaaccaataaatgcttatcaccttgaaattactgattagaggagaaactaacggtggtggtttccactccttgcgaatgcttatatttcttacatagctatttttatgccacaaatgtcaggaagccacg

SEQ ID NO: 3449 - DNA, 308 bp, Homo sapiens
tttttttttttttttaatcagaatgctgtttattgacaagatagggtgtcacaaatacatcatttatagggagagaggggacatgaacaagtccaaaatcttatactctgcacagcagcccagcagggatgtcctctctagagatggtttatcaagggtaccccatgagagggcagctcctgatgcagctgccggaagagcatcgcacaccggttcctctcctgggtcttccccaggggtatggtagagtctggcctggaagtaaacgacgtccctgatgccgctctttgcagtcaacctttgcaaaa

SEQ ID NO: 3450 - DNA, 690 bp, Homo sapiens
agaatataaatatttacaagcaaaagtaggtgttacttaatattgttgcatagataaatgtttaaaactttttaaacatgtgttaaatatatccaatggtatatcccttgttctctccatgactaaatttgatcaagtccagtatcaccttcatcgcctggtgaccgagaagattttaacctatatcctcaacctcttttaatgaaaacatcatgtaaccccaaattcctatcttttttcaacatagataactgtgtcagcatgatattcctaaagctcagttagagatctgtgaaaaaacaattcttagcagtctgttctacagaattcaaactgaaaaaagagaaaaaacctaggtctggagccagccaaaccaatgagatacctgccaaaccacaccttatcctctttaatcagcaaaaatatcatccaccgcctgactccccttccctcaccaataggcgcttgttcattcccttattaggacactggcagtggccaaaaggattgctcgtgtctgagggcccaccagtggctcccacaacatgtgcagttcatcaaaaatgaaaaggcggtgggggactggaaaaaatgaaatcctcactgtagggaggagaatccatttggggtaggccacaatatggttttgaaaaccatttttttaacgtccaaaccaaaaaaacaatctaa

SEQ ID NO: 3451 - DNA, 740 bp, Homo sapiens
  misc_feature (455)..(455): n is a, c, g, or t
tttttttttttttttacttcttttctctttattccctttcatagcttctgccgggatccaggcagagagagcactaatgggggaaagggagcgagcgcttcccgctttccccagcgtgggccctcggagttgggtgtgggggcagcagggccagaggaaaggcacaggtggcgatttgccccagccctcccccctaagatgcagaccctcagaacacgtcgcggaaggtgagctccctgctccgagaggcagactcgggtgtaacgcaaagacggttcctttcatcaataaggtccccactgcctcacagcccctaaggccacccgctggttctggcattctagacgggggtgcccttggcccttcctttgtcttcctgttttgcagggtaatcccaggttccatgcgtatcctctgcacattcagcatgggctcctcggttgcttgtgttctcncattttttctggtcgttctggcggattattcattgggccccggggggaggagggcggggttacgggccgggagggccagggcggtcttcccggcgcccggcggttggaccggcgggtgaaggcctccttccttcgtgctggggccccaggccgcccagtcatggtccatgacgtgtcgatctcccgcgcctcgcttctcagtcttccctttgaaggtccgggatgccccaggcttcccgtggtcccaagttctgcgcccgagtagtcgggcgcacccgcgttgag

SEQ ID NO: 3452 - DNA, 740 bp, Homo sapiens; identical to SEQ ID NO: 3451
  misc_feature (455)..(455): n is a, c, g, or t

SEQ ID NO: 3453 - DNA, 700 bp, Homo sapiens
  misc_feature (643)..(643): n is a, c, g, or t
ttttttttttttttttttttttttttcagacagtgtctcactctgtcacccatactggagtatggtggcacaatctcagcctgggtgacatagtgagactctgacacacacacacacacaccccaaaacttcaactccagggaggacaggaagacaaactatgatactggactgaaaaaaacctggattctaatctgggttccaactagtaatggtgtagtcttaagtaacttgcttattttctctgcgccttcaatgaggttttctacctctattcatctcatactgtggggacagacgaaagaaggaagaaaggatagaaggagggagggagggaaaagaaacctatttaaagccccctttgagaactttaaagcgtctaagagaagcagagtattataatcagaaatcaaatctgggtatcacttttttctccttagttttatcatgttagctacactaattaaaaagggcggagcctgctcagaaaagacagatatgacaaagtaagatttggaaataagtaggttgaaaaggaaccaagatcttaatgaggaagtggccacagtcccgcttaccccctcttgtttctctgtactgacacgtggctttacctctagaggctttgcttcctacagagctngttaagaacatagagttgaatgacttatccccaaagagtttcttagagctaagtcag

SEQ ID NO: 3454 - DNA, 742 bp, Homo sapiens
tttttttttttttgtgtgttttcttcctagtgctctttcaaagttgcttgttcttgaagaacttgtttaaaacataagatctttgccaaatctaccttgcaaaaataactgataattgagataaatgtttctctcaataatacaaactttcaaattatgaaaagagaattattaactacctacatatatgatatatctgtgtagctcaaacaatttttgttttattttgaaagattaatctcgtgatggtaaaatcatctatattttgcttttatgaatattgtcagctggtggtgaaggagcttaggtattttgtgttaccagctaaataattctgaatgctcatggatttctataatattcggctaggtactgacattgtaaattccattttgcagatgtcttgctctaatgaaccagtgttcaaatttgtgaagaacagaagatcagtaaaatgccatatgcttcagttgctctaccaaatcaacaaatctcttaatttagaattatttatggtgtagacttttaatatttggaagtattttttaaactaatgacatgtgaattgaggataggttaaatagattagtttcatatatacagtgagatactatgcaatcattaaaaataataatacataagtaaaataattctttattgaggagacaatgactgctggtgtgtttcctaagtttgaatgaccaatggactacaagtgtcagagttgaactgcatgcttcaa

SEQ ID NO: 3455 - DNA, 669 bp, Homo sapiens
tttttttttttttttttttttttttttttttttttttttttttttttttttttttttggcccaagaaaaatagctttaatgtgagacagttgtatgatggtacagatagtgccagtatatgcaacgaagaaagttcaggtttcaccaaaattttgcaaaatttcggggtttaaaaatctgtttatcgcagaagtcacattgactgtctcacatttactcttcctcgtgtcctgatcctgctgacttgtccacatgggcaactacgaagctggcacaactatacttctttgttcacttgggtcaccaccatttgttctgctgtggggctgcccatgtgtaggcaggtttcacgaaaatatcaggttccctaagcaacatgaactgggaggctcagagagggatttccctagtcactgacttactgagggattgactcaagattcccaggcactagacagaagcagtcgggaaaggaatcatttcctgatgtgcctgtgcgggaaaaagaaacttttttggatagaacagtctggatggactctaacacagtaaaaagtgaaggcagtgcattcttcagaagggcggcagatggggcaccacgcatccccacagaggggctgtcctgcggtccttgcaggagttgccaggctcccaaaatctcctcctagt

SEQ ID NO: 3456 - DNA, 680 bp, Homo sapiens
tttttttttttttttttttttttttttttttttttttttggtgtggaaagccggcgtggtgcgtttagcttgagcaggggcgccttggaggtctgtttccaaggctgtgggcctggcgccctcacgacattgtacctatcccgaaggaaacggggctcagtcacccaaagagcccacgaaaaaggccgagcaggagaggggaaaacacacacacacaacagagaaccattgcatttattggacattgaaacgggagcagagagggaaaggaagtgtgtggggaggcggttggtagggtaaagccagacagctttggagagagctgctaaaatcgggaatattttgtcgattcacactcgactgggccacatgactcgggcaacttttcttcatctctgctcacaaactaggctgagccttctctttctctgctttgcggaaaaattcgtaactttgaggcctgcgcgctctctcggcagtaatttcacaggctttggcggaggaacgtaggatccgttagcataagatgggccgcctgcagcttgcctggaaccggcgcgatctgaacgccggctgggaggctcctgcggggaaccttgcggtcgtctgccctccgactcctccgggaaccgcagccggccctggttcgctgcgcgccggggctgagaccccgggagccg

SEQ ID NO: 3457 - DNA, 717 bp, Homo sapiens
tttttttttttttccccaactataattgaaaaaatgaatgcccaagttctaccacagatattaaaaggaaaatggctgggtttttttacgtgggtgtcctaggcttgaggttcgaataaccactatgtaaagggccatgtccagagaggagattggaaacagcgataactgagttttgtctccatggtcacttagacacacttgagaaaactatttcactttaccccagagattatgaaaaatagcttttttagccttccattatgtgtacgttgtatgaatgagttcaagatagggtactcgaacgcctgtaatcccagcactttgggaggccaagatgggcagatcacaaggttaggagatcaagaccatcctggctaacatggtgaaaccctgtctctactaacaatacaaaaaattagccgggcatggtggtgggcgcctgtagtcccagctactcgggaggctgaggcaggagaatggcgtgaacctgggagccggagcttgcagtgagccgagatctcgccactgcactccagcctgggggacagagcaagactccgtctcaaaacaaaaacaaaaacaaaaaacaaaacaaaaaaaaaacgggttacttgaaagtaaacatgctattctgagggttactgagataatctcgaacttgcactatgtgatgtcccttcatgaggaaagcttttgtatccaaaactctgggcc

SEQ ID NO: 3458 - DNA, 562 bp, Homo sapiens
tttttttttttttttatttaattgacaagtaaaaatgtatatattatggtatacaaatacagcttgatgttttaatttatgtatacattgtggaattattaagtcaagctatttgacttaattgccccatatacttgtcattttttgggggtgataaagacacttaacatctactgtcttagcaattttcgatacacgatatattgttattaactatagatagcatgctgtacaatgggagctcttaaacttattcctcctgggccaggcgcagtgtctcacgcctataatcccagcacattgggaggccaaggtgggcggatcacttgaggtcaggaatgcaagagcagcctcaccaacatggtgaaaccccatctctactgaaaatgcaaaaattagccaggcttagtggtgggcgcttgtaatctcagctactatgggaggctgaggcagaagctagaaccagggaggtggaggtgcagaggagctgagatgatgccactggcactgccagcctgagtgacagagcgagactctgtctcaaaaaataaagacggaacag

SEQ ID NO: 3459 - DNA, 764 bp, Homo sapiens
tttttttttttttttttttttgtgtactagatgctatttattaaactgtagacaggagataaatactttatttcaaaagtgcaaagaagggaagacaaatcacatttctttttatcatgtaaacttgtaccaaagacttatgaatagatttatgaattggagtagaaaacatagacatttctaccttgaggatatagaagggaacttaggaagtgagaagtcagattaccctagtcctctagggtgcttaaagctaactagtcccgtgaatgagaatctaacctatgtgaaaatctccagcctgtacctgtacagcatcagccctgggacaacacagtcaggggcaggctgtagtcacatctcttagcctaagagtacacagctgtcagggaaagtcctgatggccacagtgaaaaaggtcatgggtggagagaagcaaagtaggaaggatcatttgaagcacaaacaaatggggaaactgaacagacaatctcagtatcaccacatctgtttcaaaaatagcacaccaactcccttccaaagtgcatcgttacactgcaccatcgtggaagaaatggaagagcaggatggatttggctggctggagtcacactcttggggaagctggccaggttggcaaatgccacaggcgtcgtcttatttcgagccatgagatatatcgtttgtttcccagtttctcccagctgtttaattatcaagggcttgttcccttctggattcatatccactggcaaacgctggtc

SEQ ID NO: 3460 - DNA, 764 bp, Homo sapiens; identical to SEQ ID NO: 3459

SEQ ID NO: 3461 - DNA, 682 bp, Homo sapiens
  misc_feature (424)..(424): n is a, c, g, or t
gccgccgacgacccagcagccgccatggctctgctccgaggtgtgtttgtagttgctgctaagcgaacgccctttggagcttacggaggccttctgaaagacttcactgctactgacttgtctgaatttgctgccaaggctgccttgtctgctggcaaagtctcacctgaaacagttgacagtgtgattatgggcaatgtcctgcagagttcttcagatactatatatttggcaaggcatgttggtttgcgtgtgggaatcccaaaggagaccccagctctcacgattaataggctctgtggttctggttttcagtccattgtgaatggatgtcaggaaattgtgttaaagaagctgaagttgttttatgtggaggaaccgaaagcatgagccaagctccctactgtgtcagaaatgtgcgttntggaaccaagcttggatcagatatcaagctggaagattctttatgggtatcattaacagatcagcatgtccagctccccatggcaatgactgcagagaatcttgctgtaaaacacaaaataagcagagaagaatgtgacaaatatgccctgcagtcacagcagagatggaaagctgctaatgatgctggctactttaattgatgaaatggccaccattgaagtgaagaccagaagggaaccggacatgccgtgacgag

SEQ ID NO: 3462 - DNA, 717 bp, Homo sapiens
tttttttttttttgtgtttgtttgagacagagtctcactcactctgtcacccaagctggagtgcagtggctcaattatggctcactgcaacctccaggttcaagcaattctcctgcctcagcctcccaagtagctgggactacaggtgcacaccactatgcctggctaattttttgtagtttttggtagagatggggtttctccatgttggccaggctggactcaatctcttgaccttgtgatcagcctgcctcagcctccaaaagtgctaggattacaggcacgagccactgtgcccagcctctgccagtttttaaaactgatcacctcccctttccctcactcaaatatttaattaaaactgccaacaaaatagacaaatgtctagaatttaatgttgcttccttccctgacggctttggggtggcgctaatgccagacacgagagttgccacagtccacatcccagcagcagcaaaatgagccacgtcagggagaggaggggccagcggcgagagccctgtggaccacagcacagcacccgagcctgctcttggcaaccccagcaaggccctctgacagcccgagctgtgtcatgctcagggcagggcgagtgggagtcactggctcggaccagaatccacgcaccgagggagctgtgctcacactcggaaagacagatccgggaatcggacggtacaggcggttttgtacaaa

SEQ ID NO: 3463 - DNA, 83 bp, Homo sapiens
ctcactggattccacacaggacagatggatctccattaggtaataaccttccaggatggtgctgacactgcacatatgtgaat

SEQ ID NO: 3464 - DNA, 83 bp, Homo sapiens; identical to SEQ ID NO: 3463

SEQ ID NO: 3465 - DNA, 734 bp, Homo sapiens
tttttttttttttttttttttgcataaaacaagtttaatttccaaccagggtcacagtcatcgcgttatcccacattttgagcaaggatagagaaggtgagttattaaacatatacagtctacattccagaggaggaactgcagttaccactataacaccacagacaaacttggggtggggggagcgggagtcctcaggaagcagaaagctggaatcagggaaagcataaaattaaacctaccagagaggagaggagagggagtgggcagaaatggaatgaaacacccaatcccaaaagagctgttaagtgaatgggaatgtagaaaggaccacccctgccaagggcttagcagccagggatactaccaagatcacttactgccccctgctggacagatctggggcagcaccaaggcaacctcctaacatttccagccccagatggtccctggagcccccaaaaaaacaaggtgaggggtgaggcctgaagtgaggaaaacctatttaggactgacatctaactagagaaagtcagggaatgaggcaggagaagaggcaaagtcctcatgaaccacaaagatagagtggaaaatcctaagtaggaaacaaactacatggacaagggcaaatgagcaacagcagtgaatgagtcgagcatcgaccaggacagagtccacggaaagagaggcaatggggcagacaaatacatctgaggaacgagcaataacagttt

SEQ ID NO: 3466 - DNA, 734 bp, Homo sapiens; identical to SEQ ID NO: 3465

SEQ ID NO: 3467 - DNA, 719 bp, Homo sapiens
ttttttttttttttttttttttttttttttattggtgtaccaatgaaaaataaacaaaattttaaaaataaaaatacagtatgtctacacaatgaaatattattcagcattaatacactgcaagttggataaaccttgaaaacatgctacatgaaagaaacaatgcataaaagatcacaaattgggctgcacgtggtggctcacgcctgtaatcccagcactttgggaaaccgaggcaggtgcatcacttgagctcaggagttccagaccagcctgggcaacatgacgaaacccgtctctacaaaaaaaattaagcaggcttgttggcacgcgcctgtggtcccagttactgactactcacaaggctgatacaggataaagatatcagggcagtttcatggctgggatcaactcttctggaagcaggtcctagcaggactgggtgtccacatccaggatatgggccctgcagagagcttagaatacttacctctcaatctgtgtggagaagtaggggctggtgccttgaggacttactgtccttctgaccagtcctgatgtttccaaggcactgggattccaaggtctggataagactcttctaaggccacagtgtggcacactgcagtgcggcaactgcaataagtcgcagccaaatcctcaattctggcaccatctaaacgtgtctccttgggcaggtgcgtggtcatgactgtatc

SEQ ID NO: 3468 - DNA, 718 bp, Homo sapiens
tttttttttttttttttttttttttttttaatctccattcatgtgtttattaagaatcgatatggtttctggcactgctaaaggtgccatgatgagttattttaaaaacatatacaatctggttcttgtatttaaggaattttcagtataactaaagacacatggtaactatgtaaggactgactttaaaatatccataaatcaaagacttcccggatgaagctctgattacacccagccaccccggactcctggctgttccagcagtctcgcccagcacctacatccctgccgctctctgctttgattcaccccacaaacgccagtttcccatacccacatctagacctctgcccatcagagagccctccactgggtaaaatattaatagcacccctgctgccggtctctgtctccttacctgctgcattctagtttcatgatgcttctttaacagaacagtgattctcagactttagcaggagacgtgttaaagcgcaggtttctagccctacctcctgagtttctgattcagtaggtctagggtgggacctcataattgcatttctcacaatttcccaggtgacatggatgctgcaggtcaggggaccactgatgagggtgagacatgccctcagcaaagaatgaaaggttatttcagtgaccaccatcaccactaagggctgtgaatcagtcccagtggacgatacgaacgtgt

SEQ ID NO: 3469 - DNA, 641 bp, Homo sapiens
ttttttttttttttttttttttttgaaaaaaggtaaacctttattggaaaaagagtttaaataacaatttaaaaccccatttcactttcaaaacagaaacaagaaagcaaggaaaagataatctatcaagcatctgccctctgctgtggttagccattttaaagctgcatttcccagcagaagagaacagtgatgggccctagtcctaggaacccacagggcactgtcttgagacccttttaggcagtgtccagggaacagacagacagaatgaatggtggggtgtagacagacactggggctcagacaggcacatgcccagtacccaggaaacaaagtttgaaaatatatacacatagaaaaataaattccctagaacctaggcatggaaagcttctaaccatgaatgcagcagcacaatgcaaactgggtcttggcttacaaaaaaaggaaagaaccttaacccctggcttactgtcccgaactcaagtctcttgaccactgtcttcagtcccacttaggaggtcgagtgaggcaagagcaagtcaatctaccaaggccagcagacactctgacttagggagatgtgtggaggggctggccaggatctcccaaggccaaaccccagcaacgaaagataa

SEQ ID NO: 3470 - DNA, 641 bp, Homo sapiens; identical to SEQ ID NO: 3469

SEQ ID NO: 3471 - DNA, 706 bp, Homo sapiens
  misc_feature (658)..(658): n is a, c, g, or t
ttttttttttttttttttctttaaaagcaatttatttctgattacaaaatacaggtgaggagcatgggcgatgcctgtaaccccttggttgtgcatcttcccagtctatttctgcttctagaaataccctgtgtacaacagcaagctcatgctgtccccaagtgcttgcacattctaacagctgcagagtatatgaccaggtggaaagtccaacagatgccccactcacaagatagggccctccaatcagtcttctggctccctttcactcatagtaactggttgctcttcctattggtcatagataaatgacacctgcacaattctccgagtgctttcaagcaacttcgggaggcagtgactaagaccctttccttgctcccagcttcctatgtcccagggctgcctgtggcacctggactgctgctgcccctgggtcccgtacattccagggcaacaatggaggaagggcaggcaacgcatgaggaattaacagtctttattgggctcagaccaggagtccgtgggtcttgaggacctctgtgtatttgtcaattttcttctccacgttcttctcggcctgtttccgtagcctcatgagctgtttcttcttccggtagtggatcttggcttttctctttcctcttctcctccaggntggctgtcactgctggtacttcagccacctcgtgagcaggcgcccaaa

SEQ ID NO: 3472 - DNA, 706 bp, Homo sapiens; identical to SEQ ID NO: 3471
  misc_feature (658)..(658): n is a, c, g, or t

SEQ ID NO: 3473 - DNA, 671 bp, Homo sapiens
tttttttttttttttccaatggcatctgcttttgtttgcttctctccatccctaacttaaatccaatttactgacaccattggctgaacagctgcaggatgcctttgccctctctgctttgttcttaggattgctctttcttctctgctgcaatccccagaccttactgggatgactccaaccctccagcactcaggtcctacttcttatattgccccaaagctgattaatggtggtttcttcttctggattggcaactgtggtttagtatgaatggaactacttaataataacagtggtggtagtagtaatatttattgaacatttgctatgtgccagatactctgctaaacaactatcatatagattgtcataattcactttcatagcactcctatgagagctagtgagtgaaagatctcaaattcaaacccacacccatctgattacaggataaagcagcagctgcttagcagggcttgtgaagaaaaaaggtgagaaattctatctctgttcctctacctgattacaggttcccctccctgtcttctcacctcaccacctgcctccctgatggaccactgattgaaaggactgttaatgagattttgctctctctcctctgcatcttacttttcacagccaagcaggcagtggtacttccctgcatt

SEQ ID NO: 3474 - DNA, 663 bp, Homo sapiens
gattctagctaggcgtcggacggataacaattcacacaggaacagctatgaccattaggcctatttaggtgacactatagaacaagttgtactaaaaagcaggctggtaccggtccggaattcccgggatgccgccctttttttttttttttcacatgaagtttttagtttattaatgttcttgcgaaaaatccacagtggccacagctaacatcattgcagcacctttactccttcggctgtgatccaatctccagctcactttttgccagcaccaacattggcctttgcagtccccctgactttcttcattctgttcttgcgttcctttcgttgctttcttgaggtctttttcttctcatacaggccatgtcttgcaagtctatgtttgggttcatttttctttgcataatccagggaatcataaatcatgccaaagccagttgtcttgccaccaccataatgagttctgaatccaaatacaaagatgacatccggtgtggtcttgtacattttggctagtttttcccgaatttctgtcttaggcactgtcgccttcccggggtgaaggacatcaatgaccatttgtttcctctgaagtagtcggttggtcatgaactttctagtgcggatagttacggtgtcgttcatgatggcgatcta

SEQ ID NO: 3475 - DNA, 427 bp, Homo sapiens
tttttttttttttttcagggtggctttgtctttattagtcagcatttgcatctaggaaaagtttcacatgattaaatcaagagatgcaatacactcaggcttttcatgaaattgacatcattattacaaatggtgctcatttgaggcaactgtgacattatgcaatgagaaacatctgtccccttccctctcaggtccccatggtggcctaggttcatgattacagccacctttaggattaaatacacaaaagccttactctatatatgcccctttgactttaacatatttctcaaaaagaagtgcaataaacttttattctttcttgattagatggagttacaattgccaaaataaaaatccaaggtccaattctggttttaaaactagaaaaggaaaaaatgttattatcagtaatgactttggg

SEQ ID NO: 3476 - DNA, 715 bp, Homo sapiens
  misc_feature (134)..(134): n is a, c, g, or t
  misc_feature (659)..(659): n is a, c, g, or t
gtatagctcagccccatcctggttgagaaatttcaaacataccaggaaagtaaaagatacaagagccttaacaaggttgtaaatatacatgaagtcatcctctgcctttcttctttccttgaggctatgatctntgctacacgggctacaatctgagtgtggagtgctaattgccaaattgactttactgagaaacaaaacagaagaaaatagaacttaattttcaaatgtcagttaaaaacccatattaagtgcaaacaatataaaagacaaagaaaacaaaaagggaacatcgaaccccactgaaacatacttggcagggaaaagcattgcctcaacttttccctgctcagattttaaggcctcttcaagaggactcttggatgactctgaaattaaggtacagaccaatttagccaatccaaggaaagcagagaataaacaattgaagtgagaaggtcccgaggtcctaagtatgtctggcgatctcttctaccactccttgactctttggagcacaccctgacagtgactcatttgcaactggtccatgtaggtaagccttacttttctaccctccaatccacacctggcagttcaacgcctggaatgtgagagtgtcacaggatgggcactccaggaattacgggatttactgngagggctctggggatgatacatgaagagagagacttccagtagcagatggccaggg

SEQ ID NO: 3477 - DNA, 669 bp, Homo sapiens
gagagacttctggcgtgaacacagaaggttttgactgtgacctgtcacatgaggtcaggtgtgaattttccacttgtgacgtcatgtcagtactccaaaagtttcaaaatttggagcatttccgattactttggaaaagtctagaaaaagtttgatatcagtgcactgaaatcattttcaagtaggaccatagcgatactagccctttactcatgccaaattcacagtttttatctaaacaacaccaaatcattcaatgcttttatatttaatcatctatattcacctaaccataaaaatcaatttcaataccgtaaggaaaagacaagaaaacgaatcattctaatcactgtattttgaaagttctttgcaaacaaccgtgaaatggttaaaagataggaggatggagaccagcctggccaacagggtgaaaccccatctcttctaaaaaataccaaaattagccgggtgggttggcgcatgcctgtaatcccgggtactcgggaggctgaggcaggagaattgcttgaacctgggaggcaggggttgcaatgagctgagatcatgccactgcactccagactgggcacagagcaggacgtctccaaaaaaaaaaaaaaaaaaaaaaaaaaaaaaaaaaaaaaaaaaaaaaaaaaaaaaaaaaaaaaa

SEQ ID NO: 3478 - DNA, 155 bp, Homo sapiens
atcaccacaggcggcacgatgaacgaggaccacatatgccaagcacggcacaaaaggaggccacgtcagtcacagacacagacaccacagcaaaggtggggaagcggagaccactggccttccgtgtgcaaaggattctgggaagatgggtggac

SEQ ID NO: 3479 - DNA, 720 bp, Homo sapiens
ttttttttttttttttgttaaggctagacaaatgaagcagtgggagtggagaaggaatacagaaatccataactggttgtgatcagttagttgtaaacagccgtgtgcagtggctcatgcctgtaatcccaacactttgggaggctgaggtcaggagttcgagaccatctggccaacatggtgaaaccccgtctctactaaaaatacaacaaattagctgggtgtggtggcaggtgcctgtaatcctagctactcgggaggccgaggcaggagaatggtgtgaacccaggaggcagaggttgcagtgagccgaaattgcaccactgcactccagcctgggggcagagtgagactgtttcacacacacacaaaaattagttgtaaacaccagcgcacttttgtttacaaataagcccacatcctcgagactaaaaccatcagaggagtagtccagggagacaagagagtcactgtgtgtccatgtgtgtgtttgggtggggagagagtgaccacggaaggtttcacagaataggaagaaaggataagtgggcctgcagtgaatacatagtcctattggcgatcactgtgtgccaggcactgttctaagcaccttagcatattttaagatcctctaaaaaaccagtgaggtagatagttatccccatttatgggcaagaagctgaggatatgagtaaatactgtcggcgcccttttttttca

SEQ ID NO: 3480 - DNA, 769 bp, Homo sapiens
tttttttttttttttttttttttttttagggatacctcctttatttcattttatttctgttttataatttatatatttcaatatcttattattggtaagaaaaacttaactttctcagtcctaaaattctttattatcaaatacatcagtttaataataatctctaaggaagaaaaaaacacatttaagatatccattgatttgaagataattattatggaactatggttcttatgtcaactcacaactcatttagatattaatacatgtatcatgaaatcatagctcagaattgctggtccagagtcactttagaatggctctgattcaaggaaattaaaagaaatgattgttaattttcttagtgctgggaaaggcagtgaaacaagcttttgaatcattatgtaattttcaaacaactaaaagggctatactgttcagttataatcttaaaaattctagctgagacagagcttttaaaaaatctttatagttttaccatacggcatcaattcaaaagattgtcatactgaaaccactgccataaaattttgtatgtaggccccagttgcagtagatctggctcctgtgagctataacttgcatggcttttcaatgtcttatgtagtgtctgttaatatatttaagataaatactctataaaccaaaaccaggcctggttttcttagaaggaaatgaatattattgaattccttgctgttgatacaggccatgggtcctgggatgtctagaacacttctgaactaat

SEQ ID NO: 3481 - DNA, 727 bp, Homo sapiens
  misc_feature (26)..(26): n is a, c, g, or t
ttttttttttttttttgttagttttngctttatttttgtaatcaaataacaatacaaaaacacacaaataccccgccagcatcaggtgcaccacaatcatgaaagataaaataacccccatgcaattaaatgaccatcagctacagaactttgcagcagctacaactgacccattctggcttcacattcctaatatgcatctctgcatattattcataaaatacattctgaatccaaaaattagatgaaatcatgggcaactcaggagtcctaatcttcctactcatctaccttttgcactagcaggaaaaaaatgggaggaagggaataggatatatctaataatttccaaagcatcattcccataggaatgagtagggaagatgggacctcagttatcagatccatataccaattatgtcaagaggcaaaagaaaactgtcagtaccaaagctaagaagtctcagtactccttaatgacaaactgtccttggacactggctcagatttagtgagttaattattagaaaaagaacccagttcttgagctgaccaagaattacataatgggataatttagggaaaaggctcttcattgcaaattttaagatagaattcaggaatcctgccttctattctggcttgggtcaagacagtgaggtcatatcactagataactcagttggcagcacatgatttagaacacacaatccttaaatatcccaat

SEQ ID NO: 3482 - DNA, 728 bp, Homo sapiens
agggcgcacgctcggggcggccggccagccaggcgcgcagcggcacaaggcggcagtcgcagcgccagggttggcgcccaggtgtgcggtgcgcagcgcgggcagcgcgtccagcagccccggcggcagcgccgtcaggttgttgccggtcagcaccagctcggttgtgtcgacagggaaggcggtcggcagcgaggcccaagtcagcccgcggcgcccgcagtccacgagcgtccccgcgcagctacagggcgccgggcaacctgcggccgggcggctcggcggggccagcagcaggagcagtaagctcagcgccccgcgcggccctgcaagggaagcgccgcagtaagccgagcggtcggcgggcacctgggcgacatctctgagtacccagactgccggcccggctccatccagcccctgatgcccggcgtcccggtagcccgccagcctctccaccctgaccaccccgcacgccggctggaagtcccctctaagtctgacccaagtctctcccagctgcagccaaacgaccagagctcctctcaacccgggtcggcctagggagcagccgggggcccgaccggactccagactcaccggagcccatggcgagaagacggcagcccggcttactctgcagcgggaggcgtagcgggagagccagcgataagcgccccgccctgtcacgcccgcccgacaccgtgctgcggctggcagaaatagca

SEQ ID NO: 3483 - DNA, 684 bp, Homo sapiens
ttttttttttttttgtagaggtggggtcttgccgtgttccccaggctggtctcgaactcctgagtgcaaagcaatccgcttgcctgggactcccaaagtgctgggattacaggcctgacggctctcagtagattcttattggataaattgaatgagatgatgaggaagagtttgctagaaagagaaaggtgggcaaggatgacgattcccagcaaggaggcagctggcacagagccacagtgcctgctgtatggagccctttgtgcagtaaggagctgctgctgggcccaggcggcaggtcccgggggcttcccttatcttcagtgctgtcctgaaaacttagttgttcaaggctacttttttttaaatcagaatctcgctctgtcaccaggctggagtgcagtggcacgatcttggctcactgcaacctctgcctcctgggttcaagcgattctcctgtctcagcctcccgagtagctgggactacaggcgcacaccacgatgcgtagctaattttttatttttagtagagacagggtttcaccatattggtcaggctggtctcaaactcctgacctcaggtgatccacccgcctcggactcctaagtgctgggattacaggcgtgagccaccgtgcccagctggctactttctatagtatactgtcccagacggtagccatc

SEQ ID NO: 3484 - DNA, 759 bp, Homo sapiens
ttttttttttttttttggggggggggggcgggggcggcaaatctgaccacaccatgtataaggacctgaaaagataatcataccaggagttcttcaaggaaataacctagctatatcatccttcagcaaagcccacagttgataaaccctccacactcatgcacagagaaatccaattagctttttaattgccctacttataaataaaagcagaaagcaaaagagttaccagacactggaaggaagcttctaacatgagagacgacaccaaaatcgaaaaaagtaacttggaggacaaactaaatgttcaaaaaagcccaaaaactatcaataaaaatctttagcgataggaaaaaaagaatgcttcatgaactgagaacagaacaccacattaaaaaaagaagaaattaaataggactctagaaattttttaaaaaatgattgcagaaattaaaaatacaaggaatagaaaataaaactgacgtaatctcctaaaacataaagtacaaaaacaaagagatgggccgggcacggtggctcacgcctgtaatctcagcaccttgggaggccaagccaggcagacggcctgaggtcaggagttcaagaccagcctggccaacatgggaagaccccttactaaaaatttccccttactaaaaatatcaaaaattagctgggtgtggtggctcgtgcctgtagtcccagctacttgggagactgagacctgagaatcccttgaaactgggagggcagagattg

SEQ ID NO: 3485 - DNA, 679 bp, Homo sapiens
tttttttttttttttttttttttttttttttttttttttttttttggagacagggtctcattttgtcactcaggctgaagtgcactgtcaccatctcgggtccccgcaacctctgcctcctgggctcaagtaatcctcccacttcagcctcccaagtggctgggactataggtaggcactactacgcccagctcatttttgtattttttttgtagagatgggttttcaccatgttgcctgggctggtctcaaactcctggactcaagtgatctgtctgctcacttcagcctcccacagtgcttggattataggtgtgcaccaccacacctggcctggagatatgttttatatgtcaggacaacaatctggctcccctgtccaactagtgctgctgatcgtgccacctgctagaactgagctaaaaagagatttgaagaccaggaaattaaccacctaagtaggaagacctaatgctcccagaatgccttcctcatccatgggctaactcatttggtatttccttttttgagacagagtctcacttttgctgcccaggctggagtacagtggcacgatctcagctcactgaacctctgcctcctgggttcaagcgattctcgtgccttagcctcccaagtagctgggactacaggcgtgtgccacacgccaggactaaat

SEQ ID NO: 3486 - DNA, 572 bp, Homo sapiens
attcccgcttccaacgaaatcctcaaaactagccaaatatccacttgcagattccacaaaaagagcatttcaaaactgctctatcaaaagaaaggttcaactttgttagttgagtagatacagcataaacaagtttctgagaatgcttctgtccagttatatatgggaagatatttcctttttcaccttagccctgaaagcgctccaaatttccagttccagatactacaaaagggggtgttcaagacgtgctctatgaacagggagtgtcaacctttgacttgaatgccaacatcacaaagcagtttctcagaacgctgatgtgtagcttccatatgtattaccgcttaccagcgaatccccaagcttaggacaatatccacttgacagatcccagcaacccggaggctgccaaaacgtccttccaaacgggcggtcaaatcatcttcaattgagtaccacacatctcaaacaacgtctcgcggaatgctactgacaagatgcaagcgccagatattccttaccaacaataggcatgaaagcgcccaaaggccactccagaaacacaaaga

SEQ ID NO: 3487 - DNA, 705 bp, Homo sapiens
ttttttttttttttttacttttgctttatcttcaatgaacttatttccaaatgccccaaatctggcaataagttattatttttaagagaagggatctcactaaggtggccaggctggtctggaactcttgggctcaagtcgtcctgctgctgagcctcctgagtagctgggactacaggcatgggccattccacccagctaaccgattaatatttttactgttcctttttaaagctagctccatagctggaatattgcctgtgttggatcctatttgctggattcatgtcattctctggtttgtgtactccttcattttgctggagtattttctccaacagcttccctaaaaagggcacatggaggtaacccctgagtctttgcttgtctaaaaatgtattattttaccttcacccttgattatttgggtgaatatagatttatcagttgaaaataactttctagaattatgaaggcatggttccattgttttcagattccttttcgagacaaggtctcttctgtcaccccggctggagtgcagtggcacaatcacgactcactgcagccttgaactcgtgggctcaattaattcttccatctcagcttcctgagtagatgggaatacaggtgcgcgccacaacgcccagctaattttgtgttttgtaagatggggctccgcatgttgccaagcggtctcaggat

SEQ ID NO: 3488 - DNA, 767 bp, Homo sapiens
ttttttttttttttttggagaatcaggtggttttatttaccctatattgctgcccacacaaaactaggcttttgttcacaagggaaaggggagaatggctgctggggaggagatgcggagtgcagggagggtggggaccaagaacccggcttggtcctggagagggcagtggcctgcccctctccaatccacagacatgtggggtgtctggttttctgtggccctcagaggcccacccacagactctttctcatttctctgtttaggatgagttatctgttggtctgttgcacgcccagctaagagaatgagattcatgagccctggccctgacagaggccacttcccccatcccggtgacctctcacgaggctctggacccagtcattaccgggctatgggattggggaaggggtgccagactccagcctcaggggccagcaaagggtcccctttgctgtacccctcaggctgtgctggcctaggggggtgcccctgctctctcatttcttccccagtaagtgatcatttatccttagggcagacccggcctgcccgtcccaccagcccacagtgcagcacacagctctgttgaccctttatttcctggtctatcctccttcccgaactcctccaggccagcagcccagtggtgccgggctccagaagttgcttgcacagacagccagatgggcagcagacagaccgaggtggcatggaggctggcagggtgggcagcaagcgagggtgtgatcatccagcggaag

SEQ ID NO: 3489 - DNA, 773 bp, Homo sapiens
tttttttttttttttttttttcagcaggaaaatgaagcaatatcagtgaaaaggaaagtagattatttaaatggttttgaatatcataacttagaccctatctaaacatctctacacattcctaatattttgcacagacaggttctttgtattgcttgcccattagtggtttgacttgaattttaataaacaaggcttgatttccagaaagctgtatcacgttttcataagccgaggtggactatcagtgagccaagggctctttgttctggagacacacgtagagtgtctctcatgggtacagttacctgatggtgctgtgttgctgtgacctctccccctaggcctccatctgccggagcagccagcccctgtccggcttcagtgcccggtgcctagaggacgagcagatgctccaggccattaggaaagccaatccaggaagtgacttcgtttatgtcgttgacacccggcctaaagtaagtgtcaccgttgcgatgcatgtctttgcacctgagttgtgaaactggagacaggcaaaggctagccgactgccatctcttgtgcaggttgcttcatctgcaaaggggcggttcctctggcatagtcagtgtctgggcaccctgctggctacttcctggaggtctagtgcacctgaagcctccaatatacaagtacatttcatatgtaccctgacactagcattgtgctgggcacacagagggcaccaaatgaatgtggctcacattggagatggtgccctagtatcccga

SEQ ID NO: 3490 - DNA, 549 bp, Homo sapiens
tattttaatgagagttttttgactaaggacagagaccagctcagccctgcaactgctcttaatccatttaggcactgtctgaatttctctcttttatggttatgttgtctcctaacactgcagtgggttactaagaaataggatctgctggtgcttgttaaaattgctaaatttgcatactctggaaatttcattacttggcatacttgtgatgtaggtattttaggtgacttacagaacacaggaacacagattgctcagctataatagacaacagactgaaacatgtgagccagatagttgtaagaatgtttctcagcttcaccagacccacagtacactgttcagagcaggcataatacaccctgcttttggcctgtttgatctgaatgtggagatgttaaactcattggtgagaaatagctgtggcactgtcatctactacttggactcctggtggcaggatactaggatggttggaagtttcatgaacttcatattcaattttcacttgggaaattttgacttagatgtgtgaagaatctttct

SEQ ID NO: 3491 - DNA, 728 bp, Homo sapiens
  misc_feature (455)..(455): n is a, c, g, or t
tttttttttttttttcttttctgcttttagaccatttatattagaagcacattttaaaaattctttgtttattatttttcttcttttctatttacttcatctggtataaagcttggattatccaggagggaaacctgacaatatactcattggcccaaactctactttgctatcatgagaagttgcctggttcaatgatgcttcagcaaataaaaacaataataataataggaactatttatcaagcatggtaccatgtgtgctaaataggtgctttttatactattcatcaaacattcatagaaaaatgaggtagctaccagaaatagcctcattttacagatgaggtaattgaggcttagagaagttaacttgctcaagatcacacaaactcttctgtggtaacactgggattgcaatgcccatgctcttaatgaccagtatatatcattttngctgctcttcaacattgtattttctctgccttttagttactttacccaggagtggggccttgttctgtgacatcaacactggctattctcaactgacctgagagtaagtctgtgtgcacacaggctctccctattgtgaaaaggttcttattaaatccaggtgttggttactacatcatggaggctgctgaaagtgtccttagacatatggatcaggcttgtgaaactccgtcgcacgtaatgggacagttcaaagtcgctttgattgacggg

SEQ ID NO: 3492 - DNA, 111 bp, Homo sapiens
agctctacctcctgggttcatgccattctcttgcctcagcctcccgagtagctgggactacaggcatccgccactacgcccggctaatttttgtatttttagtggagacag

SEQ ID NO: 3493 - DNA, 692 bp, Homo sapiens
gggcccagagcctacggaggggctggggcgctgctcccctcgctggcgctgggcgccccaagggcgcacgttctccactctggagttgggtgctttcactgtagctttagacaatctactgcaacttcacgctatttgctgggctctaaagcaagtttattggtaccttcgaaccgacgaatatcttacagctgtcagtttccccaaaggcacccctgagaccacattttcagagttttgcagcatccccgcagcccagtatctgtataaatattttagcaaacatctcatgcacatttttactaaacttcgattttgctaaactttaagaacgtgaaaacctttgttcacctttattgatcacaactgaacaatagaatccttatagatggcaaggtttctcacaagcaagttgatatatttatttattgtcttttaaaaatattataccaatcaacaaaaaggcggggggaggtacaaaaaaaggaaagaaagaaagggagggatgtggggagaggagatgggctgacttgagcttgccaaattcagagcatcacaggaaaggagggcctctgggaattgatcccaaatgaaacctaaatcatttgcatatgccgaagcaatgccaccgagcatacatctatcctcaagaatcaactttaataattcaagcaactattttcttacaaatc

SEQ ID NO: 3494 - DNA, 662 bp, Homo sapiens
taaccttcttgtattcttatgagtagaatttcatgacttttcagatttctcaatgtagttacccaatttgaaacccaagtgacctaagtgatatctatcttgttgaaaatagcttacaaacaaaacatatgcatccttagttttggaataagtgagctaagatctattcaacaatttgactttacttttcttttcaaaatgtccagttgagcaacttgtcttttgtcccttgtatgttttgcttgattcactgaaaattctttagggatcacaattttgaaaaagcaagctgtcttttattaaatagtattgcatgaaattattgcttaatataccaagaaaaggtgaaaaattgcaagacctattaaaatgaattcatcaatatgacgctgatgctgatctttgggtatgctctgttgaccatacaaattgtgttcttcactattcttttcttcttcccaatgctgtgttatttcctctttcaaagtatcctgattctcaaaatctttagtttatcttctgataaatttttattatctatatttttaactcattacttccttatgttatgattcaaccatcactatatataggttgatatttgaagcttctgagtttctttctttcagtgtgctttttgacttctaactaggatattcttc

SEQ ID NO: 3495 - DNA, 686 bp, Homo sapiens
tttttttttttttttctctcctcaatcgctcctgcaaaaaatctatgtccacctttacctttccactgttattttcctaacttaggtctccatcactattcatttaaattccacaggcacttctaggagattgttctgatgataattcgtctcattcttatattagtcacttccccacggtagcagaattatctttttaagatgaaaatctaaaggtttgctgggcgtggtggctcacgcctgtaatcccagcactttgggaggctgaggcaggtggatcacgaggtcaggagttcaagaccagcctggccaagatggtgaaaccccgtctctactaaaaatacaaaaaaaaaaaaaaaattagctaggcgtggtggtgggtgcatgtaatcccagctactcgggaggctgaggcagagaatagcttgaacctgggaggcggaggttgcagtgagccaagatcgcaccactgcactccatcctgggcgacagagcaagactgtgtcaaaaaaaaaaaaaaaaaaaaaaagaaagaaagaaaagaaaatctacaggtttattggtctgtccaattacttgtcagtacatttcttaagcacaaggatgacactctggcagttagtaagtatgtgctgcgtaatcagcttcatgggaaacaattctgattctaacattggccattacta

SEQ ID NO: 3496 - DNA, 733 bp, Homo sapiens
ttttttttttttcgcccagtggacaccacccaatgttcagctcactggatatcgagtgcgggtgacccccaaggagaagaccggaccaatgaaagaaatcaaccttgctcctgacagctcatccgtggttgtatcaggacttatggtggccaccaaatatgaagtgagtgtctatgctcttaaggacactttgacaagcagaccagctcagggtgttgtcaccactctggagaatgtcagcccaccaagaagggctcgtgtgacagatgctactgagaccaccatcaccattagctggagaaccaagactgagacgatcactggcttccaagttgatgccgttccagccaatggccagactccaatccagagaaccatcaagccagatgtcagaagctacaccatcacaggtttacaaccaggcactgactacaagatctacctgtacaccttgaatgacaatgctcggagctcccctgtggtcatcgacgcctccactgccattgatgcaccatccaacctgcgtttcctggccaccacacccaattccttgctggtatcatggcagccgccacgtgccaggattaccggctacatcatcaagtatgagaagcctgggtctccctcccagagaagtggtccctcggccccgccctggtgtcacagaggctactattactgggctggaacgggaacgaatatacatttatgtctttggcctgaagataatcaa

SEQ ID NO: 3497 - DNA, 716 bp, Homo sapiens
ttttttttttttttttttttatctccttcttccacatttgatctccccctatacttccaatataaccaaaattattggcttgatttctatctttccacgtacttctctgtgtgtagagaaacacatatacatgtaagaagtaaagtctgcatttcaagaaagttagtaagtgaattagacaggtgtgtttagccaaaaacaacagaaagcctaatgaactgctggttaaagaggaatttatttttatcattaacaagaagattggaaacaggaagcttgggcgtgggttcaactgctcaggggtgtcaccgaggccttcagctggctccatctctgggctctgctatccttgggttcttttcatttcatgtttgttgcctcgtgttcacaaggtggctgccccagacacatgcaagtttggagcatgagaggaagaagctgcctcttaggaggaaaccaagcattcccatcatagactttcctttcatcccattggccagagctgggtcacatggcccttcctcactgcaaaagtacctggaaaggcaagaattcgtattggctgccttcagtgagcaaagtggcttcccacagggaaccaggagcagaaatggctgtggtgtttggtaaccacactttctgtacgaataatacactaatgtccagaattacagagcagttattcccttctgttagggaccaaaaagatcctttcc

SEQ ID NO: 3498 - DNA, 688 bp, Homo sapiens
tttttttttttgatttatatactctgttttacagatttagctagaaaaaaaatgtcagtgttttggtgcacctttttgaaatgcaaaactaggaaaaggttaaactggattttttttttaaaaaaaaagaaaaaaaaaaagaagaaaagtataccagataccaaaagctagctttcttatgttttcctttaaattttcagatttaccttcattctgttttcactgatgtcttttgcaagcctttgatttttttttttttgttacagtttagtaatttatattcaccagtcacttcttatgtcttgaacatctgtatctgtaaacatgaatcaccgtgtgtgtacttacagggctaggatttcagtgttgtcagagtattaccacacagcaacatacagaagatatgttcactcagataagactgccctaaacaaccattttgtcactcagttatttaactgtgtttagctcatttaaatcaaaatgtgtactttaatctaaaatgttttaataatctgtatttcttataattttaacactatgagctgcctatatagaaatcaagtaaccagaatgcacctataaattatggagcattgtagatcttaccacatcaattcatagcagtactttaagaggcattgtccaatagttaatgttcttggtcagatatttaaaggtgcttact

SEQ ID NO: 3499 - DNA, 604 bp, Homo sapiens
ttttttttttttttttttttttattttttttttttttttttttaatattaaaccaatacttaagttcctttactcattgttgagacagactattagtgtaggtgtactttcatttatatgttgtaccaatagaggttaaaagtatgaccctatcggtaatctttttaagcaaataaaactgtttggatgctttacccaggacgattggattgccctccaggacgtatctcttcaatgcggtcccggatgtaactggtgtcattagccttgcagaatgtgtcatctgtaattgaagctatgttgttgaactgaagatgaattacacgtagactttctggtaacattaagaggcacggattccagggacattatggtccaagtagaggaaggtgaggttattcagttttttgaatgcattgtgcttagattcccctactcttgattagtagcatatgcattaaatacaagtgagcttgggaggaagaactggacgttttagtagtagatttacagcaagtgaaacgttcttctaacagagaaagtatgaaaacagtaccatcctctatatctactatcaaaatatcatgtaaaatcgagtctcatc

SEQ ID NO: 3500 - DNA, 644 bp, Homo sapiens
  misc_feature (200)..(201): n is a, c, g, or t
ccctcccaatttgaactgttcaaatgggatgtttgttttggcaccaatatcaacgggactttccaaattgtcgtaacaacttccggcccccattgtacgcaaatgggctggtaggcgtgtacggtgggaggtctatataagcagagctcgtttagtgaaccgttcaggattcgcctttgggagactgccatccatcgctnngttttgaaaccttttctcaattagaagacaccgggaccgatccagcctccggactctagcctaggccgcgggacggataacaatttcacacaggaaacagctatgaccattaggcctatttaggtgacactatagaacaagtttgtacaaaaaagcaggctggtaccggtccggaattcccgggatccagctggccctcatttgtgtccggagctcaggagttcccaaaccgactcagtcgcaccaagtttccgtcttttggaattggggaaggagtttctttctttcttttcttttttcttgagccagttttaatcgctttgaataaatactcccttaagtagttaaatataggaggagaaagaatacatcggttgttaaagcaggagaggaagagagacctgccctgtagcgtgactcctctagaaaaaaaaaaaaaaaaa

SEQ ID NO: 3501 - DNA, 700 bp, Homo sapiens
tttttttttttttttttttttttttttcttactcctcgccatcctctttgctgtttatctgaaattcatgtttaactgggcagcctgtactcctgtaaaatagtgacccaaacaacaaaaatacctgcccttgttgggcttatcctcaatcttccctgtgttgctcgcattctgatacaatcagctgtatttgactaccaagcatcagaaaaaaattcttttttttttttttctgatgctggtttatgcagagctcgcttcatggcctggtgaccagtgcattcatgcagaacctcctgatcagaagggtcttgctgttaccagcctgtgagtcttaataattttgtacatgcaatccctccttttcattttctcctgaactctgcaaagtatgtagccagtcccaggtttatgcattataatataacaaaaatatcaaaaataataattgcagttccatagagaacttagaacttacctcctaagtggtttaaatcttttgatatctgggacccccaaacccctagaaagtcagaagataattttttctttaatgggaacaatgaagtctcaaggtattaggtccgtgtccagctaaaagtctgctggggctaaaatccactttcctaaactcacatcacatttctcaaacttaattgcttcatccttgcacttcccaggtcttctgttctctcccttg

SEQ ID NO: 3502 - DNA, 706 bp, Homo sapiens
tttctacttgccagtaattaccgtattagtatcgcctattaccattgtgatgcgttcttgccagtacatcaatgcgcgtggatagtcggtttgactcacggggatttccaagtctccaccccatcgacgtcaatgggagtttttttggcaccaaatcaacgggactttccaaaatgtcgtaactactccgccccattgacgcaaatgggcggtaggcgtgtacggtgggaggtctatataagcagagctcgtttagtgaaccgtcagatcgcctggagacgccatccacgctgttttgacctccatagaagacaccgggaccgatccagcctccggactctagcctaggccgcgggacggataacaatttcacacaggaaacagctatgaccattaggcctatttaggtgacactatagaacaagtttgtacaaaaaagcaggctggtaccggtccggaattcccgggatggccggggaaatggcggcttcaggagagagcgggacttcaggcggcggaggcagcaccgaggaagcatttatgaccttctacagtgaggtgaaacaaatagagaagagagactcggttctaacttcgaaaaatcagattgaaagactgacccgtcctggttcctcttacttcaatttgaacccatttgaggttcttcagatagatcctgaagttacagatgaaaaaaaaaaaaaaa

SEQ ID NO: 3503 - DNA, 706 bp, Homo sapiens; identical to SEQ ID NO: 3502

SEQ ID NO: 3504 - DNA, 704 bp, Homo sapiens
ttttttttttttttttaggataattattttataattgtcttttcattctaagaacgttgtgtttttcagagaaagacagctttccagcaaaaattcatgcacaaaatacatatacttgacaagatgtttcagagcctactatgtcatttggctagtctaaatccactaatgttaactatcaacattttcccaatactatttttaagttacatctcatttaccttcgtccttaagaactgcataagcttgttttaaatattttaaatacttgtcataaactagagtttgctaagagtaaaggtactcgggttaatgatcaaaatggtgtgcccagaggaaaagcaagcactattaaatattaatgcaatccttatcaacacaaattgagccattttaataaaaaagctagtccaaaaaaggttctcattctataaagattaaatcatttccaaatcacagtgaaaggaacttgagtaattaaccaatttgttttctactatgtgccttagagatacctcactaaaatttgtatctgatacaacagaataacatttgcagaatgtaatattgtagtgacagtactgaggttgattgttacagactattaatggttacatcttaatgtttatacagaacatggtccaataacatgaaatagagaacagcatctggaaattatctccatcaatgttcggagataacag

SEQ ID NO: 3505 - DNA, 671 bp, Homo sapiens
tttttttttttatatatcttgtgtaaccttagtaactgcaatatcaatggctaagcacaaaaccactaagaagatgtttgctaattggttgattgaacggtacacacctgttatatctgggcaaaaaagattcttagtcaacatatctactgattacaccaggaaggcaaaacctaattctatttcttctacttgatggtgttatctatttttaattaagtttatctagaaatatttaacttataagcctaaacatattatctaattaaagtatatgaacataccctggagttatatcccagctaatttttcctaatctgtttgtttgaagtctccttagtgaggaagtgtgaattgaagcatgaatgataaagaacgaaatgatgtttctacctgaacttaaaaattcaacagaaagaactcatcaacagcaattagtgtcaaaacccagatggtcagaagagacagaccatcacctgattttattaatatattaaggaaacgtttaacgttgagatgggtcttcagaaatgtaccccaaatatgtaatttatccaagtaggctaatttaattaattccaactgggttaatttgaacacattatcatagttatcataaagagaaagaacaggtacaataagtctaatatagtggagtgaacacaagaatg

SEQ ID NO: 3506 - DNA, 701 bp, Homo sapiens
tttttttttttacttttggatctttgcaaatttaaaatcaagagaatttgactctaatagtatgtatgtgcatattatttctactgtttttttcctccaaagacttggagtctgggttagtttggatgaactatatttctgaagcttttccaaactgcttgagtcaacaagctagacgtaactataaatcttgggagaattggcttttttgcactcccatatctggtaatggctggcaatatcaaaagaacatccttcctttcactgggctggcactcctcttttcagtattggcctgcccccaaaaagtgaaagcagatctacgttacataacaaacctcctggaaaaggtgttgttctcaaactgagataagaaattgtttcatgcttttttctctaaagtggtttgcttgtgggttcttgatggtttcatggtctgcatctcaccagcaacattattttctccagctgatagactatgactgacttgtcacagtttatggcatttcagagatttctattgcttctcccctaatcccctcactcagagatagtgataacaggaaaaagatacaagcatgagttttaaattcaaacttgccaaattcatgaaatacctacagataaatatgccagaacaacttagggtaagaatccgtataagaaaaacgtatctgtcgactcagtcaacttgaatttgt

SEQ ID NO: 3507 - DNA, 622 bp, Homo sapiens
ttttttttttttttttttttttttttttagagatagggtcttgctttgttgcccaggcttgtctcaaactcctggcctcaagggatccccccacctcggcctcccaaaatgctgggattacaggcacaagccaccacatccaacctccctcatatttgactaagaagtctcataaatctgagaacacctagcaaggaattaaggcgagggtgtggcactgttctggcttcagtctatcaccaggcagagtccacgcattcttcccagggagaaagaagcagtgacagctcttgggcttagagggaaatgattcagcgggagaaagaaggtggagaggggctaatatgcagataccattgctgcaggtggctctgcccctaagcactgaggagggcactggtccctctggccccacccagccttcacccaaggtgaagtacgctttctcaggtccccaaggatgggtggccaggtcccccactgggagtggaggtctcactccacttccttgggttctgacctccacaattatctggctgtgagggtgaactgcactggcatttccaccacaaagtgcagatccccgaagactgaaagacacactctcaacaagaggactcct

SEQ ID NO: 3508 - DNA, 645 bp, Homo sapiens
tttttttttttttttggaatagtttcagaaggaatggtaccagctcctctttgtacctctggtagaattcagctatgaatccatctggtcctggacttcttttggttggtagcctattaattactgcctcaatttcagcacttgttattggtctattcagtatttgacttcttcctggttttgtcttgggagggtgtgtgtgtccaggaatttattcatttcttttagattttctagtttatttgcatagaggtgtttatagtattctttaatggtagtttgtatttctgtgtgatcagtggtaatatcttctttatcattttttactgcatctgattcttctctctcttcttttttattaagtctggctagcagtctattttgctaatcttttcaaaaaatcagctcctagattcactgattttagaagggtttacgtgtctctatctccttcagttcggctcttagttatttcttgtcttctgccagcattttgtttgttcttgcttctctagttcttttaattgtgatgttagggtgtcaattatagatctttctcactttgtcctgtaggcattcagtgctataaattcacctcctctaaacactgattaatggtgtctctgagaattctggtacactaat

SEQ ID NO: 3509 - DNA, 649 bp, Homo sapiens
tttttttttttttttgaaacaatttttctgaaatttatttctaaaagtcagagacaaaactttagaagtgacacatttatactaagcatacatgcgtgagcaaaaaaaataagcacagaatacaaaaatgaaatagtaaaattttaatacagtattctgaatacaagtagaataccactagataagaattgtatttacctaagaaatctatgatagtgtgggtggagataaaccagtttaggatagccacttcactattcacatttaatcagtgctgaccagaagctaaagcaatactttaggctaagatggcaaaaaatcatagacccaattttccttgttatgaatcaaatgaacatgtattaaggtgatttgccctcatttaacggtcagctggagtaagtcaaaccacagagagcccttacaaagactaagcaccaaatgatgaactgtagtggctttagtttggggccatcttaagttctagtagtataaccattgaacgattcatgtgcaaattcttacaggcaaaagttgaacgtgtaagtctcagctaggagatctagccaactgtacttacaacagatttaaaagcaattgatactttcagaacatctcaagcttaatggtcaccattatacagatgcaa

SEQ ID NO: 3510 - DNA, 649 bp, Homo sapiens; identical to SEQ ID NO: 3509

SEQ ID NO: 3511 - DNA, 684 bp, Homo sapiens
ttttttttttttttttagagtccttctttctttttattgaaaagaaatcatttctattctagcgcaaacaatgtatattttacaacataaagcaagatataatttacatattacatttcttatgagatctttataccctaaatgtcattcccttttttattaagtcacctcttctggtttaatttaacctgccaagtaccctacaaatcagcatcttgttatgaagggagattgaggacacaggcagatagttcctatgtattcacctgtatctggtatcatgatggtgaggaacagggttatgtcttgacattagcagccctgaggacctccactgacaactggcttaagatccagaaggcatcttttaccaaatcacataccaaacttgtattttaaaacatttgataataaatgaacaaaattgagagcttgtacaacatgtatataacatatgatcaagtgctatagataatacatgctatatggatataggtatcaccagacagtgaatgtatactttggcatgaacagacacttgttactcatatgatattcccagacatagattgctagagacatggataaaaccaaccaattcacatatcattagggttatgggttcaggcttagatgtatgcactgggaaatggatgtcatgaatcaaattcaaatgattatgat

SEQ ID NO: 3512 - DNA, 748 bp, Homo sapiens
tttttttttttttttctataaatgttgcgcaatcacaaggcggccctggagttgctctgcacctaatagagttctgaggcttgcccgattcttgaatcattgtttgctcagttaaacctgttaaatttaatttgtccagagtttttcttttaaaagtacccaggccatgtcaagtaaactttgcctaagctgatttgggttcaaggctccccatgcatacactatttgcacaattggagtggattttccctgtgcatcagaaccacctggtgaatgtccccaaactatagtttgcagggcctggactctggagagtctgattatgtgctctgagctcctcgagtgactcaggcaacctagctcttggggacccaggctagagggcgatgcggatgggctaagacctgcctccccctgctagatggatgctcaccttgggcaggggtttgtcaaattgggcctccagggacacaggatgttgcaccggagccttaggatgaagatggctggccccacatcaacttgtccttctcagatgtgtagtggcctcagtgaaattacatttcgtaagtatctgtatcccaggagatagtcagcctaggccgggtctctcacataagagtccaccggttatgcagggggttgggtaaaagaactgtacgtcacaaacttcatcactggaacagacagacagagggaaatgaactccacccagatgaaatagcgagccctgtagacaatacagggg

SEQ ID NO: 3513 - DNA, 732 bp, Homo sapiens
ttttttttttttaacctgtaaaatgaaaatataaaataggtttcttgagaagattaaatgtcctaatttggtatctactgaaaagtggacacttctaaaaatataagcttttctaccccagtagacaatgaactctttaaagacagggactccattattaatcttcatattcttagcttttaacacagtaaaattatgcaataaatgttcataaaaaatgaatgaataaacaaatggatcacactaagtgtaacattttctgagtattttcaggaaaggtgcttttgaaatccttgatttcatgaatgagttcattccactttggctcaactgaatccaacaatacctcaaattgtacaaagttaacaaaaatattgcctgggctttataaaccccaggaggcatctaacctgaaactcagtcctcaatgccatgtgagtcacacctgggtgttcaatgactgagaacgtctctttttcaaactctggacatcaatccttggccctttggctgaagttgagacacaaatcaatgctccctaagccttagtatgcattcaaccaaggaagtatgcaactcccttgggagtttattaaaatgcaaattcttaggcaccaatgtcagagaatctgactttaattctagaataggtggggtcttaagacagttatagttctataggcttcctagtgatttgatggatgataggctgaacacaacatttgagagata

SEQ ID NO: 3514 - DNA, 758 bp, Homo sapiens
ttttttttttttttgagatggagtcttgctctctcccaggctggagtgcggtggcccgagctcggctcactgcaacctccaactttcgggctcacgccattctcctgcctcagcctcccgagtagctgggactaaaggcacctgccaccacgtccagctaattttttatatttttagtagagacagggtttcaccatgttagccaggatggtcttgatctcctgacctcgtgatccgcccaccttggcatcccaaagtgctgggattacaggcgtgagccaccgcgcctggcggatttctttatactttaattatagcagatgtctaaacagataaagcacttatttaaagagacatatagaaattactcttcaatagttcaccgaaaaaagacactgtttaaaaaccattgggttgctgttctctgccatggtctgagcctcctcacttggttgatgtctagagaaacccaagcttggttcttatctagttttctgtcaatcaagagggttctttgaccctggtaaccatcaaccaaactccctgaggttgtactatattgcagatggagttatactgagaacactacccctaggacatttttcttttctaaaggctgcttccctcctcatgcacagcaccatgttatatgttgagcaatggggaatgggagataaaagagggtaaacaatcgtcttggccctcaaggacattattgtctaattgaaagtcttaaaatattttatacctgaaaacaa

SEQ ID NO: 3515 - DNA, 713 bp, Homo sapiens
tttttttttttttttgaagatattcagggtttttatttttattttttgagtctgggtctcgctctgtcacccaggctggagtacagtggtgagatcatagcttactgtagcctcgacctcccgggctcaaagatcctcacacctcagccttccaagtagttgggactacaggcatatatcatcatgcctggctaaattaactattttattttaagagatgtggtctagctatgttacccaggctggtctcgaactcctggcttctagcaatcctcccacctcagtctcctgaatcactgggattacaggctggggccatcatgcccagctctaggtttttaaaatgtaggcaaggaggtcagcatttacacaaaagcagggtttgatcttaggaagcttaataaagagaggggtctaatcaaggtttcctgtaggatctgggctttaagttaggccttaaagaacgaagaatgtttgtgggtgtagtaagcaatgacttggagcagagccctctagccattgggctcaccctcacaggcaggcgccactgaccctaggggggtgtaggcagctggaggaagtactgtgtgtcccccattccagcgatggtggccctctcagagtcaatacccttccttccaagagactgaacatacaactggacattggccaggccacatatgacatagaatctggcagaaaccataacaagc

SEQ ID NO: 3516 - DNA, 634 bp, Homo sapiens
tttttttttttttttgatttgcctgctgctgctaggaggaggcctagtagtggggtgaggcttggattagcgtttagaagggctatttgttgtgggtctcatgagttggagtgtaggataaatcatgctaaggcgaggatgaaaccgatatcgccgatacggttgtataggattgcttgaatggctgctgtgttggcatctgctcgggcgtatcatcaactgatgagcaagaaggatataattcctacgccctctcagccgatgaacagttggaataggttgttagcggtaactaagattagtatggtaattaggaagatgagtagatatttgaagaactgattaatgtttgggtctgagtttatatatcacagtgagaattctatgatggaccatgtaacgaacaatgctacagggatgaatattatggagaagtagtctagtttgaagcttagggagagctgggtagtatgggttgtggctcagtgtcagttcgagataataacttcttggtctaggcacatgaatattgttgtggggaagagactgataataaaggtggatgcgacaatggatttacataatgggggtatagagtaaaatagtcagggttaacgagggtggtcaggatggg

SEQ ID NO: 3517 - DNA, 725 bp, Homo sapiens
tttttttttttacaaatgatgctttaatgagtcatattattcatacatctttacatacttgcctgattatttttgtaggacaaattcctagaggtagaattgtggggtcaaatttctaccaatagatacctgtgttgcacatttaatatgttctaagcatgttctaggcactgaagacatatcgattaatcctcacaataatattaatgaggtaagtactgttgttttattcattttatagatgaggaacctgaggcttagagaggttaagtaacttgcccaaggtattattagtaaacagcatagccaggcaatgtgactcccagcatatgcttttaaccaccttccctagtagatactgaaaccttacctggtgaatttatgttggttactgttgtttatatctccttctccagtgtttccaatatacctttttttctgaggtgtgctaggattctcagagtggaaggaagttctagactctgtctgtcctgcttcccttaggaattttgctattttgagttcttcttcctcctgctgatagttgattattagcctcgtcaacttttcccaaattgtcacagggcttcaggcaaatcagaaaatggcccattttaacaaaaaaatttcaggcatttgaccagaacataaaataaacagtttatgaagctattggtaactaagtggtgtgcatgtcctgtgtagatgtatggaagtgactcatt

SEQ ID NO: 3518 - DNA, 655 bp, Homo sapiens
tttttttttttttttttttttttttttactgctttttctatagcaatagcctaaaatcacctgttttggtatgtgatactgttggtactaacatattagtcattttcacatcttttttccttttttttttaattgaagaaagtgaactaaggaacagggagtagctctgagtatatgaatatttggctgtacataccattttttagatgtgatgagatggtaactgcaaaacacattctacagtggtgacaacactttcacatgattgtatatttaaacaccgaagtgcttctcttatctcctgtgaaagaggagcaccaggtaatgctacacctcaaagcattttaactttcattatgaatggcaggggtctattcgcttttgcagaaacagtctgtaagaagcaaccttgacttcacttatacaccacattatttttaaaggcagctgcatttataatgactgatctccacttaagacctattcaacaaggtacaccttaacatctaagctgttaacagagattaaagttaatcttcagtgatggcaggagtggaaatgccaggaaatatcctaaattctggaaggaggcaaagtgacagtaacggtaggtggggaaatagcagaggaagatcaaggaactactgggatgggt

SEQ ID NO: 3519 - DNA, 762 bp, Homo sapiens
ttttttttttttttttcttttttctttgagacggagtttcgctcttgttgcccaggctggagtgcaatggtgcgatcttggctcaccgcaacctccgccgcccaagttcaagcgattctcctgcctcagcctctggcatgtgccaccacgcctggctaatttttgtattttcagtagagacagggtttctccatgttggtcaggctggtctcaacctcccgacctctggtgatctgcctgcctcggcctcccaaagtgctgggattacaggcgtgagccaccgcgcccagccagaatggcttcttatggatgaattaaagaagcagtttgagatggaatgtactcctggtgaagctgctgtttacattgctgaaatgacaacaaaggatttagaagattacacaaacttagtggataaagctgtatcagaggattgactccaatttcaaaagaagttctatagtgggtaaaatgctatcaaacagcactgcatgctacagagaaatctttcatgaaaggcagtctccatggacgcagcaaccctcactgttgtcttatttcgagaaattgccacggccactccaaccttcagcaaccaccacactgatgagtcagtcttcagagggtcataatgtttttgccagtggagggtcttgcctccagcaaaaaagaaatacgactcgctgaaacctcagatgaatcattagcattttctgaacaatatgtattttattaagtacacccactgtttaagatccatgt

SEQ ID NO: 3520 - DNA, 790 bp, Homo sapiens
  misc_feature (472)..(472): n is a, c, g, or t
tgccaatacgccccctatgacgtcaatgccggtaaatgcccgcctggcattatgcccagtacaggacttatgggactttcctacttgccagtacatgctacgtattagtcatcgctattaccatggtgatgcggttttggcagtacatcaatgggcgtggatagcggtttgactcacggggatttccaagtctccaccccattgacgtcaatgggagtttgttttggcaccaaaatcaacgggactttccaaaatgtcgtaacaactccgccccattgacgcaaatgggcggtaggcgtgtacggtgggaggtctatataagcagagctcgtttagtgaaccgtcagatcgcctggagacgccatccacgctgttttgacctccatagaagacaccgggaccgatcctagcctcctggactactagtcctcaggaccgccggcgagcggagtgaacaacctttcatcactanggaggacacgagtatgtacccactatgacgctatattatgagtgtacacatcattaatgagacacagagttgtgacacaaaaaaccgaggctggtcccgttccggaattccccgggaatgtttaaataaaatgtctgagatatatagtgtttctcagtttccaaaccaagtttcctattatcttggttaagtgagtttttactatgtgaactttgtaaaaaataatcatctagtatgtgccaagagccctaaaaatggttatcttgctaatattacttctgggactttattctatgaaaacttaaaaaaaaaaaaaaa

SEQ ID NO: 3521 - DNA, 698 bp, Homo sapiens
ttttttttttttttttttccaacgaaattatttattgctgtcaggaggcccaggaccctccagactgaagagtccatgggcccctgtgcatgtgagagctacacagggaatcgctgtcaccttccaaggataagcagacagggccacacatgccatggccactcggtgcacaggggccaggctgtgcccagagacccaggcatccagcttgcattccaagttccttactgagagccccactgcttgatggcaagctctaggcttgcttgggattggtgactttgctcatgaagaagatgttctgggtgtctgtagggacaatgatcatcaggaagggcctgttgaaacgcacaatggtccttgtctccactaatgcagaaaggagggtgattttgactgctgtggcagcagatgcttctgtgccctcctcaaatacatcaagcacagccttatggaccacctgggagactgctaggttcctggcccctgtgatccctgacaggtcagccttgctggtgaaggcttcctcaatgcccagctggagaagtatgtcgttcaggttatagtccctcgagatggaaaactttggcaaggtagagctcaacctatctctctgaactccagagagtctctccaccgttcagggtctctgggagcagcatggttccacttcctcatctgtcttgatcaggaaggga

SEQ ID NO: 3522 - DNA, 409 bp, Homo sapiens
ttggtttcatgtctttcctgtgatgaatagtactgtgatggacatatgggtacatgtgtctttttgtagaataatttattttctttggaatatatgcttagcaataggattctagaacatttcttacagccttgtaaaatagagtgtttgtcagactctctagtgacactattattctataatgagtctccagtaatagttatacttcatagtatgctcactctcaaaggcttgtactctccctctacaatgtgccacagctattctggtcataaattcacttaatatgaactttcgctatttcacaaagcttctaagcacacaacctagggatgtgttaacaatgttcagagtaataaccagaagatgtcaaatcctacgaaatcaaccatatcaataaccagataat

SEQ ID NO: 3523 - DNA, 661 bp, Homo sapiens
ttttttttttttttttttttttttttttttttttttttttttttttttttaagtacaatttccattttatttttcagtctcctttactagggtgtgtcctggttatgggcagaaaccatgtcttatgcttatctgaatccaccttattgagcacaagatctaacacagagcaaatgctcactaagtggttgctgaatacgtttgtgaattgtcaatagctctgccagacatatcactgtatataggaggagtgggcaaggtcctctggggaatgataagccacttccttctcaaacagattcccctttgctgaggaagcatctcttcttttctctatccagatacttagtcacctgttcctctacctcttgaaactggtttggttggtagttgttctgtctgtcaaccaggaattagaagcaaagtttcctgggaagagtatactaaactgatctcagagtcaggctacttcctgtgtgtacttcctttctagttgtaggtgggtgcctctaacatttcatcccttctacgggactctggcccaacccgttttatcaatgtcagtgccttctaccagagggtgaaaggatgataggtagaattgtgacctttttgtgaataattttagtttcttcccatcctttagtgttgaatatctaat

SEQ ID NO: 3524 - DNA, 784 bp, Homo sapiens
  misc_feature (629)..(629): n is a, c, g, or t
tttttttttttttttggatagagacagggtctcactgtgttgtccaggccaatctctagctcccggcctcaatcagtcctcctgtgttggcttcttaaattgctggaatttcaggcatgagccaccatgcctggcctgggctagtcctatattctctggagttctctttactttgtgctagccagtctctcattatgctgttcccctgttataatgaataattctctgtattaaatttaccactttaaacttttgagtggtttatgtctcctggttggactctaatatggctaaagaaaggggtccctggagatagaacttcacaacaggatggcgatttgggcggaatacaggtggggtattcccagggggcagtggcttggaagttccttggcccatgggggaaaaccggcatttgctgggtggaatttcccagggaaagttggacccttcaccaatggactccaaggctaacgtggattaaacttggtcgcgatgggtggatagaacttggccacgctagagggcacttggccttggggagctaagtgggttggctggcacttgaccgctatgaagacggggtgtgggaatggtcctttgggatgcacttcagcaggggtccccanaccctgagccatggagctgtaaggagccacacagcaggaggtgagtggtgtagagtgagggaagctgcatctgtattaacaggcactccccatggctcacattcacgcctgagctcgccttctctcagatcagagcagcattaaatctcataggg

SEQ ID NO: 3525 - DNA, 667 bp, Homo sapiens
tttttttttttttgagtgttctagatggcattaatcaacattcatcagtggtttggttacactgaattatcttagttcccttcccccattacttcatcttcccctgaccttcctccttctcctggactcattaacactcattcctggcattcagtagatgttgattgagcatttactatgtgttagttactgttccaggtgctggggacaaatgggtgaaccacatatacatggcttctgcattgatgcacggtatggtatggtggggaaggagaaggtagatgttaaacagccttctacagaggttaatacatattttggtccatgccatataggggagatgtggtgctatgagagacaatatcaggggtgacctactcaaaatagagtggtcaggaaactcagctctgaggagatggcatttaaattgcgtcctgagtaactgagagggaaccaggcaagtgaaagagaggaaagcgtgttccatgcagaaagtaaagtatgtgcaaaggccaggagaagaagactttggcactggaagaccttaaagaaagctggtgacacaccccagacacatacagtggtgttaacagataaaaacaaggtcgatttgtccacatatagaatactttgtgcagatctgggcacactactcttaaagtgctgg

SEQ ID NO: 3526 - DNA, 641 bp, Homo sapiens
ttttttttttttttttaaggcttctggtagggacattttattttttggtaaagccacaatagatagaaatgccataaaaacaaacatgtaaacaaggtatcagaactttggttcactgaaacatctcacacctaaaacacctgaggtacaaaggcaccttgctaggcgctagacagctaactctgctgcagccactttgatcctagccttggggccagggatggcacaggctgaatggaagggctgggacttcagtcacacaggagtcgccctactatggtctccctctgctccagacaaacattcatttctccaaaaatcagcctgataggaacatacaaaggaacatacaaaggtgtctgtcacgttgacatgggctgaaggaccaggaaggggaaggacagaaaaggatgtcagtcaacttctgttgatccacaaggtctcaagaactcctgtcctcgttcatggaaccacttattggagacccacttgcagcccacaagcacagggcaggcagcatgtcttgtacggtagtcaccttccccgctccgcaagaggttgtaccagaacacagctgtacccttcttaggccaaattgcagcccacagatcagggaagacggtggaaaccaccagcttcta

SEQ ID NO: 3527 - DNA, 724 bp, Homo sapiens
ttttttttttttttttttttaacattgtagcctctgcaggagaggaaatcatgcaagaaggggtttgggatgggtattgagcatgtacatcccagtatctttcacactcccaaacctgggtttccaaatctttcttctgagttttggaaacatgtatttccctggctactagatatttccacctgtatgttacatgggcaactaatttgaacatgtgctaaactgaactccagtatattgacccacaataattacagtcttcccttttatacaattatgccgttaactacttggtcaacctacgttctcatttttatacttttctgtttccctcaatttccatactcaatcttatgaattctctcctaattatttttcgaatatatcctttcccctccattgccactttcagagtctttgttcaggacctcatgattttctgactagagaatttttatttgctttactaatctcagtcttgaacattctgatccatccttcataatgttgctgaagctatttttgcaaaacacaaatctgatcatcctgttccacagctgagagtcttacaccatctacactattaaggccaagctctttcagaaggcatctttcatgatctgacaactgcttctactttggctttatcattggccatgtcttaccatgtactctgtgtctcatcatgccatggtgaatggcagaaccaggagaagctaagctg

SEQ ID NO: 3528 - DNA, 659 bp, Homo sapiens
tgcagggcaggcggctctagcagcttcagaagcctggtgccctggcgacactggacctgccttggcttctttgatcccaaccccacccccgatttctgctctgctgactggggaagtcatcgtgccacccagaacctgagtgcgggcctctcagagctccttcatcgggactttgaacatgtcggggatcgccctcagcagactcgcccaggagaggaaagcatggaggaaagaccacccatttggtttcgtggctgtcccaacaaaaaatcccgatggcacgatgaacctcatgaactgggagtgcgccattccgggaaagaaagggactccgtgggaaggaggcttgtttaaactacggatgcttttcaaagatgattatccatcttcgccaccaaaatgtaaattcgaaccaccattatttcacccgaatgtgtacccttcggggacagtgtgcctgtccatcttagaggaggacaaggactggaggccagccatcacaatcaaacagatcctattaggaatacaggaacttctaaatgaaccaaatatccaaagacccagctcaaagcagaggcctacacgatttactgccaaaacagagtggagtacgagaaagggtccgagcacaagccagaagtttggccctcataagcagg

SEQ ID NO: 3529 - DNA, 706 bp, Homo sapiens
tttttttttttttgagacagagtctcgctctgtcactcaggctggagtgcagtggcacgatctcagctcactgcaacctccacctcccaggttcaagtgattctcctgcctcagcttcctgagtagctggtactatgggcatgtgccaccacacccagctaatttttgtatttttattagagatggggtttcaaaccatgttggccaggctggtctcgaacccgtgacctcaagtgatccacctacctcagcttcccaaagtgcagggattacaggcgtgagctgccgcgtctggcctcacttctttaatttagcataacacatttgggattcatccacattgttgcaagtatctgtagttttttcctttttattactgaaaagtggttcccaatggtggttgggcattaagcaacaagttggttaattccttggacctggttggaaagaatggtccaaggtcatttggcagttcctaccaagttccaattaaagcggttaaactttggcttataggtcctggttggaccatagctttatctctctaggatacatacctaggagtgggatggcgggatcattggataagtgcatgtttaactttttaagagatggccaaattttttctaaagtggctgtaccattttgcatttctaccagtaacatatgagagtttcagttgctctacaagctcaccagcaattga

SEQ ID NO: 3530 - DNA, 727 bp, Homo sapiens
tcaaggctggaagcggttgactcacgggatttccaagtctccaccccatgacgtcaatgggatttttttggcaccaaatcaacgggactttccaaaatgtcgtaacaactccgccccattgacgcaaatgggcggtaggcgtgtacggtgggaggtctatataagcagagctcgtttagtgaaccgtcagatcgcctggagacgccatccacgctgttttgacctccatagaagacaccgggaccgatccagcctccggactctagcctaggccgcgggacggataacaatttcacacaggaaacagctatgaccattaggcctatttaggtgacactatagaacaagtttgtacaaaaaagcaggctggtaccggtccggaattcccgggatgcatttttgagtttgtattagttgataaattaacagtaataacaagattgtatgaaccgcatggtgcttgcagttttaaatattgtggatatttgtcctgcatcagaaacgagctttggtttttacagattcaactgtgttgaaatcaaacctgccgcaacagaaattgtttttatttcatgtaaaataagggatcaatttcaaaccctgcttatgatatgaaaatattaaaacctagtctattgtagttttattcagactggtttctgttttttggttattaaaatggtttcctattttgcttattaaaaaaaaaaaaaaaaaaaaaaaaaaa

SEQ ID NO: 3531 - DNA, 727 bp, Homo sapiens; identical to SEQ ID NO: 3530

SEQ ID NO: 3532 - DNA, 638 bp, Homo sapiens
tttttttttttttttctctctctctctctctctctctcccccgtctccctcccgagttctccggctctcgcggcggcgggccgggcggcgaacgaacgagcgaagcgaacgaacgggcacgcgggccccgccgcgcacgcgccgcgtcgcggtgggggggtgggtgtgcggagggaagcgcgcggcggcgggccgccggggcctcgccctccgggctccgttatgatccttccgcgttccctacggaaccttgttacgatttattcctctagatgtcagtttcgaccgtcttctcagcgctccgccagggccgtgggccgaccccggcggggccgatccgagggcctcactaaaccatccaatcggtagtagcgacgggcggtgtgtacaaagggcagggacttaatcaacgcaagcttatgacccgcacttactgggaatttcctcgttcatggggaataattgcaatccccgatccccatcacgaatggggttcaacgggttacccgcgcctgccggcgtaggtaggcacacgctgagccagtcagtgtagcgcgcgtgcagccccggacatctaaggcatcacagacctgttattgctcaatctcgggtggctgaacgccattgtcctctaagag

SEQ ID NO: 3533 - DNA, 741 bp, Homo sapiens
tttttttttttttttttaccatttaacttgttttaatgtttcttcacaaatggtgaaaaatactaaagtacagacaaggaataatcataatgttgtggccaacattataaatatggaattataaatttaaaacattttctggtttaaaaaataaatctggtagtcaatgcagctctgcggggtctctgcatctagtagggccgatctctgcgctcctgacggtgctcgcctttatccatttttccaggtcctccacgtcctcctcttcttcctcccatctgttccatcaaaggtccagggggccccccaggggccacctcgtcttcctccaccaaagccacctcggtccatgccccggccaccacggaagccacctctgtctccaccacggccacctctgaacattccaccgggaccaccacgatccatgaggccacctcttcctccccgcatgccaccagggccacctctgccacgatcaccacccgggggcggaaagggtggcgtggaggaagccttcaggctttggggccttacactggttgcactctgttctccaggcgaagttctggtttccacaacccggattgggacactgccagtctccagctcggtgctggacgtttcctcctccagaggggttcctcgggacccgggtcctctggagggagctctctattctcagggctccatgcgaccatgggtcccagactctggctctgactcccgattgtggctgcc

SEQ ID NO: 3534 - DNA, 741 bp, Homo sapiens; identical to SEQ ID NO: 3533

SEQ ID NO: 3535 - DNA, 636 bp, Homo sapiens
gtcatccgctattacccatggtgattcgggttttggccaagttacagtcaatgggccgtggaaaagcggtttgactcacggggatttccaagtctccaccccattgacgtcaaatgggagtttgttttggcaccaaaatcaacgggactttccaaaatgtcgtaactactccgccccattgacgcaaatgggcggtaggcgtgtacggtgggaggtctatataagcagagctcgtttagtgaaccgtcagatcgcctggagacgccatccacgctgttttgacctccatagaagacaccgggaccgatccagcctccggactctagcctaggccgcgggacggataacaatttcacacaggaaacagctatgaccattaggcctatttaggtgacactatagaacaagtttgtacaaaaaagcaggctggtaccggtccggaattcccgggatcgaacgccgggttaaggcgcccgatgccgacgctcatcagaccccagaaaaggtgttggttgatatagacagcaggacggtggccatggaagtcggaatccgctaaggagtgtgtaacaactcacctgccgaatcaactagccctgaaaatggatggcgctggagcgtcgggcccatacccgg

SEQ ID NO: 3536 - DNA, 687 bp, Homo sapiens
ttttttttttttttttgcagagtgaactctttattgattatacaaattaccactatttattttaaacccaaagtgacttcaaagttgttttttggtttttaaaggggctacagaaaatggactgaggggaaggaatgggcacaatatctaggtctagctgaatcacagagctgttagctgctgctttcatccacaggtactccttttaccttattattttttagagagtcttgctccgtcacccaggcaggagtgcaatggcatgatctcggctcactgcactccagccctgggtgacacagtgagactgtctcaaacaaaacaaaacaccagcctgggcaagacccccatctctacaaaacattttaaaaaatcagctgagtgtggtgttatgcactggtagtcccagatactcagaaggccaaggcagggggattccttgagcccaggaagtgaaagttgcagtgagccatcattgtacactgcactccagcctgggtgacagaacagtaagactgtctcaaaaaaaacctgaaatgaagtttcatatctttatgaaagtaaaggaagatacttctgtctgaaggacatcagtgaatctaaattgccatttaagagagaactcgggctggcgcggtggctcaggcctatattccagcacttgggaggccgaggtgggtgaatcat

SEQ ID NO: 3537 - DNA, 364 bp, Homo sapiens
ttttttttttttttttgtaattattgtggaaaactttcaagtgaacagaaggatggtgtcctactgtggatgagggatgaacaaggggatggctttgatccaatggagcctgggaggtgtgcccagaaagcttgtctgtagcgggttttgtgagagtgaacactttccactttttgacaccttatcctgatgtatggttccaggatttggattttgattttccaaatgtagcttgaaatttcaataaacttgctctgtttttctaaaaataaaaaaaaaaaaaaaaaaaaaaaaaaaaaaaaaaaaaaaaaagaaaaaaaaaaaaaaagacaacaaaaaaagggggggccacccggggaaattc

SEQ ID NO: 3538 - DNA, 690 bp, Homo sapiens
gacgttttgccagacacatgggctgatacgttgactccgggattccagtcctccaccccgttgacgtcaatgggagttgttttggcaccagatcaacgggactttccaaaatgtcgtaacaactccgcccccattgacgcaaatgggcggtaggcgtgtacggtgggaggtctatataagcagagctcgtttagtgaaccgtcagatcgcctggagacgccatccacgctgttttgacctccatagaagacaccgggaccgatccagcctccggactctagcctaggccgcgggacggataacaatttcacacaggaaacagctatgaccattaggcctatttaggtgacactatagaacaagtttgtacaaaaaagcaggctggtaccggtccggaattcccgggatgtcgccgtgcctaccatggtgaccacgggtgacggggaatcagggttcgattccggagagggagcctgagaaacggctaccacatccaaggaaggcagcaggcgcgcaaattacccactcccgacccggggaggtagtgacgaaaaataacaatacaggactctttcgaggccctgtaattggaatgagtccactttaaatcctttaacgaggatccattggagggcaagtctggtgccagcagccgcggtaattccagctccaatagcgtatattaaagtt

SEQ ID NO: 3539 - DNA, 750 bp, Homo sapiens
tttttttttttttttcctttactttcatttttttaaaaagctacgagaatgagcaggtggactgtggtttccaggaatggtggcgtctcacgcttcttgtgctttttcctttggggcctccgagcggctggggttgggggactgggcaggaggctccctgtaaacatttggacttgggctggggcaggggctggtgttgggcaaagctgggggtccaggctggagaagcaggggcccctccagacgcagccttgggagactcagcatgtgcccccctcccctcatcacagaacaagacaatggttaaaaaccagaacagatgcccagaagggggtaccatggccattaccagcatctcagacaagggcaggcttcaaacagggaggcctgtggcaacccctcccctacgtctggagctgaggggacagggggagctgagaacaaagagaggaaagaggagaaaagcggcgggggaacaggcggggagcgtgatcttcttgcccccatcttcctcaggggttggggggtacaaagtcggcggtggcccatcccgccaggccccgctgcccctcagaagaggccgcagtccttcaggtagttcttgatgatgacatcggtgacggcgtcaacacgaactgacgttcttggtgtcggtggcgcacgtgaagtgcgtgtagatctccttggggtcttggcgcctattccaggtcctcaaactaattctggatgtagcttggctgcctcatccta

SEQ ID NO: 3540 - DNA, 750 bp, Homo sapiens; identical to SEQ ID NO: 3539

SEQ ID NO: 3541 - DNA, 180 bp, Homo sapiens
gtttagagacatttcttcaatttcccatcgtgcctttccagggaccagtgcagggacagggggagaaggggaggggttaagttaaataaagaagattatttttgtttcctgactttaaaaaaaaaaaaaaaaaaaaaaaaaaaaaaaaaaaaaaaaaaaaaaaaaaaaaaaaaaaaaaaa

SEQ ID NO: 3542 - DNA, 678 bp, Homo sapiens
tttttttttttttttcatgttggctgcagctgcaaatatttttatttggtgaggtaacaccttcagcaggagaataaggattttaaaaggcagctcatattccataactcagtttggcagatttattatcaaatgtgtagtaggatttggatacagagatgggatttcagtattttttttaaaaactcaaagctagtattatttctttacagttcttaaatcttggctttttccttagttccttccttaaaaggccttaaggaattggccccagaagaaagaattgtggccaaggccttagaggaaaggaagaggatttattccacaagagcaacactctctattacacgagcgagctctagtgctctaatgtaaacttatctaaaacactattagtgcaacagcagcgagttataggcgctatacaccaccagtggtataacatctacttcagcagcaggccccaacttgaccaacttagtttacgtgcccaaacaacttcaccttcatttgtggctggacgagacgagcccttacagcataaaacatcatttcttacacatcaaaactaattacaaatctaacatgacactaacgtccttgccaacaccctacaggttctatttcttcaaaatcttaggcattacaaagtctgtaatctgacaaccacattactct

SEQ ID NO: 3543 - DNA, 385 bp, Homo sapiens
tttttttttttttttttttttttttttttttttttttgaaacaaacaagaaaaagttttattttgaaaatacagtctttaaagataaaatttggcttccattttccatatctaagtgcatccaacaagatcccaaagcaaacaaaacaacaaaacaaagacccacaacattatgtacagagctctaaaatgagctgtgaatatctacaagaaactagcatatactctttgtgaagggatgtagtagtgtgtggctttctacagttctcagtcccccagaagaagagttaactccctggagctgcaggtgcggctgcagcaagggaagagctggggtcagtgaagcggctagggatgcgaccccctggggtaaggagaccgtggac

SEQ ID NO: 3544 - DNA, 441 bp, Homo sapiens
tttttttttttttttgtgataaaaagtattttatttgtttaatgatatgcatgcttttcttctgtaaatatataataaatttttgtagatagtcttgatgtgtgatctttattttgtatttctctgtgtaaaaccagtgaatataactaaagtgttagtggattggattaaaagaaacttattaggcaagaacaggtaatgtagttatccatgactacttttaaccatgcagactaataatattctggaggtttatagctcggcaccttcacctttttatcactggtatttcatgtaaggcatcaaccactgtaatttttgctgatgctgaagcctgtccttgggaattggatgcatggcactcatattctccagcatcttccttacttagaggagataccagcacccaagccagttgacttcatggcttattcttggtgc

SEQ ID NO: 3545 - DNA, 441 bp, Homo sapiens; identical to SEQ ID NO: 3544

SEQ ID NO: 3546 - DNA, 734 bp, Homo sapiens
tttttttttttttttggctttcttgggtgtttttcctttttcttcttcttctttttgtttttttcttcttcctcttggtttgctatgatatcctcaataacctgttgtatggtcttgtcagaaaaaataatagctgaccctccttcttcaacgtcagggtagtcaggaaatgtcccggttaaatttctgcattcgatgaaccaatgccggatctggtcttgaagggttcttcccttgatattccacgcctttctatcaactttaggtcatccttgatggtaaccagggcttccctgtagtcctcttcatgctttatctgcacctcattccgcaggcggtccaccttttcagcctggattactgtagcactgacttcattaaagagaggaggtggattcatacccaggaagatcatctcctcttctctcagtttttcagtttccttacgttgatggaaacgtcgccaaaccttctgaatgcggagtgcagcagcccaggtatctgtcactttcttgccaagcatcttggattgctttgctctatattcttgcagatagatttgcttcatgaataaagcccttaggcgaccttgccgtgccctctcagcaaatctggattaatttaacagcctcatcgaaagggatactctttacgggctatttcatgtccgatgttctttaccgctgtccgtactatttgagcagaatttctctctcctttattcttccattctc

SEQ ID NO: 3547 - DNA, 806 bp, Homo sapiens
tttttttttttttttgttttttttcatagtttaaagtcttccatcgactacattaaacagcaattttatgtggcctaaactttattctgaaccttagtggtgtcatagtctctgactatatagaacctcaaagttaaggctaacacgttcttaaagatggagtgcacatcttaaggggagtttgtctaaacacttctcgagtcattttagtgggacaaaccaaataaaatggtgctaaaggcaaacattcaatatacttcattttaaactaaaaaattaacatataaaatgccatgcacagcagacaccattcttttttttacatatttacaattttacatatttacttatcaatataatttctatctttacaattataaaattattccaaactgtggaagagtggtaccatttaattttcttgaacatacactttgtagcattcatttgtttaatcctttaaaaggcaattatttaccaaaaccacagtgaatgccagaggaagcacataggaaaatcatggagggaaaaaagattgagacaaaatttgcacacaagccttaaatgaatctgtatcagtaactcaaataagtagtatctttattattaactaaggttccccctgctagaaaaaacgaaacaatccccatatactgtacctttaaaaaatgctctgacatttataagccatttaggttaccttctaggatccaaaccgttgagtgtagtaagggctacctaacaattaggctccaataataatctccataaatgtgatcatctgcataactgagtgccggtgggga

SEQ ID NO: 3548 - DNA, 660 bp, Homo sapiens
ttttttttttttttttatattaataacagatatgtttattattacatatccatcagtgcggctttcaataccacttgaaacatgcatatcatcctagagacgatcggttttccagtgcttcttatctgatacacattactgcaaagccattataaattactgaggaggtatttggttaaaaaaataaacaataaatcatactgtccatatgaatcaactcttggttactgggaccaagaagtttaaccggtatttatcctgggttattccctatgtaaacgggaaaactatcattggagtgttatgtgccattattctccttttatatgtgggtgcaaccttctacattttgtgcagttttataaagtcattattgtagcaggtagtttgatgcaaagattgtactcaatttatgaaagtccaacaaacctctaaatattttaaattaaaccaattatcaatgaaaaactcactgacacacataatttgttgaaaatacatttcgtcgaaatttctatacttactcatggcagtacaatcattatctcaaattgacggcactagaaggacaatgccaacccccattgaaagtgtctacagaataatttacattttcaaacagttgcattacatttctatattgttcgtcaccttaatgtc

SEQ ID NO: 3549 - DNA, 690 bp, Homo sapiens
ttttttttttttttgttttccttccagtcttccttttagtgaaggtaattttttcctggtaatatggtttgattttcttgctttttattttttatttatttgttttatttctttttttttatttcaagttaacatgagactgtgccaagactatcttgataacccacatattgttaaatctgaggacagcttaacactgattgtataagagcaggactgataaacaagcaaaggagaaagctagtaagaaactatatgcttgaacttgtatctcgctgctttttaaggttttgttttctctatttatatcttattatacaatgtcttgaaaagttgtagtaggtattatttttgactaggttcgtctttcagtctttctactcaagatatgaagttgacacaccacaattacagagttaaaatagtctgtatttttctgcatacttacgttaacagtgaattctgtaccttcagagtgatttcttattgatcacttaatgtacttttatttcagatgagagaactctattgatcttgcaggacaggtctggcgtgatgaaatccctcaactttcatttgtctgaaaaagtctttatttctccttcttcatgtttgaaggatatttgctggaatacttcggactatatatttttcccttatcaaattgcactctctctcggctgtagtttc

SEQ ID NO: 3550 - DNA, 192 bp, Homo sapiens
tttttttttttttttaagtttattgtatttttatttcagctcaggtgagcaggtgtggagagtgggcacaaatgcaaagtaagcaaatggggagccccagcagcaataggggggtcttcctggaagaggcaggctttaaagacaggaggagaacggaaatagggaaaaggagttgggactgaggcgaagtgg

SEQ ID NO: 3551 - DNA, 780 bp, Homo sapiens
  misc_feature (431)..(431): n is a, c, g, or t
tttttttttttttttgatttataaacatttttaatgactgtgttaaaaaaccatcatacaaaaagaaaagaaagttgttttcaacttaaaaaaaatccttatataatgtaccactcatctgggatatgcttctgggagggggacactccctgcttgggctgcagcagaaggcagtggggagaaagtcttaaagttctgggagtcaggctagcccctcctgcaggtgtcctcattggccacttcttggtccctgtggtcaaggttcacaagtgccacaaagaaccacatgtatctgagacctcggtagacatgtgtgagataagtcctgtgtcccaaacagcagagtatctgaaatccagcaaaattctcctctcagggacgtcctactacctcctcctccctctctgtagctgtggcagtcctactacttnatgtacctggtcggcgtggcgggcagactcaatactgatatgatttcatcacgtcgatcagctctgcctgactaaacatactctccttgctctgctgtattgagtgaggcacggcacacagagcagagctgagcactggctctccattcacaggtagagctgctctgttcttctcctatcctagcccaggttctcggtcctgactgtctctggaaagccacacggactccacacgcttctctcctgccaacagctcagtctttcagggcttggacgctgcaagggtcatgcaggaatccctgtccatactcatgtatccactatgtggccaaccacttatctcccacag

SEQ ID NO: 3552 - DNA, 93 bp, Homo sapiens
aaaataattctagaaaagtttcactaggtaagtatgcaaattcttattctaaaaatacttctttaagtgcatgaagcttcatgtatttggcaa

SEQ ID NO: 3553 - DNA, 709 bp, Homo sapiens
ttttttttttttttttgtggtaaattttttggcaattttattgaagtataataaaattcaacaattcaatacgtctttataaatgttcattgtgatataggacagctctatcacagtactggggtaaattttaattatatttattaattacagatgtgaatttcttcggagtaagaaatcctcagaggaaattacccagtatattcaaagctacaagggatttgttgacataacggtaatgtataacagcaatttttttctcaagtttttggattacctgtaagtgtctgactcagaagggcataggcattctttttatgtcatgggtttgatttctttcttcctttctcctttcattcccctggctcccatcttcaaagtgaaaaatatcacattcacttgctgacctagagcctttttctttttccagggctggcttctgacgggctctgcttgccttcctgatagtcttcccctttatgaatgaagccacttgccccagcttccctctgctgcccctatctgcaggcttgctaagatctcctgacctaggcgctgtcacccacagtgggctgcagagctggctcttcctagctggctaactatcctgaatcagtaaaaatttcctagtggagagtgatgggaaatcgaatccaaactggcttaacacaaaaatgagaattcatcgattaacatgactcagagacca

SEQ ID NO: 3554 - DNA, 770 bp, Homo sapiens
ttttttttttttttttattttaattgaggaaatatttatttaaaagttataataattatagctataaaacatgaaactaattttactgttaaaattgtaaaagtactaaatatgaagaagctatacaaaataaatatatttgtaacacatacaacagacaaaatattggtttctagaatatgtttcaaaaccactacaaattaataaaatcaacagaaacattaactgaaattcatgagaaaattaacaggaatattcagtaaacatatgaaaacatattcaacctcagtaataatcagaaaaatttaaattactaccaagtaaattagtattttttacatattgattttaaaataaaatgtgtgataagactaagtgttggcaggttatgtagccacagacatcattacatacggccagagcgagtctaccctggtaatctccaccttagacaaataattataatctagcattgcaaaaaagaaataacacatatctaccagagatatacacaacaatttcataccagcattgttagtaattagaagaattatacaagcaatctatgttgcaacagtaggaaaaatggataaatgagctgtcagtatatgtactcaacagagtcaaaacagagaacatgaatgaactagaaactacatctttaacatatttgaatacttttcaagagaaaacatctgcttgagcatatatcaatatttgcctattaatacaggtttaaacagagaacataatcataatgtgcggatacc

SEQ ID NO: 3555 - DNA, 711 bp, Homo sapiens
tttttttttttttttccctcctattttacattctattttctcatatccagcttttctctctaagcctaaccaaatgctttggtgaatgatgcttggaaaagctggagttttaaaaggcattcatccatttatgaactttcttccagcccaggatccctgcagagaaccagaggttacaaatctgccctcctttctcccctaaaaggtggctgaggggaggagaggtgcatgtagctccagctatagcaaatcagtgccctgactcactggggagacccagggggttgggatgttgctgacacctcatgggccacctcatcagcccatctttgtagcttcaggttcagctctgggtgctgcaggcagggacccctctgcatccctgcctgaatgcaggcccagtctccaaggaactctgtctgcaagagtagaaagatgctgtgggctgggaatcaggggcctgagggagccctgacactgctgcccagaaccagtgctcctcattctcctgctgacagcatgcatgtgccttttggtaacacacactcttgtctaattcccagccaccttcaccccagggatgagtcccagttggtttaaagccagactggtgcatttcattctggctgcacaactggattctgtaaagtgcccatatgctagccatgagctatctgcttgggctgtgggaccgagaactgcagctctgca

SEQ ID NO: 3556 - DNA, 663 bp, Homo sapiens
tttttttttttttttttaggtgaaagtttgctatttatttagtcttagaaaaacactgaaagaaaaaggcaggaaatgtagtacgcagtgtggaagaatggagctggccacatgtagttttagcagctgcagaggaaactggctgagtctaaggttacatatttctgctcagtaagggtatccatggtgataactctcatgatgacggtagtcatcctggtaaccatcctggtatccttggtggtaactatggtaaccatagcctgcatactcatcttctgggcagcgcatccccagtgactgctgaatcgccatttcctgtctccgaagttgcatcgaatcaattaaatcgtacacaatcaccatggaccacattggggaaggataccaggatttgacatttccgtcttttccgactagaagcatggagaagtactccgggctcacttgaacaatagttacgacatgtctttcaccaaatgggctggtacgtcttctcgctcaacaacagagctcccattaattgggaacagttctaacactcccccaacttcctctccaacgcctaaacagcttcagaatggttatgtggcgcagaccaaaattgcacgcctgaccactgagggcacgagagctgttgtgaataggcccagtctttcatcg

SEQ ID NO: 3557 - DNA, 541 bp, Homo sapiens
tttttttttttttttttttttttttttttttttttttttttttattagcaaatactatttattaagtagtagtattaaaataaggaagagaattagagttgcagaatttcttttaactgcttgagctatctgctccataacatcttatattttttcaaataattagctcttgatagtgaattactcatagttaagatctagaaagctacttgtcttccagttgctaataggatggtactgaagaagtcttgtagttctttgaatttagtgccctaaaatgggaaaataaacacacattaattttataggtgcaagtcaaatacctgtacattctttttttttttttaagaccgggtctcgctctgttgcccaggctggagtgcagtggtgcaatcacagctcactgcattccagcctgggcgacagagcgagactccgtctcaaaaaaaaagaagaaaaactatcaacatcaacacatagctcatatgtaacaacaataactatcatacaaggtataacatatatggaacatgacctatac

SEQ ID NO: 3558 - DNA, 773 bp, Homo sapiens
ttttttttttttttttatgaaagtgatttttattattttggtaatggtgtcccagtataagtaatgagatacaatttttttttaatttggtatatcaaacagtaaaggctacatataaatgttgtttccccagaatgtactttgtctacaactatgcactgtagctattatgcacacactaaaagcattcatgataaagtacaaaaataagaaaagattaaataagaaggtatccttgagttataaatgtctactaaagtataccttttaatcacacagttgtgtcacagctaaaaacacacaaattaacatatactgctatgcaactatttgatctaatatagatctactaggaaaatattaaggctgtagtaacacttcacaggtaaaggctaagttctgggacatgaaagcttttagaaaattcacaaaacaaacctgagacatctttttgttttggaaaaaagcaatttgcttatagagtcaaagctttgacatacaaatgaagcatttaataaacattatactttattgcaataacctggagtaaaacttctgactttaatggttgtcagcaaatacattctctctccggtagaaacacaattgagggtttctgattaaagcagtaatctgattactccagcctccaaattcagttatttcatccgttaggattctttcctttctttaactaggtataagcatttaaaaagccaggtaaactcccagcacttacttcttcatataaacagtttccttgcgagctacgt

SEQ ID NO: 3559 - DNA, 744 bp, Homo sapiens
ttttttttttttttttttttttctgagaaaaatgtgaaaacttttactgttacattaagaacaggtggtagaagcaacctattccgcacttctcaaaagatacagaggggcacatatgccacactggaataaagaatacagaatcaaacatgtacaaaggtaccacagcaggttatggttcatacaggactttaaatgacccatgttgacaatacaatttgcaaaaaatatgagaaaagcaatacatatttctgaaacaaaaacatacctgttgtaaaaaacaacacgcgtagtatcagaatagaacagttaacagagcagcagttactgaagacagacggcaacaggcagctgcgccagccatgggtctgccatgcggctacacccatgaggccctattgtgaacaacgcaacgttctccatcagcggggaagcacacagactgcttggccaccaagctttccgcctggtctgttcatactgagatttagcagtaacagcccagaagggaatgcagctccccgctccctatgacatcaatgtcttcaacacatgtgtaagattctttctggagcccctagctcctccatcttcaaaattaacaacgcagagaaagagaaataagaaagcaaagaccatcacattgcctttaaaaaagctgtcctcaactcatcttcctctacagtgtttttcagatcaacgtcctgacgggaatggaaggagcagtccacactccccgaggct

SEQ ID NO: 3560 - DNA, 719 bp, Homo sapiens
ttttttttttttttttttttttttttaactgataattctttattactaaaggtttatttacatagtgtttaaagcataataaaaaataaattacaatacaaaagtgctctttaggaaggagacactaaacaacaggcccatattaccccttgactatttagccaagacataagctacaaattttgccggaaaaactgtccatacatttttaactacttcttcattattcttatggaccatcatccaggacatctgtttgaagaaatatccagttataatattttcaaaggttagaattgtgaagaaaaaatataaaatgtgattaaaggatatatagccttcagatgtaatttacagttttaaaattgcactttaaaactttgcttttttagacagtataaaaggcagaatgagacagatatgtaatgaatttcagaactgaggttcatatgtaaatcatacaattttttaaaaaatagtattggacaaaatatcaaggtctatacatttaaatacagataatctgtttgaaaattccagtttgttaacaagaaaaaacatctgcagtccagtcgattacaaactgaaaatatcaatctgtaaagattgatcttgagccctaaacttttagatgcttctatcctttggaccaaatgcttctggaatcttagcttgtaacttttccttcaatagcccacttataagtttgcttatctacc

SEQ ID NO: 3561 - DNA, 754 bp, Homo sapiens
tttttttttttttttcgtgtttctcttctttattaatcagtcgagagatacaaagacttaataaaaagttacacagaaggttcaaacatcactgagatcttcaggcatcactcgtttcacgacaatggccacctgttaagactatgaaacagaagctgggcgctcacaggcgcacaataattcaagtatctttcattccaagtaaacccgacatggaatttcaaacacaatgggctgccaatggagggaacctgtctgtgggctccagatttgctgtaacatgtctgaggggcctttgggttaaagttgccacgttagtgggtcatgtctcctggaaaagtgagacaggccccacgaggccagccaggcattttccacagcaagtgccatgagaaggaggtgggcaaagtcctaagagaaaccatccaggtgtcccgagtggcaaagtgcacaggtagtaagtggccattgtccccagccgtgggagtggagaggatggctaggattatctctggaaaaaaaagagcagccctctaaagagggtgtcaaacagtggaagaaatctgagagcacacaatggcaaaggcatggggtgagggcatttcaaggaaggctgtgctccagggcattgtgagggtagcactatctccggaaaaacaacgggaacatgaggatgtcaaacagcaaaagtccagttggctcctcggatcatggtgtgggtggccaaccaggtttcccatctgacctgctaaag

SEQ ID NO: 3562 - DNA, 726 bp, Homo sapiens
tttttttttttttttttttttttttttttttttcgtgacacaaacatgcattcgttttattcacaaaacagcctggtttcctaaaacaatacaaacagcatgtcatcagcaggaagctggccgtgggcaggggggcccaggccgcagggggccccctggggacccacccccaccagcaggggaccacgcaaagaagccctttcttctgttgccattagcaaggccagaaaaaaaggacttattttctctaagaaaagtagccaggattggaaatatcgagatggggctccccagatcgcaatggataaacgaacagaactttcatttttttttccaacaatcactgttggggtgggggatcccagtctcgggactgtgggtgcagctcagctggcctggtgctccctccccttctgtgagctccctgctggcagctctgcacgcgtggatggatacagagcggcttctacacggcgccatcaaacattctcttatgaacgtgagtggattctccaggcaaactaatgcactattctcactggtcggaaagaactccaaggcagtctacactgagggtggagttaccactgtgctcaacattaccagtagtgcttattagtcacactagatctcccaaaggttccagacaatttacattctctacacaacaactgcatctcctgacagacaacatcgaacatcgacccggaacgaaactgatcgcca

SEQ ID NO: 3563 - DNA, 721 bp, Homo sapiens
tttttttttttttttttttttttttttcaaaatatattagatttggtttttattgtagagcacacatatcagggcgaagtgctgcacacacaactacaaatcatttttgggaaaaaagctgtaaaaaaaataaaactgcaactgctttaattatgcagtcccgacttgagaaatccacgctggcaaaggagttctggcccctgagaggggcttcttgatggtggctgccccagatttctgcagcctatgaggtctcagacccggacctctgtacacaaagcccccaaagtggtggtatcctggttgctgggagggcctctgctcttggcaagcccgggtcctggcctggctgacaagaagacattcctaatgaatctagatccacaaaaccttgctgccttccaggatctgagtggatagaagctaccaaagactttaccttttttttcttattattttttgaaagccccttcaccaactcccataccctgaagcggaggaggcaccagcccagtctgcaggcctgagctctggccttggatgcatgctgccggcagacaagatggggcaggcgccttctagaaggatgactgaggatgaggcccaagctggccaatggagaaggcaacgcaaaggaaaatgccaggagactacgggggaaacaaactcaaaaagaaacaaaaacctacacaaacaacaatttccatacccaatgtagact

SEQ ID NO: 3564 - DNA, 687 bp, Homo sapiens
tttttttttttttttgctttaaatatatttttatttgtttttctttatattaatttttttctcccatagaggaatagcattacagtctaacaatcagaattctgttacacacatacacaggcatgccacatgacccagttgaggtggttgtctccttgagtctgttgacacgtcacatggtcaaagtctcctcatttcagccagtctcaacacaaaacacccaacagggatgcactcaacttgttggttccatgtggaactaggtggcagggcgagagggaaagtagtagaagggggctatggtgtgtctgcattcagtcccctcacataaagccacatggatctaggggggtatccaagagctctggtggggtccgtgttgcacctaagacattataggtcagagcaagttgctcagagggttccaggcagggggctggggagcaggcatactctaaaacagcaccaaactgcattcatacacggtgccctgctggggctagactggcaaggctggaaagacacccagcttgaaggaaccactcagacttactggggaatactggaagtcactgtttgatgtactgggactcactctagaaacgggtccctcctgacagtttttgcaaagtggctggtaagacctgacattattactcacaaagttgatacaaactcctctagggc

SEQ ID NO: 3565 - DNA, 747 bp, Homo sapiens
ttttttttttttttttttttgcccaagctggagtgcagtggcgcgatatcagctcactgcaacctccaccttctgggttcaagcgattctcccgcctcagcctcccaagtagctgggattacaggtgcctgccaccatgcccaactaattttttgtactttttgtagagacattttagtagagacaaagtttcaccatgttggccaggctggtctcgaactcctgacctcaagtgatccacccgcctcagcttcccaaagtgctaggattacaggcatgagccacagcacccggcagcccttgtctatttttcagtctattataaacaataataaataacaagtctcttttactaaaagcatttaactgaaattaccatttcatctcaaatccagtcatgctacatccagtgctaaaaactacagaggaaaagtacactacaacaaacacaccctattgcaggggcagacagagcctggcatctaagctgatgccataccccataagggcctgcatgggaataacttttatctgtgattggtagtttcacatctcaaccaaaaggctaacagaataaaagagtaaagacattcaaagtagcagctaacgggcagaaaagcattcgtccatttcctatgctatcaagccactctgaagtctttaacaattaccatatacttcagttactacaataaagtatactatcgctgcaaaaaatagctttgattttttcaagatctcagaagc

SEQ ID NO: 3566 - DNA, 555 bp, Homo sapiens
tttttttttttttttttttttttttttttttttttttttcaggacatgtaattcttatttatttttcaccctcaacaaggaagaaaggtctctccctcaattctgctcttccaatacttgaggataggcacccctaagccctccttcctccagggaggcctcagcatcagtgtctgtggacgtagtctctgaagagtgcttcagctgatggggaaggagaaactcaagacagagatcctcctagggatggcgtcactttcctgccaactttctcgttgcctctccttgaaagcagaagaagtgccagccctcagcttccgtcagatcttgggctcctagggccttgtacaagtccatggccctctggttccagtccaggacggccaggcggaattgggagcagcccttatccaaggccacctcagccaccattttggaattattttggggaaccaatcccttggaccccagatattccgggcatcacattagatatcctccagaataaatggtgcgtcccttccatgtactgtagatgaacatacgtacttagtt

SEQ ID NO: 3567 - DNA, 555 bp, Homo sapiens; identical to SEQ ID NO: 3566

SEQ ID NO: 3568 - DNA, 650 bp, Homo sapiens
aggtctgagcgctgtgcccagccaggagcactcccaggagcccgagcggcagtacatgcacattggcaccatggtggagtttgcttttgccctggtagggaagctggatgccatcaacaagcactccttcaacgacttcaaattgcgagtgggtattaaccatggacctgtgatagctggtgtgattggagctcagaagccacaatatgatatctggggcaacactgtcaatgtggccagtaggatggacagcaccggagtcctggacaaaatacaggttaccgaggagacgagcctcgtcctgcagaccctcggatacacgtgcacctgtcgaggaataatcaacgtgaaaggaaagggggacctgaagacgtactttgtaaacacagaaatgtcaaggtccctttcccagagcaacgtggcatcctgaagagtcaccttcattttggcaagaagactgtattttcaggaaggtatcacacactttctgactgcaacttctgtcccttgtttttgatgtgcgtgctgtctgtcctatggagcctctgcagactcgttctcgtgacccagtggcataccgtttggtgtctgatgtgtgcccagatcgttctgccacttgcactgtgcttgctcctagccaaagggaaagg

SEQ ID NO: 3569 - DNA, 723 bp, Homo sapiens
  misc_feature (285)..(285): n is a, c, g, or t
tttttttttttttttttttttttttttcaggatgaagcagcagcgtttattcaagatacaacagtgagggaatccagtcacgttcccttctccccagagagggcgcttcttgacaagtgatccagtagaaatcttttagactctaagttaagttcataaaaatcactcccttcaccctgtctcccagggtcaggcctggactctgagatgaactggcttggggcgccctcgggtggccacataaaaaaccacagtctgaggccagcctggggctcccagacctgngcgggatctgcccaggccacctgtccttcggctttgggtcgctgtctcttggcagatggcccaacacttgggggtggcccaaggacacctcaggaaggttcccgctctacggatggcccgattagccagaggtttccaggccatctgtctgcctccaggagatggactgggacctttagacttcggtggagaacaggatgctctgtctcttgctgtccggggcagggatggcctccagctgcaggaagtacagcagcacctggacctgggacatgacctccaaggaccagctgtcagtcatggtgataggctggctggggttggcaggagcttgctctccttctcggagggccggagcagcgtggggccaagaccgtggcgacgtcgtgccggacctcttattgactgcctccttctctgccacctttcccgtgtccc

SEQ ID NO: 3570 - DNA, 777 bp, Homo sapiens
tttttttttttttttcacttttaaaaaatgttttaattctttaatatacttctaagtaacaataacacgtaagacatatagtaaaatttcttattcgaataatttttttaaaaaaccttacattaaaaagtttcttttaaaaataattcttacgttgttagttcaagtgaatcttatttttatttatttatttatttatttgagacactgtctcactctgtcgcccaggctagagtgcagtggcacatctcagctcactgcaacctctgcctcccaggctcaagcaattctctgcctcagcctcctgagtagctgggattacaggtgcctgccactacgcctggctaattttgtatttttagtacagatgaggtttcaccatcttggccaggctggtcctgaactcctgacctcgtgatctacccacctcggcctcccaaagtgctggaattacaagatgtgagccaccacgcttggctcaagtgaataattcttaaaaattgaaaaacaattacttatttctctaatatgcttttagtagagtacaggagttgctatggtctgaatatttgtgtccccacaaaactcacaggttgaaaccttaattcccgaaggtatagtattaggaagtggaacctttgggggatggattaggtcataacgggtctcccaagaacttagctcgaacccttccactacgtgaagaaccagctagaatgcaaccatcttatgaaaccagtgagttgggccccctttacagaaacccaaattctgctg

SEQ ID NO: 3571 - DNA, 782 bp, Homo sapiens
  misc_feature (81)..(81): n is a, c, g, or t
atgaactttctgcccgcacaacacttttctcgccctattcgggaatgcccggcgtagctcgatacccccgatgcatgacanccacaagggaacatcctatcatctgaaggctcattcaatttctctagcagcagtaatatttaataatgtttcattgatttgagaagccttcgcttcgaagcgaaaagtcctaatagtagaagaaccctccataaacctggagtgactatatggatgccccccaccctaccacacattcgaagaacccgtatacataaaatccttacttctcttccttctctccttaatgacattaacactattctcaccagacctcctaggcgacccagacaattataccctagccaaccccttaaacacccctccccacatcaagcccgaatgatatttcctattcgcctacacaattctccgatccgtccctaacaaactaggaggcgtccttgccctattactatccatcctcatcctagcaataatccccatcctccatatatccaaacaacaaagcataatatttcgcccactaagccaatcactttattgactcctagccgcagacctcctcattctaacctgaatcggaggacaaccagtaagctacccttttaccatcattggacaagtagcatccgtactatacttcacaacaatcctaatcctaataccaactatctccctaattgaaaacaaaatactcaaatgggcctaaaaaaaaaaaaaaaaaaaaaaaaaaaaaaaaaaaaaaaaaaaaaaaaaaa

SEQ ID NO: 3572 - DNA, 659 bp, Homo sapiens
tttttttttttttttgttttgtttttaatttctatttttctggttaactcagaaaccttaaaaatttcttcattttgccactgtcttctctggacaactcttgctccctttccccctgggctgggcaactctatgagcacccacactcctccacgatcatgttctgaatgtcctttttgatgatgttttgaccatcatcatagtacaacatggacatgggtctcagcttggtgggcacacagcacgatttgaggttggcaaaggggctatggccccgcatgcggtagtggttgatgactgttgagtggaaggacagtgaggacccggacgtgcctgctatatggctcgggcactcaccctcgcagtagttggcatgatagccagagggagcaatgatccagtcattccagccgatgtccttgaaactgacaaagaactgtttcttacagcagatgttgaccttgccatcacactccaagccccgccgacgccggcgatgagggtggtcttcagactgccgggcctgcagcatgaggaaaggtctgtgcgactgctccttttcctcatctgctcctgccccaccttcacctccgccttctttttcccttccccctcctcttctttccttcttcttcttgcccaggagacccagctggcgc

SEQ ID NO: 3573 - DNA, 659 bp, Homo sapiens; identical to SEQ ID NO: 3572

SEQ ID NO: 3574 - DNA, 607 bp, Homo sapiens
cgtcgctattaccagtggttgatgcgggttttggcagtagcatcgatgtgctgtggatatcggtttgactcacggggatttccaaagtcttccaccgccattgacgtcaatgggaggtgtttgtggcacctagatcgacgggactttccaaaatgtctgtaacaactgccgccgccattgactgctatatggttcggtaggctgtgtacggtgggaggtctatataagcagagctcgtttagtgaaccgtcagatcgcctggagacgccatccacgctgttttgacctccatagaagacactcgggaccgatgccagcgctgccggagctctagcctaggccgcgggacggataacaatttcacacaggaaacagctatgatccattaggcctatttaggtgacactatagtacaagtttgtacaaaaaagcatggctggtaccggtccggaattcccgggatctagaagccaggagctgattgaccttttaacttttttcagtggccacattttggttatcgatgtacctagaagtatgtaaattagattaaatttctcttctggaaacaccaaaaaaaaaaaaaaaaaaaaaaaaaaaaaaaaaa

SEQ ID NO: 3575 - DNA, 733 bp, Homo sapiens
cggagattcacgcccagaaaggagcagccactctggaaccgtgtacatctaagagccctctgcagcacctttcttaggttgattcagggagggaagctgtgggaggagtcggggaaaggcctgggagcagtgcttcctctgctccctgctgcaccaacatcttggaagcttggtggaggtggggacacaactcttaccagtagtgctgctcttcctcctctcccacacccccactttctcttcccctgttccaaatacccaaaggttttaatgtgatctcctggcattggagaccctgggcaccactgcacattcaggccagtgagcaggtcaggcccatgtagccaccggaggtggcaatgcccgagaggccatcctgcaggcactagctggagatgccagtgctgagtgactccaaggagattgttttccttctgaaaaagcagcacatggctgggcgcagtggctcatgcctgtaatcccagcactttgggaggccgaggcgggtgggttgcctcagctcaggagttcgaaaccagcctgggcaacacggtgaaactccatctctactaaaatacaaaagctgtagctaggcatggcagctgctcaggaggctgaggcaggagaattgcttgaacctgggaggcggaggttgcagtgagctgagattgtgccactacactccagcctgggcgacagagcgagactccatctcaaaaaaaaaaaaaaaaaa

SEQ ID NO: 3576 - DNA, 765 bp, Homo sapiens
ttttttttttttcaattggcctttattgactgtatccaaaggattttttgaaggcaccattgccagcaaagggaagggaggagcactggctgctgacattgacattgacactgttggtacagagggctggggagaggatgcagagctgcagttggatgaagatgggtttgtggaggctacagaaggtttgggggatgatgctcttggcaagggacaggaagaaggaggtggctgggatgtagaagaagatctggagctccctcctgagctggatatatcccctggggcagctggtggggctgaagatggtttctttgtgcccccaaccaagggaacaagtccaactcagatctggtgtaataactctcagcttccagttgatcacatcctggcaggctctttcgaaacagccatgcggctccttcatgaccaagtaggggtaatccagtttggcccctacaagcaactgttcctacagacatacgcccgaggccgcacaacctatcaggctctgccctgcctaccctccatgtatggctatcctaatcgcaactggaaggatgcagggctgaagaatggtgtaccagctgtgggcctgaagcttaatgacctcatccaacggttgcagctgtgctaccagctcaccacagttggcaaatctgaggaggctgtggaaaaatcccgtcatccttctcatgtgccacttctgttgtggcataacacgagatgcgaggccagagtctacattgcgggagtctgtggttg

SEQ ID NO: 3577 - DNA, 731 bp, Homo sapiens
tcacgctgtttgaccccatagagacccggaccgatccagctcccgactctagctagccgcgggacggatacatttcacacaggaaacagctatgaccattagcctatttaggtgacactatagaacaagtttgtacaaaaagcaggctggtaccgtccggaattcccgggatcgcgagcggcctgatatcatggtcatttgtaggcatcaagagtgtcagtgtcccagtcagaatttgacttaagatattgcatttctgaaacttactcagtttttctacgaaataaatccttaaaatacccaagtgcatgtacttggcaatatcctcatactttccaaagtggtcaaatggtagtgctcaagagaaaaatgcttctctagtatctgtttagggaaatttccttcctgtgaatgtcactgacgtgaataacatgagtcatagaaacatacagcacaactgcaaattaataaaggaacatgtatttcctttctaaaataatttaatgttatttccctactctaattacaaaaacttttaaaaaataaaatgcaaaacagaaaaactcatatttaggtaagctgtttctaaaaggctttttcttaattctctttcaccatttactgtaatgcagtgtaatatctaactttaatcgatgctgtttcattcctttgggtaagccagaggaaaacctatcctcaggaagcttccattttgtaaaaaaaaaaaaaaa

SEQ ID NO: 3578 - DNA, 130 bp, Homo sapiens
ttttttttttttttttttgttttttttttggcactttcaagatcatggtttatttattacttcagataaaaagatagtatacatattagggaatcccttaaaattcaagctctagagttatacaccatct

SEQ ID NO: 3579 - DNA, 737 bp, Homo sapiens
tttttttttttttttgagacggagtccttctctgtcacccaggctgaagtgcggtggcatgatctcggttcactgcaacctctgcctcccagtctcaagcgattctcccacctcagtctccagagtagctgggattacagacacgtgccatcacgcctggctaatttttgtacttttagtagagacggggttttgccatgctgaccaggttggtctcgaattcctggcctcatgtgatccgcctgccttggcctccccaagtgctgggattacaggcatgagccaccatgcccggccaaaaaacttgactattcttgatgccaagacaagagaaacttaattatgacgttagaagtttcaaaaatacagtgacttctgggacacttctagtagccaaaaatccacagatgcccagacccctccttctgcattccagaatcagatgtttacattccaagacagaaagaatctgaaacaacggcctacaagaaatttgggaaatgacatttgatctcattttcctctcaattggaagtcatgatatccatgaatatcaaatggcacccaataagctcagaagtaggtgagaattatgatctctaaaacgcaggtgctgatttctaatccttcctcacaaaattccggatcacaaattgagggctgatgagaagatcttacaccgaaggcactaactggcactaatgtgagtcagcaactgttggaagtactccaggaga

SEQ ID NO: 3580 - DNA, 763 bp, Homo sapiens
  misc_feature (171)..(173): n is a, c, g, or t
agtacatgaccttaatggactttcctactgccagtacatctacgtattattcatcgctattacctggtgatccgttttggcagtacatcaatgggcgtggatacggtttgactcacggggatttccaagtctccaccccattgacgtcaatgggagtttgttttggcaccnnnaaatcaacgggactttcccaaatgtcgtaacaactccgccccattgacgcaaatgggcggtaggcgtgtacggtgggaggtctatataagcagagctcgtttagtgaaccgtcagatcgcctggagacgccatccacgctgttttgacctccatagaagacaccgggaccgatccagcctccggactctagcctaggccgcgggacggataacaatttcacacaggaaacagctatgaccattaggcctatttaggtgacactatagaaccagtttgtacaaaaaagcaggctggtaccggtccggaattcccgggatcgggattaggtgaaagaagctgagctgaacacattacgatggatgatggaaacataagactatccagaaatcccagtggtaatgggcgaagtttattcagcatccggcatggacttatcgtagttggggaaacgggtgttccgaataatatcctggaagttatcaggacacctattttaaatataggcctgaattttgtaaagtaatatttaaggtggtccgtgataattaaataaaatgcttaattcatgaaaaaaaaaaaaaaaaaaaaa

SEQ ID NO: 3581 - DNA, 706 bp, Homo sapiens
  misc_feature (679)..(679): n is a, c, g, or t
tttttttttttttttcaatatatgtggttttacattgaatatactacaaaacttccttcatttttggtatatctatgaaataagctacacaaagactaaaacttcaccaaatacaatggtattaaagcaatttaatggtaaaataaaatcaaagttcaggctacctggtaacttgaggccagaactgttgtaaagcaggaggcacaaagccaattaaaacatttcccttattgtgcatggaaaataacaaaaaatttttttacccaagcttatgaaatgtaccaggatcacatgtaattgaataaaatgataccaaatacccaattcttctgcaaaataaaaccccctggtcatcaaccaggtttgtatctaaattaatgatctcatttctgcatttccccccactacctacataatcaagaatttataaatgcttttgaaaagcacctatataattctgttggttccctgaatcatgggttgagtaaaattttacagctgttcaccaataatctgtgtgggatttatggtttgtaacaatttgggaattgtgttttcaaaccactttctggaaatgaggatacatttttccaagagcctgctggctgacttctcacctagtgttgaccaaaaatgaggtaacgattcatttactaagaggctgggataatcctaactnggttagaggattcacatctgggacacg

SEQ ID NO: 3582 - DNA, 685 bp, Homo sapiens
tttttttttttttttaacgttccaattaatttatttaaattcattaatgttgcaaaaaatatgatgtgcaacaaatcaagacacaagttatattcctaacaggtcaaagaaaatattacatctccttagtaaatcatgaccaactctggtatttcttacagggaccacattaatatcttgcacacacagacatcagaactgaatttctgacagtactaggctgggcaacatcatcttaagagtaggaaaatatcacagtacattaattttgtctaaatgacagcaatgaacctgtggtaacaaaagtatttttggaatagatatcaaagtgtgttaatgtcttaacaaactctgaatgtgttctgtgtgaatagtgctccaagggctgtgcaagtcagggccctgaacatcatcaatatttactagctaggtttacacaaataaacaagcaacgtgttaaacggacattaaactttacaaagtccacatacaaaaagtgcaggtagaagctgatgaatgttattttccaagttcctccttagccaaacgcataaaaatttcaaaagtgcaaatattctaacttctggtgaaacatgattctaagacatcctacaagcctagtatcattaatttgaaagcacgaaaatgattttcaatttggtgcttaagtgcttatgtgaatttt

SEQ ID NO: 3583 - DNA, 692 bp, Homo sapiens
ttttttttttttttttttttttttttttttgttttttttttttttttttttttttttttaatatgctactagaaagttttaagttacatatgaaacgggcattataggccagatgcagtagcttacaccggtaatctcagcacttggggaggctggggtatgaggaggccaaggggtgaggatcgctgtgaggccagaagttggagaccagcctgagtaacaaggaaaaatccccatctctacaaaaaattccaaaattagccaaagtgtggtggcagtgccgtgtggtcccacctacttatgaggctgaggtaggaggatcgctgtgagctgaggagtcccaggcggacagagagctggtgatggtgctacggaactccagactggggcaacagagtgagactctgtcaaaaaaaaaaaaaatacgggcatcatatgtgtatggggcagcacggacctaagccaggctcaaaggacttctttacacttatgcatacattctggatatatatggagcattatattcggagctatgtttaaatcacggttggacctccaggagcctactactactgtgttggatagttaaattcggttacatagcaaacaaaatcccttagatgtgatgttccgaggtggaaatacctaggaaagaagcacgggcttccggtcgactcagagcgaccaaaagg

SEQ ID NO: 3584 - DNA, 732 bp, Homo sapiens
tttttttttttgtttctgggtaatagaatttattcaaatgtgccttaatataggcgctggggctgcccatggtgctctgatatataaggcccggacattctgccagtttttcttgagcaatgacaccaagaagttgacagccaggtgaatgttatacacaagctcatcgcctgtcatcttcacgtgaccaacagctacagccagacataacaccttcttcatttggaacttgattgtggacttcacctcatccacttggccaccatgttttcgtgtgtgtgagcagggaagggaactttcctgccttatttaaacctgggccgaggattcgtggaatctgcttgatcagagactctgaggccaaaaacgcatcatacttcttggccagcttcttgaccagttttttattcttgtgagttttttcagcgcctcgatgtccatgtgggggatatccacggccttagcctcgtcacagagcatgctggtcccccaggacacacacagagaacttagggcggggagtggacttaagcccggagcgtcacattcaccagcagccagcctggcttctcaggctggcgggggctcggcagaggctacccacgctccctcatgtttaagaccaggtgggggtcgtccagcgcgcagcccggacagaggattgaactacctagcccatcagtacgacgtgccgctcggtcaacgggacctgcagggagggccagcccgggg

SEQ ID NO: 3585 - DNA, 732 bp, Homo sapiens; identical to SEQ ID NO: 3584

SEQ ID NO: 3586 - DNA, 655 bp, Homo sapiens
gcagtatgagagttgtaatggcccgactgttgagtgagggggagcaggggatcccaacggcttgcgctgcctttgcgcagcagccggcgggcggccacgtcgcggcctggctggggtaggagagggcggtccccagtgcagttgggtgaactaccgttgcacactggagtttctggtgtctttgcttggaactgacctagctcgtggcagggggaactcggctagcggccccacagcccctgctgactcaaaacaactgagttgtaagacgttcatcgccgtgttatccttgagtaaagaatgaactctggaagcccagccagggacaatgcaccttcacagagattctgcactaatctgagtgaaggtctaaggttggaatctccccctcatggagagaagcttgtatggctgtcatgcttagacagtgattcctgcaacttgaccttcaggctgggagaggtggagagccatgcctgttctccttccttgctatggaattggctgacacaatatcttccgcctggtgctgggcatatcctaagaacttacaactttcctgtattatcctgtgtgagcagctgtcaccttcatgggggaaaaatgcctgaaaattagggggcacttcaagtagatagcttctgattcctatatt

SEQ ID NO: 3587 - DNA, 733 bp, Homo sapiens
  misc_feature (468)..(468): n is a, c, g, or t
tttttttttttttttttatactcactaatttttttattatatgacaggatgactaacttttcccccattgctggttttacagaatcttgagctcagaaaatatatctccaggttctctgcagtttctctgacacacacaagatgtaatccacagcatcttccatttaaatgacccctcattgggcaatcaaatgaatagtaatcattttagacttattaggggattacaggcaattcttctttattccaaggccaattttcccaaaaaaaggggggttggtaatctctgagttactgtgagcatccagaaaagacaaattttcacagcttgggaagatgtgggaaatgtagggtgggctagtgtttttcctttggggaatctttatggtctttaatatattgctgtcgcaaggctgaatgtaacacagtcttttctcttttctcatttcacagttgctgttttcattnggtcacccgtgttagatattcccatcccacatgttcttggagcagggagtccatttgttgcttgcacaagacatttttttttccaaataagtgggagatttctataagcgtggcattgtttgtagcttgttgaaagctgctgtagtaagtggttccaggctacagttgactgatcagacttctttccacctttagctccagagcagtgactgccagacagtttgggtatgaacagaggtgtggcatccaatgggccccatcacaa

SEQ ID NO: 3588 - DNA, 730 bp, Homo sapiens
  misc_feature (329)..(329): n is a, c, g, or t
tttttttttttttttcatatcaacagaggttatctggaagagagatagcaaacaatttctgtgtgtcttgtgacctttaaattcaaaacaaaaaaaataagccactcttttaaaagtgctcagtctaaaaaataaacacgtagtctagaggcggcaaggcccgtgtgtgaagcctggctcttcctcggctaagctgtgtgacggtcggcaagtgcttaccttcttgaagctgcattctcctcattcttaaaataaaaatggtaataacaggaccgcctcattgagcttgtgtgaagagtaacagacaactgcagccaagtccccagaangtgcctggcacatagtgagggcttgatatgaggtagctattatcaggacatgattccgtgtaatcttcacatttttttactttgacaatcaaaaagccaatacagataattgaaagacaagaaagtgacatcagccaggctccttagcccaaaattcaaccccctccctctctcaaaccccagagctccaccttgagaagggcgggttgtggcagacacaccttcttatatttaggaatattccctgctgggcgccagggtcacacctgtaatcccagcactttgagaagctgaggcgggtggatcacctgaggttaggacttcgagagcagagtggcagatggtgaacctgtttctacaaaatggaaaaaatcagcgggcgtgtggctgatgcaaactgg

SEQ ID NO: 3589 - DNA, 736 bp, Homo sapiens
ttttttttttttttctgagacagggtctcactctgtcgcccaagctagaatgcagtggtgcaatttcagctcaccgcaccctcgacctcccaggcttatgcaatcctcccgcatcagccccccgaatagctgggaccacaggcacatgccaccacatcaggctaattttttttattttctgtggggctgggagcaggtagagatggggtttctccatgtgtccaggttggcctcgaaatcctcggctcaagagatccacctgcctgttcctcccaaagtgctgggactacaaccatgagccaccacaccagtcctagaatttttctactcatttagcaattatgaataatgttactatgaacatttgtgcacaagtttttgtatgaacatatggtttaatttttgaggcatatatacctaggagtggaattgctggtgatataactttgatgtttgaggaactacaagactgttttccagaaaagctacaccattttatatttccaccagcagtgtatggaagttctaatttccctacatcctctcccacacttgattatcttttgaatatacccaccttaatctatgtgaagtggtatctcatcggggtgttcatttgcattttactgacagctaagatgttgaacatatttcatgtgttatggtctctgagtatgatcctggaaaaattttggacaaatccgatctttggctgggcagatggtcccaactaatc

SEQ ID NO: 3590 - DNA, 733 bp, Homo sapiens
tacgactccccccctgaaccgcatggccgtagctttcgttggagtctatataacagagctcgtttagtgaaccgtcagatcgccttggagacgccatccacgctgttttgacctccatagaagacaccgggaccgatccagcctccggactctagcctagccgcgggacggataacaatttcacacaggaaacagctatgaccacttaggcctatttaggtgacactatagaacaagtttgtaccaaaaagcaggctggtaccggtccggaattcccgggatctcctgtggaggcctgctgggaacgggacttctaaaaggaactatgtctggaaggctgtggtcccaggccatttttgctggctataagcggggtctccggaacccaagggagcacacagctcttcttaaaattgaaggtgtttacgcccgagatgaaacagaattctatttgggcaagagatgcgcttatgtatataaagcaaagaacaacacagtcactcctggcggcaaaccaaacaaaaccagagtcatctggggaaaagtaactcgggcccactggaaacagtggcatggttcgtgccaaattccgaagcaatcttcctgctaaggcccttggacacagaatccgagtgatgctgtacccctcaaggatttaaactaacgaaaaatccaataaataaatgtggatttgtgaaaaaaaaaaaaaaaaaaaaaaaaaaaaaaaaaaaaa

SEQ ID NO: 3591 - DNA, 733 bp, Homo sapiens; identical to SEQ ID NO: 3590

SEQ ID NO: 3592 - DNA, 545 bp, Homo sapiens
tatgggatgggagaagctcgcaagctattacaactgaactcaggaagcagataatcagctaggaaagaggtacccttaaatgccaggctgtatctgagagtgtatctccctggatcagagcccagagtacaagctaaacaattccttcataaatcagcacacatcagcttctaaaatcagcaatatgtctccaaacatcttgaactgacattaagaaatgctgcaccattgagaaaatggtttccagttatttgaacttaaagaattaacttgttgaagcacatctttaatcattgataagttactgaattcaaagagaagtaataatgaatggtaaaccaattaactaggaattatatttcaatttttttatgttggcaaacttgatgattagttgatattttttcaatatttaggaacaaggaacacatataaatttcacattcgtgtttttagcattttgaccagcaattcatttctcaatttcatgtgtgaagctaaactgatgatctggtaatcttcgaaggtgggaattagcctgaaag

SEQ ID NO: 3593 - DNA, 697 bp, Homo sapiens
cccagtacatgacctaatgggactttcctactggccagtacatctacgtattagtcatcgctattaccatgtgatgcgttttgcagtacatcaatgggcgtggatagcggtttgactcacggggatttccaagtctccaccccattgacgtcaatgggagtttgttttggcaccaaaatcaaacgggactttccaaaatgtcgtaacaactccgccccattgacgcaaatgggcggtaggcgtgtacggtgggaggtctatataagcagagctcgtttagtgaaccgtcagatcgcctggagacgccatccacgctgttttgacctccatagaagacaccgggaccgatccagcctccggactctagcctaggccgcgggacggataacaatttcacacaggaaacagctatgaccattaggcctatttaggtgacactatagaacaagtttgtacaaaaaagcaggctggtaccggtccggaattcccgggatgagatgcactgaggaagtgcactggcactgctggggactcacctggggcccagggctgaggcttctcgtgtccttggagctgctgtcctcccgaggagcgtccacactgcagccagctcagcctcaggtgtcctatctggttttgaaaccaatctaagtgggaaaagaagattcaagttttatccgaaaaaaaaaaaaaaaaa

SEQ ID NO: 3594 - DNA, 690 bp, Homo sapiens
cagaagtgactccccagttactcaagaagtccagttccatgatttgcccgctaatcaagcctaaccccagggtccacctggcttcccgtctgcagaagaggcctataacttctttactttcaactttgatcccgaacccgaaggatcagaggaaaacccaaagccagacatagagcgggaactaatccagaggaggaggaaggggaagaagaagaaccacctgcaccaggaggaggaaaggaaatggatgaggaagaactgcttaatggtgatgatgccgaggacttcctattgggcttagatcacgtggctgacgattttgtagccgtcagaccctccagattatgaaagccatccctgatcggctgccagatggaaagagaaatgctcttcataccccgtaggcagacagagacctttgcttcctgttgctgcctatcactccccctatgattcaagctcccaggcagcacggggcctggcctggattccccgagtctcatctgtgcctggcacccaggaggctctcagtaaagatgtgtttctaggaatgaataaagccctgaatgaataaaatgaggtaatgatcacgttccatccaaataaacttgttcatttaccaaaaaaaaaaaaaaaaaaaaaaaaaaaaaaaaaaaaaaaaaaaaaaaaaaaaaaaaaaaaaaaaaaaaa

SEQ ID NO: 3595 - DNA, 721 bp, Homo sapiens
ttttttttttttttgtagaaggaagggctttattcagctgggagcatcggcaagctacagccttaaaatctgagctcctcaagtgcacaatttctgtcccttttaagggctcacaacactaaagatttcacatgaaagggtcgtgattgattgagcaatctaggggctatgtgacaggggtttcgtgcactggtacagaacacaacagggagtttcacaatttttttatacaatgcttggaatctacggataacatcaggttctaagtcgtaagttgatttttaactactaggtttaggccaggcaggcccagggctggtttcaggcctggtgccgggctgcctgtctttgatttcacttccttgtttttttcttaaaacaggtactgagtataaaacaatataaaacaatatgagaaggtctctctcttccctcaagagtgtatgactttgctgcccaggatgatcttgaactcctggcctcaagctattaatttcttcccaactcagcctcccaaagtgctgggattacaggcatgaaccacaacgcccagcttaacaggatttttcagagagaaaaagttttttaatttaaatgaaatccaccaatttatctatttttcttttacggcatgtgctttggtgtaatgtctaaaaactatacctacgccttaggttgtaaagatagtctgttccagtttatagcttcatttacatgtgat

SEQ ID NO: 3596 - DNA, 679 bp, Homo sapiens
aggctgcgatagatgaactcaccgggagctaagagcatcactgatccctggacagaaaaaaagacagtgtttttatccacccctttctcattttccagttggacaggcctggtttgaatcccagctgtgccacttcccagctgtcaacctcaggaaagtacccagctgcctgtgaaatggggatataatggcatcacctggctttcagagctactaggagggccagcccaggaggaccaaccatcaggcctcaaccaaccgtcactagtattactattcagtaattcatttgtttaataactatttattgactgggcccagtggcttatgcctataatcccagcactttgggaggccgaggcgggtggatcatgaggtccaggtgttcgagaacacgcctggcccacatgctgaaaccccatctttactaaaaataccaaaattagccacgcgtggtggcatgtgcctgtaatcccagctgctcaggaggccgaggcacggagaatcacttgaacctggcaggcagaggttgcagtgagccaggatcgcacccctgtacccccgcctgggtgaccaagccagactcagcctgggtgaccaagccagactcagtctccaaaaaaaaaaaaaaaaaaaaaaaaaaaaaaaaaaaaaaaaaaaaaaaaaaaaaaaaaaaaaa

SEQ ID NO: 3597 - DNA, 725 bp, Homo sapiens
  misc_feature (261)..(261): n is a, c, g, or t
  misc_feature (425)..(425): n is a, c, g, or t
tttttttttttttttaagtaaaaaggggtctccctctgtgcctaggatggactgtgcagtggcacaatcatagttcactgcagacttaaactcctgcattcaagcaatcctcctgcctcagccttccaagtagctgggactacgggcatccatcaccatccccggcttagaaaaattactaaatcttttttcaagcagatgttctttactaacacatactacaacaaccttatcacctgccatcttcatatttctgtgcantgttaacattctaacaaatccattttaattagatgctaatagtattaaagagaagaaaactattttatcctatctcagtaaacaaaggtaaagctaacagatgaggtttattcctaactttacggttaatgatacaaaaagcacagtgaagactaagcagaatntctttggagagcagagctacatctgatatgaaaattatcgattgagacccagatgtcatttttagagagtcacttttctaaccaataaccatgcattaagatagtcaaaaaactgtaaactgataaatgtaaagagtactcaaatcaatgtacaagaagggcaggtgaaggtaatcagcctctcccatctagcaataagtagactactttatccactgaggatttaaggccaagtaaatgctcctgggcagaactttaggggattaagtctatggaatacatctcagtcccttagtgcca

SEQ ID NO: 3598 - DNA, 648 bp, Homo sapiens
ctgctagtacatctacgtattagtcatcgctattacctgtgatcggtttgtcagtacatcaatgggcgtggataccggttttgactcatcgggatttccaagtctccaccccattgacgtcaatcgggagtttgtttgggcaccaaatcaacgggactttcccaaaatgtcgtaacaactccgccccatggacgcaaatggtcggtaggcgttgtacggtgggaggtctattataagcagagctcgtttagtgaaccgtcagatcgcctggagacgccatccacgctgttttgacctccatagaagacaccgggaccgatccagcctccggactctagcctagcacgcgggacggataacatttcacacaggaaacagctatgaccattaggcctatttaggtgacactatagaaccagtttgtaccaaaaagccaggctggtacccgtcccggaattcccgggatcaacacctttttcatacaaggcccaggaggcttagtccagtctgtgctcctgggctacaaggacccagcctgagatggtcccatctgcagggccccgcaccagttggagcagatgcctccccaccaccattgccaaggtccaataaaatgcctcaaccacggagaaaaaaaaaaaaaaaaaa

SEQ ID NO: 3599 - DNA, 608 bp, Homo sapiens
tttttttttttttttttagtaagagatggggtttcaccacattggccaagctggtctcaaactcctgacctcacgtgatctgcccaccttggcctcccaaagtactgagattacaggcatgagcgagcccctgtgcctggcctcagtatatttttttaataatactcaattaggaatatcaaaattgccaaataatttaatttctttacatatactaaattaagctgtatgacaaacatttacatcaggtcagtctggctttgtggctagagttatcagttcatttaggataatgtcaaaagtctgaatttgaatcccttttggaattataagacacaggccaaatggctttcctgacatctcaaccctgatcactaggcttggccctaacaggaattagtcaatttggtcctattttgacactgcagattaacataattgggagcaggctgtcctctctcagagggcaagcttgtccacacccaaatacaggtgtctcctgatcctagtttctcaactagcatggagatctcaacttgatgcaaaagtcccctttaatgaaccaacaggtttggtttccaagtagtgtatatgccccctgcccctcg

SEQ ID NO: 3600 - DNA, 677 bp, Homo sapiens
aaaaattatggatacgtgtttgaattgcaaactattcctcaggaattccaattaaatttattttacttgaataggaatgatcataaaagtgattctttttttgtgactagaaattcttaagccgatggtcactatagctcatccttaatgtatggctcatttgctttggtcactaaacggtttgtgttagaaccaccaaaattatagcttttaagagcttcctttgaccactgtctttttcttaccctacttctcttatctttgatcgtatatttctcataatgtgaaatatgatgagattcacttaggggcagcatgttagtttggggaggcaatgtcaactgtgtctctgaattcctgtcttccaaattgaagccagaccatgctgatgacctcaagtagcactgactatttgacaatagggctgataatgtaatcggcttgaatttggacttagtaactttaatgtaatactttcagagaaattctctttcaggacaaagcagagagtccaatttatgagggatagatgtgtatctcttaaagtggtcatattattattaatttggccaaaagaagaagaatttatgaatatttatactataaaatgcagtaacattctacttgacttattacatttaaattcttgtggtaattgaatgttacatgtcagagga

SEQ ID NO: 3601 - DNA, 730 bp, Homo sapiens
cgtaagtacatgcccaacatgaatcaccttagaggtaggaatggaacccaggtctgtatgattccaaatttcatgttctttcaataaagtaagcaccattagaaaggagacctcactctccaccccctatccctgcccacttctccgatggtataattcagatggaccggagaggaaaagagaaaaacctaggaatgggagtgatttcttaaggaaaattttttaattctggattcttcaaatttttattgaagaaagggggttcttcaggggaaaaacacttcttctgagaaaaacaatactcaacacaaccacagtgatttcccccttctcttttagagggactccgggaagagagtgaagaaagcagtgatgccttagtgtcctcgcagttatctacaaacactcaccgtgctggcaagtggcctatcaagctgtaagcagttcactaggacatgtggaaagtttcttttccctcttttgattttctgtgcatttccaaaggagatatgaatgttcttaggaaaatgtgtgataatgagttaaaagtcatcgtaagatcctgcttgccctttgcccacagagtacatttcagtctaatatgtgtgggtaaaactcaggctcctgatggcttccttcttccacagtcctcacccaggtgttaaaatctcctcactcactagttcaggctcagtcagctcagcctatcaatatagccaatatccgatga

SEQ ID NO: 3602 - DNA, 615 bp, Homo sapiens
ttttttttttttttttttcacaataagtttagaatcagaaaaaaaaattttactaaatcctaatgaaataacaatcttccacataaattaggtcacaaaacaagtaagaaagcattcaaagtgcgctgtctttctttaaagaacccttgtctaggcaacatatttaacactttaaccccttcaattctccctgaaaagtatttttccattcatcatcagtggggagtaagtactccttcctcgaaagctcttaacgacagcacagtcttcactctaggcccaatttttacctggcccatgcctctagcctttggttcagtttctcctgcttagggcacctttcatcccatctagatgtgtctctctttaactattctaggagttgataaaaagggctaggaagtaggaagtgggaagaaggggaggggcgtaagagctctagcactctattttacaggccaaattccttggcctctgaaaaatgacagagacaaaatgaccataaaaaacctggcattttacaaatgtttctgagactatcacatttaaagagaggatgggaagcataaggagggcggatcacgacgatcggggtcgagaccagcatgagcagca

SEQ ID NO: 3603 - DNA, 687 bp, Homo sapiens
ggactgtcctacttgcagtacatctacgtattagtcatcgctattaccatggtgatcccgtttttggcagtaacatcatgggcgtggatagcggttttgactcacggggatttccaagtctccaccccattgacgtgcaatgggagtttgttttgggcaccaaaatcaacgggactttccaaatgtcgtaacaactccgccccattgacgcaaatggctggtaggcgtgtacggtgggaggtctatataagcagagctcgtttagtgaaccgtcagatcgcctggagacgccatccacgctgttttgacctccatagaagacaccgggaccgatccagcctccggactctagcctaggccgcgggacggataaccatttcacacaggaaacagctatgaccattaggcctatttaggtgacactatagaacaagtttgtacaaaaaagcaggctggtaccggtccggaattcccgggatcatttctatagtgtgttactagagaagtttctctgaacgtgtagagcaccgaaaaccacgaggaagagaggtagcgttttctcctgagcgtgaagccggctttctggcgttgcttggctgcactgccgtcagccattgatgatcgttcttctctccgtattggggagtgagagggagagacgcggtctgagtgaaaaaaaaaaaaaaa

SEQ ID NO: 3604 - DNA, 659 bp, Homo sapiens
  misc_feature (6)..(6): n is a, c, g, or t
  misc_feature (325)..(325): n is a, c, g, or t
ttcttntggaatgtatttgattgataagaaagtttaaacatgttttcacctcaatgtagaaatacagggtttgtttttttttttcttttagtgctgacaaaataaaatactcatttttgcataaaaaggttcctaatcctttgcagaataagtttgtttactctttataccaaaattcagtgaaggcatcctacaaagtttggagttagcattacatttttaattatttactatggctacatggtataatggagttggaaataaaacccagctatatgacaagtgcattcccgtgtgcaagaaacgtgtgtggctttcaaattangcaggcatcgaaaatgaatgataaaaagtcgctgtgtaaggggaaatacagcctaaatgtgtagaaagccagaaatgatacaaagttcagtcagtgccaaagtgaaataccttctaggtgcagctttaacttaatcatacgttttaaaggacagatacagaaactataggaaacaggcttaaatttggctccacattaatgtagacgttatagaagtttcccttaatttgtaaattgcattcacccgagaaatttctcataaaagactaatttctgtgtaaagatattacgggctgggtgtggtggtcaatgtctgatatccaggcactctggg

SEQ ID NO: 3605 - DNA, 769 bp, Homo sapiens
  misc_feature (440)..(440): n is a, c, g, or t
ttttttttttttttttttggaataggtgcatgaagtttatttaaagactaacatcccaacgtgggaaactcctaataaattctaaactcttccgaattttagaaccttgatatttctttacaccttttataaaagatgcctcttgactagggctaagcaagcagtgtgtacacaaacagaattgtgtgcaagtatacacacaccaaatgcactaataatgaagaagagagaacaaaatggaatttccaaaattggccggaaattccggggaaaccttccttcaaattaatggccttttccaaagggtgggaccaacgattaaacttcgagccaagtttttttcttaaggtcttccatatcattaaaaacaaggcatgccaactctgactttataaatctaaaattcagtgatctgcacagtttctgagcttgaagtattngaatgtgactcatctatttttttttcccattttccttctgaggtagagttaccaatccaattttatcaggaccacagatattttgagctaaaccccatgatcttttcatacagtaaaaataatttttatgaaaaaagaacgcaggcttcccaggccatggcacatagatatatttacaatttttaaggtaataattaaaaagtggtatggttatattttaaaaaacagccagcgtgtattattcgtgtcaccaagaattattaatgaggatgctgcccaggctggaattttatagtcaggcttaaaatccatcatgatgaagagtgttc

SEQ ID NO: 3606 - DNA, 792 bp, Homo sapiens
tttttttttttttttatgatggtttggactgatgagaaggggggtgctggcttctctttccactgacgacatcagtatgtgaccctcaaagctgccgctccaatcaccatcatccctgtcccaggtccttgatgtggttaagatatgagaaaagtactgctctctaacagactgcctgaacttttacccattctatgattatgtctttattctctgtattcagtattttccttgttaacttaagaaatattttttgttgatgataatactgatgacggaaaagtaaaaaacgttgttaggtgccaaaataacccttggcagataattctgggggaaaacctcccggaatttagtggggaaaattaactggggttttggtattgatacttacaagcttctcactaattcctaggaagaagagtggtatactcggggcgtgcaaagggagaaactcagggaaacaaatatggttataaaagtgttagatgaagggtgtggttatgtatgaaatagagctcagttttccacattacaatcagagaaataggagctcaaagaaagtgagagctgcttaagaaatcaactaatacaattctttcctttaggaaataacaaaataaaagtcagagagaataatccttggcctagggatgtaaatagcatcagggtctggatttaaacatagagctcctaattctctggttctaatttgtgatcaagttttatccatccatggcaaatacgaaaataggatcactgaacaacattttctgatgtgaatagtaagcagac

SEQ ID NO: 3607 - DNA, 758 bp, Homo sapiens
tttttttttttttttttttttttttttacagtttaagacagcaccagctttattggccactcagagcctggaaaccacactgtgcaccgagagctcacgataaagcaatgtgcattttccagtgcacagtcaacaaggcggcctccccaaaactagctccgggggttgcgccagacatccatttccggcaacaagaccattgatccttaagggtcctctgtcctgtctgcgcatgtaggctctgctgggcaggatcttcctttccaaagccctcttgtgagtaaaataacattttaaaaactatggtgtgtggatcaggcgcagtggctcacgcctgttatcccagcactttgggaggccgaggtggggggactgcttgagaccaggagttcaagacctggtctcaatacaaaaaatacaaaaattatccatgcgtggtggcatgcgcctgtagtcccagatgctcacaggaggctgaagctggaggatcacttgagcccaggagttgaggctgcagtgaaccatggtcgtaccactgcaatccagcctgggtgacaacgagactcaaaaaccaaaaccaaaataaaaacctatggtgtatggaggacttacagaagccacagaagcctcctgtgtgtactatcctctacgtgcccctccagatccactctgcagcctgggaggttgagcctccaagtaccacaaacactgagttccttctttttgtttctttgggatcagccagggggcccagaggg

SEQ ID NO: 3608 - DNA, 663 bp, Homo sapiens
cgcaagaataatcctgaagaatcccacatattcttgggctctctaatgtgatttgcagttagacctgttcatttccacatctactgcctgaactgagagaatgacgcagctttggtttctcagacatgtctttctatctctctgtgacctcttcagcatggtgacttcccagaactggacattaccctggtggctcaaagctagtatccagataaaagccagcactaagtactatgaccctttttaatctcgcctcggaagttccaacatcacttctgcctcggtttgttgagacagtcaatagcctatctacaatcaagggggtagtaaaataatctgtaaacatattttaagaccattgtaggttgaaaccagtaatgttggctgggcgttgtggctcacgcctgtaatcccagcactttgggaggccaaggcgggtggatcaccaaggtcaggagatcgagaccacagtgaaaccccatctctactaaaaatacaaaaaattagccaggcactgtggtggtacctgtagtcccagctacttgggaggctgaggcaggagagtggcgtgaaatcaggaggcggagcttgcagtgagccaagatcatgccactgcactccagcctgggcgacagagcaagactccatctcaaaaaaaaaaaa

SEQ ID NO: 3609 - DNA, 690 bp, Homo sapiens
cccttgacgtcatggagtttttttggcacctgttctcgggactttccctatggtcgtgactactccgcccccattgacgcgaatgggctgtaggcgtgtacgtgggaggtctatataagcttgaggctcgttttagtgataccgtcagtttcgcctggagacgcccatccacgctgtttttgacctcccatagtagacccggggacccgatccagcctcccggaactctagcctaggccgccgggacggataaccatttcacacaaggaaaacagctatgaccagtgaggcctattttaggtgacactatagaacaaagttttgtactataaagcaggctggtaccggtccggaattcccgggatgttgtagcaggaatcttcttactcatccgcttccaccccctagcagaaaatagcccactaatccaaactctaacactatgcttaggcgctatcaccactctgttcgcagcagtctgcgcccttacacaaaatgacatcaaaaaaatcgtagccttctccacttcaagtcaactaggactcataatagttacagtcggcatcaaccaaccacacctagcattcctgcacatctgtacccacgccttcttcaagccatactatttatgtgctccgggtccatcatccacaccttaacatgaacagatattcgaaaaaaaaaaaaaaa

SEQ ID NO: 3610 - DNA, 701 bp, Homo sapiens
  misc_feature (603)..(603): n is a, c, g, or t
actgacgtatgggctttcctacttgcgtacatctacgtattagtcatcgctattaccatggtgatcggttttgcagtacatccatgggcgtggatagcggtttgactcacggggatttccaagtctccaccccattgacgtcaatgggagtttgttttggcaccaaatcaacgggactttccaaatgtcgtaacgactccgccccattgacgcaaatgggcggtaggcgtgtacggtgggaggtctatataagcagagctcgtttagtgaaccgtcagatcgcctggagacgccatccacgctgttttgacctccatagaagacaccgggaccgatccagcctccggactctagcctaggccgcgggacggataacaatttcacacaggaaacagctatgaccattaggcctatttaggtgacactatagaacaagtttgtacaaaaaagcaggctggtaccggtccggaattcccgggatgttcgaaagcatcttgagaggaacagaaaggataaggatgctaaattccgtctgattctaatagagagccggattcaccgtttggctcgatattataagaccaagcgagtcctccctcccanttggaaatatgaatcatctacagcctctgccctggtcgcataaatttgtctgtgtactcaagcaataaaatgattgtttaactaaaaaaaaaaaaaaa

SEQ ID NO: 3611 - DNA, 701 bp, Homo sapiens; identical to SEQ ID NO: 3610
  misc_feature (603)..(603): n is a, c, g, or t

SEQ ID NO: 3612 - DNA, 662 bp, Homo sapiens
tttttttttttttttttttttttttttttttttttttttttttttttttttttttttttggcctaactcttctggctacatacttccagggttatgttaaaagggaagcatggacaagggggacaatatagtttggcatggcatgggttttggtaaatttcatggaacgaaaacctcttcaagtttatataagggggttacaagaggtaaagatcccatatttataggatgccctcttcattggtaatagacagagggggtaggtgggtcacaaggctgcgggttctacatagggttacctttagtgggctggttaaaaaaggctggggtagtggtaattcccattttattatgggacagacggaatatccttcaggactttcatctgtagagcagacactaggggaagttgtcgcagtcaggtctgcatatgggggggctaacatcaggatgtggatgaggatccttccacggagtactagagagggtctccccaggtcacggggggggatctaccagggcagaatggtccatgaacgggggctcggacactagaagtcaaacaatcaaacggtatggctacaaaggggaatcttcctccaggtccctggaagagcaggagctctcccaggctgggactgggaggagtggacagggtataa

SEQ ID NO: 3613 - DNA, 798 bp, Homo sapiens
acggtacaatccaagtgtatcatatggccaagttacgcccccctatttgacgtcaatgacggtaaatggccccgcctggcatatatgcccagtacatgaccttattgggacttttcctacttgccaagtacatctacagtattagtctatcgcttacttcgccttgtttgcacttcggttttttccgcatgtacgctcataatcgagtgccgatttggagtcagtcggatttgcagcttctgcagcgtgcatcttggcatatgtcccacgtccctccccatccgccaggttcgaactggcgaagtggtgatgtgttggtctccggcacctcaaactgcggacgggtaccttttccttacatgtccgtactcccgcccccctcccacttgcacatcggaatcggtcgggtcagtgtcgtcgtatcggtgggtagtgttctatatcagcccagtagtcttcttttgagtgccatccgtctgcatccgcctggagaccgaccacttccacgctgttttcgacctaccatagaagaccccgggaccgatccacgcctccggactctacgcctagccccgcgggacggataacaatttcacacaggaaacagctatgaccattaggcctatttaggtgacactatagaacaagtttgtacaaaaaagcaggctggtaccggtccggaattcccgggatgtgggaggatcacttgagccctggaggcagaggttgcagtgagctgagattacgccactccagcctgggcaaagagtgagaccccatctcaaaaaaaaaaaaaaa

SEQ ID NO: 3614 - DNA, 734 bp, Homo sapiens
tttttttttttttttttttttttttttcctttaaaaaggtgctttattgactttaaatttataaaaggttaacatgtcttgatctagttgaaattatgatttatatcaacatgataattatgtgtacagtttatattccactcatactggtacaccagtaaaagcaaatattcaaagggttctctaagtttcaagattaaaaaccataagtgccttgactgaatatcatgattacaaaacaggtattaagaactgtgaaggtatatgctcacaacatatcccttctcccattctcactttattccaaaatctcatttatttcacttgacaattggtttatactttcaaaaatccttttataatttttatagatataactcaaaatgacgtgctgggtctttaaaaaattaacagattaaaaagcaatacaagtgtgcacttaacacgtgatcaaagtctgaaagtgcaaaaagcaaaataaaatcctctgaaatatatatgtatttcttaaatatagaaaaactccacaatagtagaaacaaagtatgtttaaagggtgctttgggaacaggggaagggggcacctcatgccaggggagatttaaaaagtgagacttttcaagcaagcacgtgctatagcatagtctacatatttggaaaatttaaacctaattttaattatatataaagaactattcaaaaaatcacaccacaagtaacaaacggtcatctgt

SEQ ID NO: 3615 - DNA, 734 bp, Homo sapiens; identical to SEQ ID NO: 3614

SEQ ID NO: 3616 - DNA, 742 bp, Homo sapiens
ttttttttttttttttttgtgagatggagtctgttctgtcgcccacgctggagttcaaggtgtgatctcggcccactgcactccagcctgggtgacagagcaagacgccatctcaaaaaacaagctaaatttaagttaattccttttctgaaaaacatctgtcaccttgaccaatgccacagctttcctcttcctcatttggtaacttctaacactagttttctaattagccactccacaaattatcctaaccaatatggaaatcaattaatcaaaaataatctgacccgtgcaaaaattactctactgacatggaaaatgccagtaaaatcttctacttgtgtgacacccaagtaataaaccaacaacccacaataatattaaaattagattaaaatatttataaaagcatttcacaaccacaaaatactcgtgattaaaaagtaaaccttgaagaaatggcagaagcaatagttactatatagatactacgtgctggatcctgttcaaattttttaacataattagttacataaacttcatggtaacataagaagtatcaatgatgatctcaaagtcagttaactatttaatttagtcaaaggagcctcaaaaaggataatacattggcaatcattccttactgtgaatcccaggaaaggtctaagttacagttaacataggtatatctgatttactgattaatacatggatcttactacgggatggaattaggccaggt

SEQ ID NO: 3617 - DNA, 711 bp, Homo sapiens
ttttgacgtccatagaagacccgggaccgatccagcctccgactttagcctagccgcggggacggataacaatttcacacaggaaacagctatgaccattaggcctatttaggtgacactatagaacacagtttgtacaaaaaagcacggctggtaccggtccggaattcccgggatcgccctttttttttttttttttattagaaattgagatgtttttattttgactatttgagagtaaaattgtagataatgttcccaaccatcatcaaaaatgcagagccaacttttctgtatataaactgtacataaaaacaaggcactatacatttttggggagatattaaggtagaaaggttgattcgcatagattctccagagtccatgccattaagtacaaattctttgttcattttagcaccggaagcagtactcagaacaagtcatacctaatgctgcaggaaacatttcccaacgtgtatgaagatacatattggtggcagagctaattcaacagaagcaactccatctaccttttcatgttattttgacaccaaaacaaatcttgaaagtgaatgaatacatattgctttgttaaatacatatttgacttatatggtgtttatataaatatatatatattttagaatccacaactatcaaaataacactttataaagagaactgctttcaaaaaaaaaaaaaaaaaaa

SEQ ID NO: 3618 - DNA, 615 bp, Homo sapiens
ttttttttttttttttttttttttttttttaattattcaaatttttttttaatttaaaaacaatacaagctgattatacatttgacaaatacaaggaatttctgactgcaggaaaaaacaaagcatcaactacaaagagaagcagaaattcttcttgagctgctgattttactatacattggggctatattttttcttaagacaatcacgtacaaagtaataatataaataccttttttaaggtgaaaaggtataaaatctcctttaaaaacttttcacttatccatcatataacatcaaatgtacctggtaatcccaagtatgagttctttggagaaggaaaaaagtcagatcaaatacatcattaaggaaaaacatgcacactaaatagactatgaactctacggggacaaagaccattatttggggtattttgtcattccccaattccggacaggattctcagaatcgtttcttcatgaatagcaaattgacttatgggttaaattagcaactacagagctgcctaacaacagtacaaaataaatgaataattcaccagaaactagctctagatactaattttaattacttggcaggaacataatttagtac

SEQ ID NO: 3619 - DNA, 587 bp, Homo sapiens
taagaccaaacagaagcagggatgacaatgagacactgaagacacacgaaggtgaatgctgaagaccatcagagtcccagcaggaggtcacgtctttcattcagacgctccaaggcttttcatttcagttggttaaagaacgtgttttacaggaagttctttacagtaatttcatgccagacaccaggtttcttcgatggtacacagctccatgaaatttgtgtttccatccagttgacaggaataaaaaggaatttttatttttgtcttttattggggccgtagagacgtaaaatggtcagattcctttaggaataaatgaggaaaaggagaggaaagagaagatctgggctgtgctggtgctggtttctactcatctttcggagggtgtgacttcaagagttaaatcacacttaggccactacaatgattagtactagttatctttttatacgatgataaaaaggaaagtatccaatggacatcaaaaatggtcaaaggttttttactgaaggtcaattttcccccgaacaacaatatacaaatgaacatatatagggagggtactctgtggacatccaaatcac

SEQ ID NO: 3620 - DNA, 759 bp, Homo sapiens
  misc_feature (48)..(48): n is a, c, g, or t
  misc_feature (67)..(67): n is a, c, g, or t
  misc_feature (139)..(139): n is a, c, g, or t
  misc_feature (228)..(229): n is a, c, g, or t
ttttgcgtcatgccgtaatgccgcctgcattatgcccagtacatgacntatggactttcctacttgncagtacatctacgtattagtcatcgctattaccatggtgatcgttttgcagtacatcaatgggcgtggatancggtttgactcacggggatttccaagtctccaaccccattgacgtcaatgggagtttgttttggcaccaaaatcaacgggactttccannaatgtcgtaacaactccgccccattgacgcaaatgggcggtaggcgtgtacggtgggaggtctatataagcagagctcgtttagtgaaccgtcagatcgcctggagacgccatccacgctgttttgacctccatagaagacaccgggaccgatccagcctccggactctagcctaggccgcgggacggataacaatttcacaccaggaaacagctatgacccttaggcctatttaggtgaccactatagaacagtttgtacaaaaagcaggctggtaccggtccggaattcccgggatcaaagataaatttactaatggggttcaattaacaaatttctgattacatttccctaatgatgatagtatagaacatttatttctgctgtgctttattagtaaaattgcagtgatctggtgactggaattaaactgctgaaaaatgacttggtctgatttattcactgagcaaaccagctttaaaggctgtgttgctatggcacccagattaactgttaaaaaaaaaaaaaaa

SEQ ID NO: 3621 - DNA, 132 bp, Homo sapiens
aaaatttgttgtcatctcttcaaagaatcgagaattgcgtagcaaaaaaaaccttacataaattaagaatgaatacatttacaggcgtaaatgcaaaccgattccaactcaaagcaagtaacagcccacggt

SEQ ID NO: 3622 - DNA, 715 bp, Homo sapiens
  misc_feature (526)..(526): n is a, c, g, or t
gttctccatggcaactcagtcctccagcagacccctgcatacataaaggtgcaaaccaacaagatggtgatgctgtcctgcgaggctaaaatctccctcagtaacatgtgcatctactggctgagacagcgccaggccccgagcagtgatagtcaccacgagttcctgaccctctgggattccgcaaaagggactatccacggtgaagaggtggaacaggagaagatagctgtgtttccggatgcaagccggttcattctcaatctcacaagcgtgaagccggaggacagtggcatctacttctgcatgatcgtcgggagccccgagctgaccttcgggaagggaactcagctgagtgtggttgatttccttcccaccactgcccagcccaccaagaagtccaccctcaagaagagagtgtgccggttacccaggccagagacccagaagggcccactttgtagccccgtcaccttggcctgctggtggctggcgtcctggttctgctggtttccctgggcagtgngcatgcacctgtgctgccggcggaggagagcccggcttcgtttcatgaaacaattttacaaatgagcagcagaataccggtttaggtgtcctgctacaaaaagacatcggtcaggtaacgagcacgatgtggaaaaatgagagaagggacacattcaaccctggagagttccaatggctggtgaaggtg

SEQ ID NO: 3623 - DNA, 713 bp, Homo sapiens
ttttttttttttttgaactgaaagcaaattaatttataaaaaaaaaaaaagaaagaaagaaaaaaagagaaaatttacagaaaacttgaacagaagaaaggtgctaagacgcagagggagagaaacatggggacatgaggaacaaagggcctggtgggaggaaccaagaagaaccagtgcagagcctggagtcacacctgccttcccgtcacaggggagaagctgggacacgtggagcaggaatgcgggaagcagagttgagctgcgagccaagggttggtccaacccaagggttgggcaccctcttccactgctcccaaatccctgcatcctcatctggggagcccccagctatcagctgaagttctcatagtcttggtgggagagggaggaagctaaggggtgacccaccaagtcataatatggaggtgcttaagtgctttaaaaaacaatttcaggttttaaagacttcacatccatcttatagctcccttctctgtgccttccaggagtccatggatacagcccagggaaggaaggagaacagcccccagtgccctttcttctcctattacctaccacagaaatccccgaaattaggttttccccagcaaatacacatacgctgacatcaacttagcaagtgacttttaaaaacaaaagtgacattcagagggaaaggattcattgggtgagctggtgtggcctaaaac

SEQ ID NO: 3624 - DNA, 83 bp, Homo sapiens
gcagggctgcaatcattctctttttagagggagaacaaggaacttagggaaatcaaaatggggatacgaacaggatttctgtg

SEQ ID NO: 3625 - DNA, 654 bp, Homo sapiens
gcacccagacacgatctacagtgtggactggagccgagatggaggcctcatttgtacctcctgccgtgacaagcgcgtgcgcatcatcgagccccgcaaaggcactgtcgtagctgagaaggaccgtccccacgaggggacccggcccgtgcgtgcagtgttcgtgtcggaggggaagatcctgaccacgggcttcagccgcatgagtgagcggcaggtggcgctgtgggacacaaagcacctggaggagccgctgtccctgcaggagctggacaccagcagcggtgtcctgctgcccttctttgaccctgacaccaacatcgtctacctctgtggcaagggtgacagctcaatccggtactttgagatcacttccgaggcccctttcctgcactatctctccatgttcagttccaaggagtcccagcggggcatgggctacatgcccaaacgtggcctggaggtgaacaagtgtgagatcgccaggttctacaagctgcacgagcggaggtgtgagcccattgccatgacagtgcctcgaaagtcggacctgttccaggaggacctgtacccacccaccgcagggccgacctgccctcacggctgaggagtggctggggggtcgggatgctgggccgctaccctcatctccct

SEQ ID NO: 3626 - DNA, 777 bp, Homo sapiens
  misc_feature (55)..(55): n is a, c, g, or t
tttttttttttttttttttttttacatgtaggtatatatgtattagccagctgtngccatgtgacgaattacccccccgccaaaggttggcagcttaacacaacaaacatttatcatctcatccatgttctgagcattaggaactcaggagctgctgagccggctgttcccgtgatcagtgtttgaagtataagagtctaagattcaggattcaggtactgggatccagtgttctggtggagggatccacaaagcttggactatccagggaattcaactgatagaattgcagtgagatgttggccaggacagcaagatcctcttccaagctcagttacatggctatggctgagttccttaccacatggtcctctccataaggctgctcatggcatgaccaccggctgtaatcccagcacgttgggaggctgaaggcgtggcgaattccttgagcccacgagttcgagatgagcctgggcaacatgatgaaatcctgtgataccacgctactactggagggctgaggacaggaggaatacgtctggtaagcctggagaggcggaggtggtcagtgatctgcagtcgagccactgttagtccagcctggtggtgatcaccacggctgtctgcatgttgtcgctcgaccacctacgtagatggatcgctcctggtgtgaaccttcctgcatgtaggggggggcgctcgccggtgcaggcctgcctgcctgcctgggcttggtgtagtaccacctgatggccggtggggcccctcgatggg

SEQ ID NO: 3627 - DNA, 777 bp, Homo sapiens; identical to SEQ ID NO: 3626
  misc_feature (55)..(55): n is a, c, g, or t

SEQ ID NO: 3628 - DNA, 766 bp, Homo sapiens
tcaagttgaatcatatgcccaaagtacgccccctattgacgtcaatgacggtaatggcccggcctggcattatgccccagtacatgaccttattggacttttctaccttggcagaacatgtacgtattagtcatcgctattacccatggtgatcgttttgcagtacatcaatgggcgtggatagcggtttgactcacggggatttccaagtctccaccccattgacgtcaatgggagtttgttttggcaccaaaatcaacggggactttccaaatgtcgtaacaactccgccccattgacgcaaatgggcggtaggcgtgtacggtgggaggtctatataagcagagctcgtttagtgaaccgtcagatcgcctggagacgccatccacgctgttttgacctccatagaagacaccgggaccgatatcacgccctctcggacatttatacctatggccccgggaccgaataccaattcaaccaccaaggaaacagctatgaccattaggcctatttaggtgacactatagaacaagtttgtacaaaaaagcaggctggtaccggtccggaattcccgggatgcgacatttcatatataggtgccaaaagtgaatcggggtgcggagagtggaaccttttgaatttatgattgtcacagagatggtagaaattatgatctgactggaaaacatcctgtatcccctcccaagaatcatgggctttttttttgaattaaaaagcagacaaatagaaaaaaaaaaaaaaa

SEQ ID NO: 3629 - DNA, 780 bp, Homo sapiens
tttttttttttttttttttttttttcaagctgaagaaaagaaaatcttttttatttccaagggtggaattatctgcccttggtattatctaataccttgtattttaaaatataagttttttgttttccaaaaaactcaacagacatcacacacagattttacagtaggtacaagctctagcctggcacacaacacagccagcgtcttggacaggggtctgccagaggagggtagcaaaagccaaaagcccagaaagtattctgcttcctttgtcctcttcccattttaagccaagcaagggacattctggggctttatattcttctctcttttcccctcgttggtgggtgtactattccccatatggtcgcaagaaggagggtggtcatatcgaccatgacttctcttcctataaagcagctttccagctgagtacaacaaagacaaaacaaagcaactctgctcctccacaattctgctcttccatcactctacatggcaggagaaactcccacaatagctttttcctactgtcagagaggaagcataaaccaagatttccaaaggcaccactggttggttcccaggtgccctagagtaggacttatcttatttacttattattctctgagatgaggtcttattatgttgccaggcgtgttcttgaactcctgttcttaacaaatcctcctggctcagctctgagtagctggattattagactcgctcacactggttctagattattttagataaacaaatccctttgctagccaggaa

SEQ ID NO: 3630 - DNA, 742 bp, Homo sapiens
  misc_feature (693)..(693): n is a, c, g, or t
ttttttttttttttttttacctttacagttcaatttactatatagaaatcatgggttttatatttgcagttaacttttgaactgagattacaatattataacaaaaaactttacattaattcagaactttttagcataccaaattgaaatacataggttcaaatttcagatttatggcaaacagtcttcaaatacaatacagacatttcttaaaagttaccgtatcattcacatgtgatatttgcaactctgagctatttcttatagaacagctctcctgcagatatggcaaagttgatatgccatgaagttcaaggcctgtatagtcaagccaaggactcaaagttgcaccatctttaaaaaggttcggcatttctggaccacaacaatgcacaacatgtaaagaaggtaggaaacagttccccctccttgttaaatggttaaaaaaagttacatggtagcttggaattttgcataaaaccccataatataccttggaaaagtccaagggcaatttgatggcaatggattggggccctatatatatatatttttaatagaacccatgagatttaaatgggcattaatcaaatcaaacaatattaagcacctactggtttaagagatttaacatttcattagagattcatgatcaatttctttccacctcgaaatcaaggtgtaaaaaccagncttattaagtgcattccaaatttctcctatgttagcacacgtagaatta

SEQ ID NO: 3631 - DNA, 661 bp, Homo sapiens
  misc_feature (430)..(430): n is a, c, g, or t
gcgtggatacggtgtgactcacgggatgtccaagtctccaccccaatgacgtcaatgggagttttgttttggcaccaaaatcaacgggactttccaaaatgtcgtaacaactccgccccattgacgcaaatgggcggtaggcgtgtacggtgggaggtctatataagcagagctcgtttagtgaaccgtcagatcgcctggagacgccatccacgctgttttgacctccatagaagacaccgggaccgatccagcctccggactctagcctaggccgcgggacggataacaatttcacacaggaaacagctatgaccattaggcctatttaggtgacactatagaacaagtttgtacaaaaaagcaggctggtaccggtccggaattcccgggatagcagtggactgtcttttggattcaaagtgggcanaggccaagaaaggagaggaagctttatttacaaccagggagtctgtggttgactactgcaacaggcttttaaagaagcagttttttcaccgagccctaaaagtaatgaaaatgaaatatgataaagacataaagaaagaaaaagataaaggaaaagctgaaagtggaaaagaagaagataaaaagagcaagaaagaaaatataaaggatgagaagacaaaaaaaaaaaaaa

SEQ ID NO: 3632 - DNA, 672 bp, Homo sapiens
gcggaccgtgtttttggaagtttccagccgcaatttgaaatgaaatgacaaggtgtatattgatcaattttcattcccaccattgcattacaacctctaacttaaatgggtaaccctaaggcatatcaaagaagcagactgcatgataaacggaaatagaaaaaaagaacctacatttattttgctttagcatccttactctcaccttttatgagattgagagtggacttacatttcctggtttaacattttcgtatacttattttttttagccatcattatatgtttaagtctattatgggcaaccaatctttggaagctgaatactgaatttaaagaatgctatcttggaaaattgcatacgtctgtgcaattttttattctgcctagtgctattctgcttgtttaactagattgtacaaaataacttcattgcttaatatcaaattacaaagtttagacttggagggaaatgggctttttagaagcaaacaattttaaatatattttgttcttcaaataaatagtgtttaaacattgaatgtgttttgtgaacaatatcccactttgcaaactttaactacacatgcttggaattaagttttagctgttttcattgctcaataataaagcctgaattctgatcaataaaaaaaaaaaaaaaaaaaaaaa

SEQ ID NO: 3633 - DNA, 672 bp, Homo sapiens; identical to SEQ ID NO: 3632

SEQ ID NO: 3634 - DNA, 662 bp, Homo sapiens
tcttcattagtaccttcataggcaaataatgttctacaatattctttagctttaattttaccttcggtatctgtttttgttatctccacactctgagttttgggtcccagtgactgtaggattaagggcttttctggttttttctcttctgtttcactactggatgttcttgtccgaagttcacagagcccttctttaaaatggttttccaattccattccctccgaaattttctttgggcttgtgtgttaactgatccaaagtgcagttctcatctcacattttcccagagaaggctttaggtgaagtaggcccagccaaaacagtttctgaatcgtcctgggcttcatgagtttcaccatcatctgttacctctaattctttcacaaaatttgagggaaacagtccccaacttgttattccagggttccactccaccagccttcttctaccctcttcattaatatcaataatatctcccactttcagctccagttcatcctcattttgtggaatgtactcaaaaagaactttacactgacgcttcttggtcttcttcttaatgttttggtttgtggatgtggctgaattcctccagctggaagtccataggtgcttattcgttgtacaagacttgctacattcccatgcctttcccgttg

SEQ ID NO: 3635 - DNA, 711 bp, Homo sapiens
ttttttttttttttttaattcttgggaactatgaagtctttgcaagcacagctcgtttctgcagattattttccaaacgtgtacaaaatggaaccaaaacggagaatcccttaagaacctgaagaggcgcaacattaaaagctacgattatccagtagcaagtgttccagccttcagttgccagccgcttcctcctcttattcccaagattagcgggatgaaaacgtcttccccgtgatgttttcatttcttttttctcggcatctgggcgtgcgcggttcagcaccttgaggaagtcagacgttttcgcccgcatacgtgtgtgaatataggccttagagcacttgatgtggtagtgcaggtagtcccggaacgtgtggatcaggttgatggtgttgtctcgagcactggcattggtgtgacgagggaacagcacaaaggtaatgtagccaatgttgtcacccacagcggcgtctgtgtctttcagctccagaggaggttccctgtggctaaagaggacctgtggggctgtgtggctggctctgcgtccttctttgaactcctgcatgaacacctttccaatgaacacatcgtcgtcatccttaaaacaactgtgctgaagactactgtgactctgttcctttttagactcacatacatggtctcatcatcctatatggatactgccctggtctctcattcttgcctctc

SEQ ID NO: 3636 - DNA, 731 bp, Homo sapiens
tttttttttttttttttttttttttttttttttttcgagatggagtctcattctgtcacccaggctggagtgcagcggcgcaatcttggctcactgcaatctctgcctcctgggttcaagcgattcttgtgcctcagcctaccgagtagctgggattacagacgtgcgccaccacgtccgcctaatttttgtatttttggtagagacggggttttcaccaatgttgggcccaaggcctgggttcttcggaattctgtgaaccttcagatgtgactcgtgccgcgctctcggctctctcaaagtgccgggattacaggtgtgagcccccacgcccagcctaggttggtgatattattgcaaatgggacaataaatacaggcacagaaatacggtgacagcactgaaatatgctcatatcacttaaagctgtcagctcctggcattcagcccttatggtagggcaagaacagcagcagctgttcacagatgagagaacagagtggggagaaagatgccttccaagccctgcagaacccaccgcctataatgcactgtaaaaaacaaaattaaactctatacagctctatatagtttatctggttatctagtatatatatggtatatgtaattctatagttataatgtctggtattgcatgttacatatatttactcaatgtagcactttaaacagtatcagaatttgtgggcctgtttgagatcttataactg

SEQ ID NO: 3637 - DNA, 674 bp, Homo sapiens
cgggctgcctgcggatgaaggaccagtgtgacaagtgccgggagatcttgtctgtggactgttccaccaacaacccctcccaggctaagctgcggcgggagctcgacgaatccctccttgctggagcagctgaacgagcagtttaactgggtgtcccggctggcaaacctcacgcaaggcgaagaccagtactatctgcgggtcaccacggtggcttcccacacttctgactcggacgttccttccggtgtcactgaggtggtcgtgaagctctttgactctgatcccatcactgtgacggtccctgtagaagtctccaggaagaaccctaaatttatggagaccgtggcggagaaagcgctgcaggaataccgcaaaaagcaccgggaggagtgagatgtggatgttgcttttgcacctacgggggcatctgagtccagctccccccaagatgagctgcagccccccagagagagctctgcacgtcaccaagtaaccaggccccagcctccaggcccccaactccgcccagcctctccccgctctggatcctgcactctaacactcgactctgctgctcatgggaagaacagaattgctcctgcatgcaactaattcaataaaactgtcttgtgagctgaaaaaaaaaaaaaaaaaaaaaaaaaaaaaaaaaa

SEQ ID NO: 3638 - DNA, 748 bp, Homo sapiens
tttttttttttttttttctgggacagtctttattggagcttggaatgtcatagcaattcgccctcatcagaggcagactgtgagaaagagcagcgatgtggtggacccccagcagggggaaggccgggctacatgagggagccctgcttgcctgcaagcagggcacaggcgcacacgcatacactctcctacatgaacttacactcacacctgcgcactcgctgccggtgggtcagaggacaggtgccttggggctggttccccttcctcttggaaaggcctcttcacattcgtggggagtatcgcgtgtagagtctgagacgggagggaaccgcgtatgaggaatcgaaggggacgagaggagctggaagctgcaggcatgtagcagtgtagggagaagggatccacggacaggagggactggccagggactaaccaaagggagctggagaaggccctgcagggccagggtaaggggaagaagatgctggagatgggcagaaggggagggagaacagatcacctcctctccttcactcactgcaacctcaccgctggggacagaggcctgggcacagaaagcctggggagcgtcaaggagtcccctgtgtcctaggaaggcactgaaatcagggaacagatcctgggagccagagtctcccccaagtacccaaaggggacggaatcggaacggtgaagcggcaggtctacatgctggtgtctgggcagagacggggaggacagatct

SEQ ID NO: 3639 - DNA, 674 bp, Homo sapiens
tttttttttttttttgtgtgtctgttgcatgtttttcagtttgagtttaccatgaggctttcaaatactttcttataatccattattttaagctgataacaaccctgtttgcacaaacagacataaagaaaattattaaagactttatgccttaacttcatctcctcattttctaattttttgttgttactatttaggtcttatcgtactatgtcttggaaagttgttgtagttagtagttttgattggctcatcatttagtctttctacttaggataagagtagtttacacaccacagttacagtgttatattctgtgtttttctgtgtatcttcaggtgattatttattgctcagtcatatccttgtctttctgattgaagtactccctttagcacttcttataggatgagtctgttattgatgaaatccttcagcttttgtttgtctgggaaagtctttatttctcctacatgtttgaagggcattttcatgagatttacttttctagggtaaaagtatttttcctttcgcattttaatatgccatgccactctctcttggcctttatgatttccactgaaaagtctgttgtcagacacatgggagattcatcgtctgttatttgtttcactgcttttaggatgcttctttaccttgactttgggagttga

SEQ ID NO: 3640 - DNA, 317 bp, Homo sapiens
ttttttttttttttttgagaagtcaaacagttttattacagaactatgtgtatatattttgggtttaaaacttgccaatagctgtttgaaaggatagctcataatttattcaaatagatattttattaatcaaatgtttttggtttatcaacataaccaaatgtataaaaaatgtttttaaatacaagacataactataaagtcatgaggctgattgaccttttaaactaacataataaaatctatatggtcaaaatgagtggtgatgctttaaggtaatgattatgcgtcccatctaaggatgctgcaatggccta

SEQ ID NO: 3641 - DNA, 660 bp, Homo sapiens
tttttttttttttttttactacaaacctattttatttatataacttcttatgaagtagattttgtacacatggtaggctaaaaattaaaactgcttttccacaaaactgataaattactagattcttggttctttcatgatatcataacattaaatcattaaaaatataaggcaatttaatgtaaactactagcatttacaaaacagtaaagttataaaaaactgtattacaagcaaatgcaccaaataccagtgaacatgaaacaggagtgaagtttgctggagaacattaaaaatcacttttcagtgggttcacttcacattcatgctgcactgggcctgacacgttcagcaccatgaagcagacacttcggcaactagaaactgttacttctgtttgactttttttctaaaatgaaaaagcagtctgtgaacatgcgtgttaagaacgatctatctagagtcgcacagggtccaggggccgctgcagttgactcagttgttcccatcctcgtttatttgacaaagtacttcatttggccactctggaagaatttattttcttgatattcaactgggctcagaatccagtgtcccattttgaattttccaacctgtccaatccgtccatttgacaaatactgggaacgggaactcctt

SEQ ID NO: 3642 - DNA, 623 bp, Homo sapiens
ttggcagtacttcaatgggcttgatacggtttgactcacggggatttccagtctccaccccattgacggtcaatggggagtttgttttggcaccgaaatcaacgggactttccaaaatgtcgtaacaactccgccccattgacgcaaatgggcggtaggcgtgtacggtgggaggtctatataagcagagctcgtttagtgaaccgtcagatcgcctggagacgccatccacgctgttttgacctccatagaagaccccggggccgatccagcctccggactctagcctaggccgcgggacggataacaatttcacacagggaacagctatgaccattaggcctatttaggtgacactatagtacaagtcttgtacaaaaaatcaggctggtaccggtccggaattcccgggatggccgccctttttttatttgttttttttttttgccgcccttttcccacattcatagcctgtagtgccccctctaacccccagtgccacagagaagacgggattgaagctgtacccaatttaattccataatcaatctatcaattacagtccgtccaccaccaaaaaaaaaaaaaaaaaaaaaaaaaaaaaaaaaaaaaaaaaaaaaaaa

SEQ ID NO: 3643 - DNA, 622 bp, Homo sapiens
ttttttttttttttttttttttttttttaaaatttcatgtttatcatatttttcaaaatatatgtacattaaaaaaggaagatttacaacaggaaagattgccttacatgcaacacaaattccaatgaattcatgatgggatcacacatgattatgatctaattcaagccaatcttctcaagtccatttcccagccatactttaggctacagaagggatcccaggagacaaaagtggaatgaataagaaacaaacatcttttgcctctggcagtactcaaggggccagaagatgtacttcaaaaactttaagacaattaaaatgtcaagtgccacagggaagagaaatgataaccagaaatttgtatttctagctagtactatttaacacaacttcacaatactaaaacaaatacaaataagaaagggttaggtagttgggcttcatttacttttttccttttcttttatttttaatatctcaaaaaggaagccacttgcttgatatcaaaagtgctgtggacaagaaaggaggggaaaaaaacccacaaatcactgtagaatcctagtttattttaccaaactgtatatttttccacttaacatttctacattagccactg

SEQ ID NO: 3644 - DNA, 662 bp, Homo sapiens
tttttttttttttttggaagaaaaggaaggggtttattctcaagcgtctaagggtttacaaacgagggcattttgttttaaaaaggggcagggcgacactggcggcctgaggaggggtccattggctggtgggctggcccgagccaccctcaggcccctgcccacccggtccgccctctgcctggtccagagggatggctggtgacgaggggggaggtcttgggagaggctgggaggcaggagagactcccccagggctccccacttaacactgaagggggtgggggtgggcggacacacactcataaaacagaaaataaagttaacataaaaataaaaccaggcagcccggcctcgggcctgtgctggccctgggaccagccatgcaaccttccggcaatcgcagaggcccccatggctggatgcaggggaggaaagggccaggcctgttggcacccccacccggcagacccctggcccctgacaaaggggccaaggggcaagagaaggtggctttcctccctgggggcagagagaagatgacatctatgactttttaaacatgcggcgtttgtgactatcatgatacatcacagagtcacaggctaatgagacgagagggatgctacgcctacgctgcccacagagcagcggttctgcgc

SEQ ID NO: 3645 - DNA, 746 bp, Homo sapiens
tttttttttttttttttgacacaggaacaattcttttattgtacattggagaaatagccctgtgtgctggttcaaggtgcaacatacagaatattgaattaagaaaagagggaacggggaagggaagggaaacctcttgaggtccaaagttgcaaacaaaaaatggtaaaagatttcctcacgcaagaggcatttttgcaaataccatgcaaaacaggcagctggtgtgccttaagagaatccctataaataacagaaaagacactccaagcattcctgtacgtggactcagagcacagagaaaagaaactaaaatgccttttggcatttcaagatatttggcactcttgtgattacatttttttacagtccattaaagagaataaactgacataatattagagaaataaacaggctgctcacacaacagactgcaaggggaagttagaaaaagctcaagcatttttttctttgtttttcgtgtgtgtgtgtgtgtgtgtgtgtgtgtgtgtgtgtttctctgacataaaaaatgtgtccatttgcattaacttgggcagatagcttgcagcaacaaagaaacacaagctttacaactcattttaacaatacaatcttttctatgtatcattccttagaaaagtactcttcttggtattaaacacattcctgataacttctatagatgacccagaataaaacagaatatctacagagatcatttccgcatcttgtgtacattccag

SEQ ID NO: 3646 - DNA, 702 bp, Homo sapiens
ttttttttttttttttgatttttaaatagaaattttattgaaagaattttgatacagttcatgattctttttaaatacatatgaagtttaacaaaatatatacatgaatgtgttcaagtagaaaatgtgaaatatacattatagatttgttgtattgcacttgggcaaatcataattgctcacttcagcatattcaaaccgaatcacaacatagtctttgaaagttgacattataacttagccttgtactcaaacattttaagaaatgttttgatgccttaatcttcaccaaaggaatcaaacccaaatactaacttggccatatgtttaaataccactaaaggcagggaggtaaagtgttgtagggtgcttaaaatatactaagaagggatttggcaattttccattcacagtatttcccaattattaaaaggaacttccttcctaattttattcaaaatccacaaaagttggggggaaattttcactggggaaaaattttcactgaatggctatcaaaggaaccaatgaacgttactgtgacaaactattgcacaggatgtctagtcaaaatagaatcttcatggaggctaactgtagcacagtatgtgatacataaacaaatatccaaacttctgaatcttctaaaataaaaaaatttccccggctagtatacagtagaagttctatggtggaaatccc

SEQ ID NO: 3647 - DNA, 693 bp, Homo sapiens
tttttttttttttttattttattattgtcatttaatatcttaacatgatataagttgcatagtacaacaagtctatacattgtaaggtttaaaaagttagtttaggatttttttttctttttttttttgctactgattgctagtttctaactcagataaggtgaaacaacatcttggataatgggcataaaataggaaaaaataatgtgaaaaacagaatacttattttttaaagcctcttacagatatgatttattctaattattagccacctttggtgtaattttcagaattctggtctataaatcaggaaagctatgttccagtttcaactttgatctttgtggaagttttagagaaataatgttggtttcttttaacttcctttcctcatctcaagaacaagaaaaaaatcaaaataaaagaacccagtaatgagatattctgtggtggggttcatgattctaagtttagtcataattgactcaagtgggtaagacagaactactgtgtaaactaaaacaaactgggagttatgtcagaaaaaggtaaataaattccctgataaaacagattagggtgcctagccttataatagaaatgtttatggctatttttattagctaatctaccatctacaaaatttgaatgaacatggacttcagtgatgtttggggggttcaacaagaaaag

SEQ ID NO: 3648 - DNA, 709 bp, Homo sapiens
  misc_feature (655)..(655): n is a, c, g, or t
ttttttttttttttttaattaaggattgaattcctgggagtaagggaggtgctatttaaatacacaaaatggtttgtgagtctcaggagcccagcctggcttgttgggagagcaggtgtctgagagacagaaggagcctcatgccttaactgtggaaaattttcaggttcctcctgttgattaaacaccaccaaggtacagagaatggcagatcatgcagctgctgtgctcaagagggctttgaagtttcttttgagaatatgatcttctcttcaaacctgacaatgattttttttttctttttcctcagggtgaccagaggcaggtcattcccataccaagtgtatgtatatttatctaattttatttattaaaacagtcataaaatcttgtggctttgggcctacttatataaaggattttttttaatgttattgcttatggtgagtttatcatgtggtataaacagctctgttctgttaaaaagaaaactgaagctgcattttaaactgtgagcaggaagttctgtacagagacagtttcctttctccaggaacagcagggcagccagctcccattaacctaattctcatttttcctttctctctgggaaggacctccaagctgaacaagctgaggttgctcagaggcctcnaccaaacccatatcttagcctcaactcccataattgggggaaccttgttttgcc

SEQ ID NO: 3649 - DNA, 312 bp, Homo sapiens
tttttttttttttttctgtattcttctcactttatttcattaatttgatcttcaatcactgatatcctttcttccacttgatcgaatcggctattgaagcttgtgcatgagtctcgaagttcttgtgctgtgggtttcagcttcatcaggtcatttgaggtcttctctacactggttattctagttagccattcatctaaccttttttttttccacaggtttttagcctctttgcgatgggttagaagatgctcccttttaacctccaagaagaaggtttggttatttacaccaacccttcctgtgaagccc

SEQ ID NO: 3650 - DNA, 386 bp, Homo sapiens
  misc_feature (383)..(385): n is a, c, g, or t
tttttttttttttttaaagagatggggtttcaccatgttgtccaggctggtcttgaactcctgggttcaagcagtctatctgccttagccacccaaagtgctgggattacaggtgtgagacaccatacctagccaagttaatttttttaatagtgaaatcttttctttgcacataaaatgagccagtgcatgttgcttctctgagtacaagacaaaatttatggcaatgggcaattagacttatacttttctgcaagaaaattaacgggaaaattctcctcttagttttctgttgttttcccattgatctgatactgtaggcttaagacaagtgctttttcatgggcatgccataaaaagtacaataaggggacttaatagtnnnt

SEQ ID NO: 3651 - DNA, 713 bp, Homo sapiens
tttttttttttttgagacagtcttagtttgtcacccaggctggaatgcagtggcacaatcttggttcactgcagcttctgcaacctctgcctcccaggttcaagtgattctcatgcctctgcctcccgagtagctgggattacaggcatgcaccaccacacccagctaatgtttgtatttttagtggagatggggttttaccatgtttgctaggccagtctcaaactcctgaccttatgtgatctgcccacctcgacccccaaagtgcttggattatagatgtgagtctatctatcctatcgatatctgtctgtctatctatctatctatctatctatctatctatctatctatctatctaatctatctatctatctatctatctatcatctgtctgtataatctatataatcatccatccatccatccatccatccatccatccagaggctcaatccctaaagactcaaggaataatatgaaaaagttttaaaacatttccataccttgagactaagcagagtataaacttgccatttgggtggatactgaatttcaggtaaaacattcccttcccaactcattaccacctttataaacaaattagagatcttgaccttggattaattgccaggtatttgctgattgtccggctttctttctccatctttctgttggtgacagtttgacagagtggtctaacaaatccactt

SEQ ID NO: 3652 - DNA, 690 bp, Homo sapiens
ttttttttttttttctaagacgctttgtatagtcacaatttctttggaatacccataaatcatctattcccctaatattagtctcattgaaaagcagtatttatgatgggatgattggaaaactatttatcatctctctatggtcactcaggctttgatcccagtcttacttgtatctgcatttcttctcacttttaaagagacagtttcagcccagccaggttattcattagtctttgatataaacttaggtttttaagcacttgttcctgtgaagacttatgtagtttctcttgcagttttacgttgttaattgggacagtcagctattctcacagcttcgtttctaatcatctcccattgaatttcccaccacagactaattttccagagttggaaaataataagcacattctctctttgattctgatgtcagtttcccagtacctgaaatactctacattattttcctaggcaactttttttttcctttaaaaaactagacctagccaggtacagtggttcatacctgtaatccctgaaatttgggaggtgaagactggaggatcacttgagccaggtagtttgagaccagcctaggcaacaaagtgagatccctgtctctacaaaaaaatgttaaacatgggccggtgtggcagcacacacctgtagttccagctacacaggaat

SEQ ID NO: 3653 - DNA, 658 bp, Homo sapiens
tttttttttttttttttttttcctaaataaacttttactggtacacagccacacccatttgtttatacatgatccatggctgctttcatgccacagccgcagtcaagtagttgctacagacgccatctggcccacagaacctgaaatatttaccattttgttctttacagaaaaagtttgctgatccatgctggagctacactaagtggtatcaagcatttctctcccagaagttctatgcatagagtgttcatccttggctaagttacttaactattgagtccaattccttgatctgtaaaattgggataataataattactccctaaggttggagattagataaaatagtttccctaaagcactgggcatggttattggtatatgggaactttcactaaattgctatcattcctagtatagaattttatttatatcttgccctggctttgaggggatttgctgactgagggatttatcaaactctgcttgcaggtgcagacttagattcagaagtaataacatccctgctagtcattactgatcaacaaagccatactactgagttctgtactgctggggtactaactaggttgttgctcttggcaggtctgaaatgttagcacagagaggctcctctccattcccccaaacccag

SEQ ID NO: 3654 - DNA, 484 bp, Homo sapiens
ttttttttttttttttttttttttttttttttttttacagaaccaacaacattttaataaattgcccgggggttcttggtgctgtaatgtgcctcacaggcagcgacataagccgactctgggaagaagtcatcgtggtattctgctaaaaacctcaaaaagagatcaaagtgcttcaataaagccttcagattcttctcagaaaaggacatctttccaaggatttctggaagtttcacaaacaatcgcagcaaatgttgtgccccataaatgtaagagggtggaggcggctggtcacctggggggtaattgtcaggcacaagcttccaggagaggacctcgtttatttcattagttcttctcccttcaaagccagcaaacacagcactcccttccttgctaggagtcagaggaataggtgaagatgatctgctatgcacaggtgtcttcttttccaggtgcaggaagagcttgggcatgcgtg

SEQ ID NO: 3655 - DNA, 716 bp, Homo sapiens
tttttttttttttttttttttttttttttagctatgttgtaattttatttcatgacagcaccatcttctctttgcctgcgcctgggcctcctagtgtgctgcttacgtgatgcccacgtgccacagagttattgcccgaagtgccagtgggctgtgcaggggatgggctcttccttccagatggtctgcagcctctgggaccacgcagccaccatcccctttctttcttcttcggatgcaatttcaggagcaaagctgatctgaggggcaaggactttaaatccacagaagtgtaatgtgccatgctggagtggccacaggaagtatcgagaatctccattgactcctgtcttcgtgtacatctcggccgtgcctcccgtggttacggaaaggagcgctagtttaccctggagcaaaccggaatcgtagaatcctgggatgtcaaaggcaaagccctggcacagcaccctatccatccagcccttcaggatggctggcacgctgaaccagtacagcgggaactgaaatatcactaggtcagcctcccgaacctttttctgctcatcagtgatgtcgctagccagagacctttgcttgtaggcttcgtgggtttccactccataattgaaaacctcaggattagaaagagtaccagtgatatctttgtctgtggccctcggctcaaggttcatggcatacaaaatcagacactgtga

SEQ ID NO: 3656 - DNA, 679 bp, Homo sapiens
gacagactcaatctcatcttggtgttcaaattttaagttgccaaactttagcttttggacttgtgtgacactcttactagatgcatacctagcctccagctaggtgatattgtgtcatccttaagaggccaacgaggtttcattttaaaagctagctcatgttgattgttagtaacttcctagtgtgttgtgctgtgaaagatggtgaagtcataatgagattcactggcatgattgtttagtgatgtgtgtttgccatggattgggaggggcatatatgtattttcagagggatgtcaaatctatagtacaggggagctcatttaatctacagtgcccccaacctcatcctttccattgtatagtggagaagttgggtatctagaaagatgaagctatttccagcttattagagccaagtgtggacttgaactcaagttttctgagttcaacttgcttgttactttttggggataatagtagtagctaccttatgggatttagagaaggttaagtaaaaaaaaaatctatattaagctttaggaatagtgacagacactgagaaagatatagtaaatgaaagctgccattattgtctcatcatcatttttactctttatcattcctgttgcacttattactaccaacaccatattttggtgagtagtcagggtagcta

SEQ ID NO: 3657 - DNA, 748 bp, Homo sapiens
  misc_feature (120)..(120): n is a, c, g, or t
cctttactcagccgtatgcccgcggctagccagtacgactagggacttctactgcagtaatctacgtattagtcatcgctataaccatggggatcgcttttggccagtacatcaatgggngtggatagcggtctgactcacggggaatttccaagtctccaccccatgacgtcaatgggagtttgttttggcaccaaaatcaacgggactttccaaaatgtcgtaacaactccgccccattgacgcaaatgggcggtaggcgtgtacggtgggaggtctatataagcagagctcgtttagtgaaccgtcagatcgcctggagacgccatccacgctgttttgacctccatagaagacaccgggaccgatccagcctccggactctagcctaggccgcgggacggataacaatttcacacaggaaacagctatgaccattaggcctatttaggtgacactatagaacaagtttgtacaaaaaagcaggctggtaccggtccggaattcccgggattgcttttacttccggaatactcaagcaaagaaaaacttaaagagagattgttgaaggccatcacgtatgccaaaggatttggcatgctgtaaaacaaaacaaaacaaaataaaacaaaaaaaaggaaggaaaaaaaaaaaaaaagggcggcccactgacccggtgaggcgggggggcgagccccgaggggctctcgcttctggcgccaagcgcccggccgcgcgccggccgggc

SEQ ID NO: 3658 - DNA, 735 bp, Homo sapiens
  misc_feature (65)..(65): n is a, c, g, or t
ccggggcccgggtcagatggaggcagcccgccagcggaaggttcattcgcataggtgtgagcttntatcgcaacacaggacatgaaaaccagcaggaaggccctgagctgctgcatagccccatctgatttctgcagttcccgccagcctccaacacggggactctgccgtaactggaatcttcataggtcatattgaaatcttcaaggtgaccatgccccaccggggtgctggggcagtagtcatggcagactcccggcctgggcccccaggattctaggacccccaggcagccccttggactggtcccgggtgccttccaagcacagtctccatgctcccagattctcgaccttcccccggcccgggaggtgcagcctgcgtctgcctctgtcgtgtgtgctgatttgagtggcttagcttgccacagcgcaacctcttctgtccctttcagtcatttgctgtacttccctgtggcacgttaccatggaagccgctccagggtgggtcagggtgcaagctgctggtgaggtttggaagcatcaggctcacgggtgttcatgtgtgttcgtgcgtgtgtgtgcgtacgtgtatataactgaagtgtctgtacggaatgccctttgctagccatgggctggtcaccagattgttttgtaatgcccgccccttgcctcgatattgccagtttcttgtgcaataaactatcagcagctgaaaaaaaaaaaaaaaaaa

SEQ ID NO: 3659 - DNA, 678 bp, Homo sapiens
gttgactcacgggatttccaagtctccaccccattgacgtcaatgggagtttgtttggcaccaaaatcaacgggactttccgaaaatgtcgtaacaactccgccccatgacgcaaatgggcggtaggcgtgtacggtgggaggtctatataagcagagctcgttttagtgaaccgtcagatcgcctggagacgccatccacgctgttttgacctccatagaagacaccgggaccgatccagcctccggactctagcctaggccgcgggacggataacaatttcacacaggaaacagctatgaccattaggcctatttaggtgacactatagaacaagtttgtacaaaaaagcaggctggtaccggtccggaattcccgggatcgcgagcggccgcccttttttttttttttttcaagaattgacacccaagaccatcctttattgtagtattagttcatggtaactgcatgaaaaaacatttcaggaggaatttacaatttccagcttaaagaacttgcccaccaacataaccaatttatgaaagtcaattcattaaaaggtatagaacctcttgttgggcatgatggcaagggacaaagctacaacttggcctgtgcctttggaagctgaggcaggaggaccatctgagcccaggagcctgagaccagcctgggcaa

SEQ ID NO: 3660 - DNA, 702 bp, Homo sapiens
tttttttttttttctaactgctatatagatttgtatcattttgatgtttattttagccactaatgctgactatcaataagaaacaattttatgaatgcttccaattctagacatatctgaaaagcatttataattcataattaagtggtgtagatcaacacatgcttagggctcaaaacaaaaagattgattttctaaagccaagttaaagacagtcacattgtcagccttttgtttttcatttctgattatgtctgctacttttcttgaaagatgtttgttaagattatggttaggtttacattgggactgaagcagaaagtgtaatataccacacaaatactgatttatattatccttattatacaaactttcatattgatttttataattctttgtgaagatgttctctttaaaataagctagagcctactggaatcatatcctcatattaatggtagttgccattatttcaataaatactacagaaattataaaaatgggccactttttatgatgtataaagaccctcacaaagtgcctaaatttattaaaatgtgaattagtagcttataaataatatatagcattaatatcaaactgtctgaaatatagcttctactgtgagtgaaagttctctgaaaagagtttgggggaaagagactttatttcaggtgacttaggttatgcaacctggggatt

SEQ ID NO: 3661 - DNA, 686 bp, Homo sapiens
  misc_feature (675)..(675): n is a, c, g, or t
tttttttttttttttaaaaataaataactgctcccatttcaggcagtgcaaaccttcatctgctggagaccagaggtacaaggagatcagggggttgcagcaccgctgcaggcttgcaagatcggggagttgggagggcgagagaggaggaggtgcagctttgatgctgggacctccctgagtggggctgatgaatgtatattcattagcaccatggctcacttcccaggaagactgatcaggagcccttcagggacaattttgttctcaagattcacaccttaggaacacatttttatcacctcaaaattttgatccatcacccctctctccacctatatttttacaaataccattcagacttaaattaagctgaagaaactagcctttggtaacatagggtgtcattggttttcagggatgtaaccaattccagaaatacattcttttgcctggcatgaagactttgaaacacgggccgcttattttcagagttcctgttttgggacgtgacttggctacttgttacttccaggtggtcaccacacggcgggggtcatgcctttccctcccccaagatgatatagatttaatagactcaagaagttgtccagaatcaagaagaaaaagtctggcttaaacatagtaacttctgtgtgccacggttaatgacanccaaaagctct

SEQ ID NO: 3662 - DNA, 747 bp, Homo sapiens
  misc_feature (633)..(633): n is a, c, g, or t
tttttttttttttttttttctctccttttcatttttattttagttcagcttatgcaagattttgtaccttgtgaaagaatttgtttactgaataaaaaatattgcttaagatttaaagcaattaaagcaaaataagttgctgaagggagatcatatgagttaaatacaggctttttttttttaatctgtaattgatttacatttgattttaagaagacactgtttacatcaggtcaccacaaagcagatttacatacaaccttcaattgcggaaaaacaaagtttctttttgatccaaacacaaagaaaaacttctttgtgtttttttttaatgatcttttccttgatcataaaaaaaagtaaaaaatgcagtacttttagaaggtaaagctagtaagtttacagaagtgcaaaacaccaaaacacttgaagcaaaaacttttttttttcttttaacgaaaaaggtatgacttcttgttttctgttcttggcataaattttaattctttccagtggaaccaaaacctcctgaacccctttcggtgtcatccaaggcttgaacttcttctatttctggataaaaaatccgttcgcaaatgagctgtgcaattcgaatcaccttttttgacttcnaaacttttctttgccaaaattaaacagtacaaacaccaacattctcctctataaatcttcatctatgaccaccaggtcctacatcaataaagtgtttgcagccaagcctgacgt

SEQ ID NO: 3663 - DNA, 747 bp, Homo sapiens; identical to SEQ ID NO: 3662
  misc_feature (633)..(633): n is a, c, g, or t

SEQ ID NO: 3664 - DNA, 649 bp, Homo sapiens
tttttttttttttgggtatggcactcctgtgccaaaccattcgtgaaatcctgttttatcctctccagagggagggaaaactagtcttccagaagggagaggagaaacctgggaaccaatcacttctgatgccactttttcctcgttcttattttagttccttcccttaacgtccacttacagatataccattgcagtaattccaggtcctttagggtattctggaaagcaagttggcttcagcctttccattgcaggtttaggatccagattagtgtttttacccttgtctgtctgcttcccagcttccaaattgttattgctattttcatctctctcatcctccctgtccttgagggtttatattttcaaaatatcccttttctgtcattttagtgttgtttcaagagggaatagtcatagatgcatgttaaaaactcaccaaatttacccagaagcttaatctgaattacagtataagaggaatgagtctcattcatttttattcccaatttcctctgtcaggggctcaataatgttcctaaaataataacacaatgcttgtttatagaggaaatgaagaaacaaatgaataaatgaggcatggctcagctgcttcccttggtgtcgtgggatccttagggctccc

SEQ ID NO: 3665 - DNA, 670 bp, Homo sapiens
tttttttttttttttttttttttttttttttttttttttttttttttttttttttttggatgtatgaataactacttggtgataccttaaaaaagcatgctctgaaaagccacctaaagccaagtattgaagctttagtctcccttaaattttatttaaacatttagtaacttggctttatctggataagctctatctggagcagttctcctaagtgctgctcactgccgtcaagtcatttataacccatcaacattgcacttagttttatctactcatgtttatcttcttaaaggtaaggatgctatggggttgaattcagtaagacatagaagtgaattttcactgccatcataaaattatgcctggttcttactgtgtcatggcaaacatttgtgagattcttagtttatgttactagttcaatgtgtactcaaagtctaactaaatcacaaagaatgaagtttcaattctctccccagaataacagctatgtggggaaactcacagtcacctgattgggaacacaaagtctatattcaatgggcaaaagaaaccaaatcacttaagtcaggataataaacaatcacaatgttagaaaaaacttaaggtccggtcacatatagttttttttaaccatctagcgaggtaagaatgccaaggcaaggtt

SEQ ID NO: 3666 - DNA, 682 bp, Homo sapiens
gagttttttttgccaccaaatcacgggactttccaaaatgtcgtacaactccgccccattgacgcaaatgggcggtaggcgtgtacggtgggaggtctatataagcagagctcgtttagtgaaccgtcagatcgcctggagacgccatccacgctgttttgacctccatagaagacaccgggaccgatccagcctccggactctagcctaggccgcgggacggataacaatttcacacagggaacagctatgaccattaggcctatttaggtgacactatagaacaagtttgtacaaaaaagcaggctggtaccggtccggaattcccgggatggcgtcggcaggttcgaggcgattcgagctccagctaggatgatcgaggttgtttgcaacgaccgtctggggaagaaggtccgcgttaaatgtacacgatttttaaggaccacgtgtctctgggggactatgaaatccacgatgggatgaacctggagctttattatcaatagatgagaatcctcatcttcctgccccgctttcctctcccatcctcatcccccacactgggatagatgcttgtttgtaaaaactcaccttaataaagacttagatgttgccaaaaaaaaaaaaaaaaaaaaaaaaaaaaaaaaaaaaaaaaaaaaaaaaaaaaaaaaaaaaaaaaaaa

SEQ ID NO: 3667 - DNA, 682 bp, Homo sapiens; identical to SEQ ID NO: 3666

SEQ ID NO: 3668 - DNA, 751 bp, Homo sapiens
  misc_feature (697)..(697): n is a, c, g, or t
tttttttttttttttttttttttttttttttttttctctggttaacacagtatctaccatttctaattttgttatcatttttctttatcatcttgatggtaaaacagaagatttgtttctttgtgtaaataatgttaattttgagcttgtcacagtgagttaattttcttcatagtctttaaaatgaagaattcttacattactaaaatgttttagataaaataaaacttttatctctttctggagatatttgttatagtttagtttggtggagttatatataccctctttttaaattaattttcttgagaaaagcattatttctgaacattgaggcaaatattaatttttggtgtaactgaaaagtttgttaaaaaatatatagtagaagagataatcaggcattggagattctttttctaaaccatatattctgctaaagaagttattataagctaaaatgtaaatatgtaattgtctacctgtcatttcaaaattttaaaactgtaaagaaattacaattttttttcttttaatcttgggactctgattatatgacttccttgaaacctgattgagtttcagctgcttttggtgattagagccttaaaagtgcattgtgttaagatgcaaaatatatctttttaaacttatatgtaaatacttggtgatttatataccctataaaaatcagggnaaattgaataaggataaaaacactattctcaactaaatgaatggcttgaatttc

SEQ ID NO: 3669 - DNA, 745 bp, Homo sapiens
tttttttttttttttaattagaagttaggatgaaggaattaattgagttctaaaaatccctaactctctaccttgtttaacatacttagacttaaacagtgaaactcaatagccttctgggcttttgatgaacaaagagctatcagtttatagagcaaaaatagaacctgtccctgaacaaccaattatattcagtaacttaatgactatttgagtacatatcatatgccagccactgttctacacattgatttacaacaatgaacaaaagcaaagcatcctaccttcaaggagcttacattctagaaatggaatggagtgggggtgggggtgtagagagcaaatatatcagtaaattatgtggaatgcatgaggataaatactatgaggaaaataaattaggataaaggaatgggagtgctgggcagaggttgcagttttaaagggattgtcagagaagaacttactgagaaaatgacatgagtcataaaagaggttatttttaaaaactttttttaaattttgaaatactgtcaaatgtacagaaaaattacaagtacaatgcaaagaatgttattttcctaaatcattagacagtaagtggctgactcatcaccctcaaaatacttgaggtatatttctttacaaaacaaaagacatttcttccctacataaaaccataattataaaccactataataagagattatcatttctacattaaaagcatcaaaatcatatcaag

SEQ ID NO: 3670 - DNA, 757 bp, Homo sapiens
cagtgatcatagccagtacgcccctattgacgtcaatgaacggtaaatggcccgcctggcatgatgcccagtacaggacttatggactttcctacttgcggtacatctacgtattagtcatcgctattaccatggtgatcggttttgcagtacatcaatgggcgtggatagcggtttgactcacggggatttccaagtctccaccccattgacgtcaatgggagtttgttttggcaccaaaatcaacgggactttccaaaatgtcgtaacaactccgccccattgacgcaaatgggcggtaggcgtgtacggtgggaggtctatataagcagagctcgtttagtgaaccgtcagatcgcctggagacgccatccacgctgttttgacctccatagaagacaccgggaccgatccagcctccggactctagcctaggccgcgggacggataacaatttcacacaggaaacagctatgaccattaggcctatttaggtgacactatagaacaagtttgtacaaaaaagcaggctggtaccggtccggaattcccgggatgtgaaactccgtctctactaaaaatacaaaaaaaaattagctgggcatggtgacgggcgcctgtattcccagctagtcgggaggctgagacaggagaatggcatgaacccgggaggcggagcttgcagtgagccaatatctcaccattgcactccaggctaggggacaaagcgagactctgtctcaaaaaaaaaaaaaaa

SEQ ID NO: 3671 - DNA, 206 bp, Homo sapiens
tccgaacaatccaagggccaatgtgggaaatgtgaagttcaaggtcacacagatcattctgctgtcaggaagagtgtcatgagatcagggaaggagagaagtatattaatagtgccctgtgggattctttctctctctctctctttaaatgtactatgaatcacaacacagtcactgagctatagcagacaggctctggaatatgc

SEQ ID NO: 3672 - DNA, 736 bp, Homo sapiens
tttttttttttgtaagtttttgctatagcagaagtattttttgttttgtttttttaaagaaagctttgttggatcctgacagacttctggtttcctactatgtatctattatgcagttgagacttagggtttcctactatgtatctactatgcagttgtctggctaagaaatgcattgtcatttaaaatgttttaaaatgcttagcagtggtttcagtagctgatataaactttatatatgcatttgaaacaagtttcttcaagattcacaatgaagactcaaatctgaaaggaaaaaaggcattcagtaccctatattctaaagaaagatgccaacaattaaggccaccaaaaaggtcctaccataatcaacacccaacccaagaggcagcagaagccaagtgaggaggaaagtctccaagaggttcatctgtaaagactgggtggtacctgcaggaaggagagactgaatgactgaacatgtgctatatgaaggaaatcaaaccacccaaaatggggaccacaaatatgggcggggaagtagaggcatttgggttttcccccttaatctcctcttcaggcatctaccccagagcagttaggcctggaaaaggcactgggggccaggtacttagaactgagtattctaagatcaaacctgggaggctgaaatcgcaataagcgctccccacttcaggacacacaagccatcaaagcctggctccaataagtcgag

SEQ ID NO: 3673 - DNA, 727 bp, Homo sapiens
tttttttttttttttttgtagcacaattcaagtttattccatttgttcttgcaacacaaaacttaaaacacagtattatttagcattcggatgtacatgaactaggatacttatgagaaacccaactgcgtcaaaagtatgacattgtggaaaaaatgaactcaaatatatcaaaatgcacaaagcactagtcttcctccattaccgcttagaaagatatgattgtttctccatttacaaaatagaatcaggacaatttaaattttttatattttgcatgcaaaacactgcaattgcttatttatgtaggagggcactctcaccagcttcttctatacacaattgagtatacaatattgcatggaagaaaacagcagctcaactgaaatattagaaaaaaaaatcaaacagatacatacagatttaaaatccagtacttgggaaaagatatcaatgaataaaaggcctacttgtttgcagcttccacacactgcacctacctactacctctcttccatgcttaactgggtttagaaaggtgagctatgcgtagaagaactacttgggatattcaagtgctgtatttgaacgataagcctatagataacagtctgaagctgcaaggagacttgttagtacactactataaacaggtaaactacctgtatgtactcgatatagtgctatgaatgactgattatacaaactacgaacagcacaattttct

SEQ ID NO: 3674 - DNA, 702 bp, Homo sapiens
ttttttttttttttttttaccagtaattaaccctattacaccaagttttaaagaattggaatataatggaacatacttaatgtgaagtctgtactgagcataattcagccttggatgatttgaaggcactgtgtgactctaccagacctgccattaatctcatcatggcaagtacgaggacatgactatgggctctctcatcagaacagggagtggtggagagcttgctcagccaggcacgacttatggccaaatcgcttgtgcctacagtccagtgatgggaacgagtgatttctttgactgtttctttctttaccaggaaaaaaaatgcattcagaaataagtctacattgcacaacaaaatggcactttgtctcagtccccaaggaatccgcggcattttggtcgaggcacggtcttgactgaccacactttctctcaaggtgtggcctacttagccgaatgagcagagcacatctataattagcattatatgcagaataaaaagactctttaaggaacatctctgggtcctcacagtcttaggcatctgttgccatggaagccggcggcagctccaaaaatctaagtggtgagcaacaattacccactcgccgctgaagggcctctttaaataaagttgccttttttctttggattctgaataaacataaacctgggtttctagtggcgaaaatcctg

SEQ ID NO: 3675 - DNA, 755 bp, Homo sapiens
tttttttttttttttgtgactttgccactggaaagatttcccttcaccgttgttaaggctatccttgagtggggctgaggtacagcagcagtatgattttggctccaacatactgctacgaagaaatccatgggcttgctgcctgatacacatggagaccaatactttggcacaagctttcaaaaatagaaaaagcttaattacaagttgacttgcaaggagacaggaggaaaggctcaaatctgtctccctgagctaggggcagggttgggttttataagcatagggcaatgaagcatgatctgattggatcttgcaataaggtagtgctgggaggcattatctgattgcatcctgccatgtaggtgatgccagagctcaatttgatttgatcctgggttatgacatgcagtgtctgcttcttaattcagtttctgctgctaggtctgagcattaggttctccctatggttgcaggcttggtttatctgggcatactcaggttacatgacctgagggtccatgggaattgaaaaataactcacaaccttgttacataaaaattgaaccagatttgtctggtggttgcaatattgagccaactcttctgttgaccccaggcctgtgttttcacttccctctgtcagctggtcaccaggaagctacttgtagggccattggatacaagtttaggaagaaccaagaatcgcagacagagctagggaacctggggagtctggggccactattcattga

SEQ ID NO: 3676 - DNA, 719 bp, Homo sapiens
tttttttttttttttcttttgagagagggtctcactctgttgtccatgctggagtgcagtggcacaatcaaagctcagccttgacctcctgagctcaaacggtccttccatctagcctcccgagtacctgggaatacaggcatgcaccaccaccacacccagctaatttttatttttattttttgttgagatggggttttaccatttgcctaggctgatctcaaactcctgggtctcgccctccttggcctcccaaagtgtcgagattacagctgtgagtcacaactcctggccggataatttcgtatattggaacacttttgtttaatttagcaaagaactgctgttaggtaattatgatatcacagtcaatgatgactatgaggaagagtaacctaagtggggactgtgcagtctgagcagatggagttgttgatgtgctggtggttgatgtatccgctccagcagagcatccagcccttgctgtccacctgtatacaccaggttgccgcagctgaagcaggactgcagatcacagtggtcactgttgcactcacagtggtcatttgcaatggaatatgccaatagcagggaaatcctccccagaatatgttaccatgagttcatgacaagcccctgttctaaactcatctcactgtggcagaggactgaggatgcaaagccaaggtgttcatcagctgtacagagacttggaagag

SEQ ID NO: 3677 - DNA, 626 bp, Homo sapiens
gcaccagtctgccctggaggaagccaagcagcccaagaacgacaatgtggtgatccctgagtgtgcgcacggcggcctctacaagccagtgcagtgccacccctccacggggtactgctggtgcgtcctggtggacacggggcgccccattcccggcacatccacaaggtacgagcagccgaaatgtgacaacacggccagggtcccacccagccaaagcccgggacctgtacaagggccgccagctacaaggttgtccgggtgccaaaaagcatgagtttctgaccaggcggttctgggacggccgctggttcaacgggaacatgggtcccaaggccggcttcggaaccccttcttacttcgttcagaggaaggatcctcaaaaaccgaacccaagcaataccctaaagaaccggttgcgtcgcactgggatactccaaactactgggttaaaaacactccagtggaagactactcggcaaacaacggaaactcaaaccctctcaacagaggttcccttgcgcacaaatactcaacgccacaaacaaatcgtgtcgacagacgttgcgtctagactactgagaccgtgaactaagtgacaaatccatcctcccgtacaaagcaac

SEQ ID NO: 3678 - DNA, 691 bp, Homo sapiens
tttttttttttttttgggtcttgatcaggagagtttcctgactcttatcactggtagcaggtatctgctttgtattagcacagaatcctgaatcaattagaatttttctgtacctttcccagagaaaaataatttttggttttgctcctctccaagtagaaatagatattgttgtgaagcaaacagaatttttaataatttccttagaggaagatatgttttacatctaacccagccatagaaacagtggaagtttgcctgatcattgaaaccaagggagtttcctgtctctcccacatcagcttaatgttttctctttttatgagaaaactgtcctagtaagtgtgtgcagagttttctaccagtgtgctactgatagtaacttattttatagttttctgtcctaccccaatctttctcttgagaacttgatgagtgcctataaaagacagcttgtcagtgaatgcaaactcccattgtgtctggtggtggcagttattctaaagggatgtttgacataactcatcctttaagaattaatatcattttagttgatttcttataatctactgttatggtactacatcttttcatgcctggttaagatgaaacagtctgtgtgtcctgtctcttctcagaggggcctgctgtactttcaagttcatttaccttgttcataagaccctctttc

SEQ ID NO: 3679 - DNA, 733 bp, Homo sapiens
ttttttttttttttggagtggtgtgcagtttattttatgaagtgagaacttttttcaaaacaagacgctatctcccctcctcccaaacacacatatggcacaataaatcagcatttaccacttctgttcatggggaaatgcttggaaatctctctctaggttactctaggaaatgacaaagttgcccttttcaaggatatacccaaacagctagcaccaggccacttttgatctgtgatgtctacaactccaggccaaatcatcatacagattgtgtgtgtgtgtgtgtgtgtgtgtgtgtgtgtgtgtgtgtgtgtgtgtgtcattatttggtgaagtagaaagaaaactgttatattaagtgtcacgctaattttgggcctaaaagtcacagcttcattttaaatcccaacaactgggagaggtgtgtacatgtgctcactagagacaccatttattattaagtttcactcaattaaacagaaacagatggaattaaactaataaggaaaaaaaacagtaccagtaaattctttaatgttgtcagagtaaatgtctttatgccgctcacagaagttcattcaatcgtacctttctctccatatgctcttacgggctggctaacagagagccatataaactccatcagagagctaccatttaagtggaactggtacgcaaccggatattttaatggaccctcttaaattaatgactgaggtggaattagaat

SEQ ID NO: 3680 - DNA, 712 bp, Homo sapiens
  misc_feature (628)..(628): n is a, c, g, or t
ttttttttttttaacacatgcacacattcacctatactgctgtcttctatccttcttccttaactctttgaaaattactggtagtagaagaaacatacctaatatcttacaacatagtgagataaaagttatgaagtaggaataaactgtgccactggatcatacttaaacaattagctttatgatggagtgtcagagaaagccaccaaaaggggggagatttgagctggattttaaggaaggagtcataatttgtctggcaaaaaatggaagtgcattccaaaatagggagcagcgtttgccaaagcacaaatttgtaaaaggaaacgtcacatttgggtacttgagtaagaattggttataaccctgcctcctgccagtttccactctgtaagatggaaagatttgctcctgtggaatttgtttgagaagagacttcgagttccttgtgctgccgttcttttaattctgctcttgtgctcaggcctgtaatttttctttttaaatataaaaaaatatgaaaactagttaggatgatttggatagacttaattattgcttaaggttgagttacttttagttaaagttacactttgcctcaaagaaaaactgcagttgatatgcattngttggtcctctgtcggatggagggactcagtcatgtggggaaatgtgggccatcacacgtggtagagaacagggcccaaagagc

SEQ ID NO: 3681 - DNA, 726 bp, Homo sapiens
tttttttttttttttaacattcaaaattatatggggaaatgcattttcacctgccctttggcagtaaaagtgctgccgtttttggaagtgccatttagaaatgtcttaagcctgacctttcagcactaaatgaaacttgttctatgtaaccaaaaatagatatttcttttaatctaatttagaaagttgaccataatatgactctgaatgtcatgattacgattataaaattatcaaaatgagaattattcagacatgaccatataactcaatttcactggattagatacatcagtaatttacaaaaatacttttatttggatctgtgtcaaggtagcctgcaaatttaagtatgaagatcaatgtgaattataagcatacttcaagtactattgcccggtactgatttatcacaccaatgacatgacgtaataccacaaagttcaagaaaccctttcctataccatcacttaactttaaaaggaagaatatgtagctaaagtaaacaacaaaacttgggataaacagacatactcttgcttaatgcaataacataggttcctgaaatttaatatacaagtctcataaatttggtaatattttcacattgatttaaatgtcttatttttattttcaatcatcataagttgacctataaatgtactgagtttcatattttaaaaggtgcccacctaagaactatgctagacaataatatttggataa

SEQ ID NO: 3682 - DNA, 792 bp, Homo sapiens
ttttttttttataggacaagggagagtcagagcagggaggaacttacaagaaggaagaaggcaaattacttctgcagatagtcttgtttatgatgtactgctttggggacaatcagagatcaatggaagacacttcaagaggggccgagattctactataatgctagaggggcctcttaaatattccacagttgagatgataataataataccaagtgtttacttggcattggccagatgctgctgactgtttcaccctattgtatgagacaggtgcttttactattttcgttttacagatgaggcatatctgaggcacagagaggttaagttggggactgaagtgtggctcaagaatctaagtttctaactgccatgctatggtaagtgagattggtaagtgcacatgaggaactcgtgagcctcaaagtcattcatcaatgcagcattcaatgatggcttacatgaaggtatagaggtaggctcatcacttttacccaaactcaaaaaactgaatttttattaagaaagaagaaagcatggaagatgggcaccacccttcataaatggtcatttaatggtttgggtgcatcccaggaaatcaaatttcaaaagctccctagtgattccaatgtgcagttagtgttaacaaatactgtcgtaagaatttactattatattaaatttaaatagccattaaagataagaaccgttgaaacaccttttcaaagatgacgtagataatatccgggaatccggacggacaacctgcttttggcaactgtctatagg

SEQ ID NO: 3683 - DNA, 719 bp, Homo sapiens
ttttttttttttttggttctgcctcctggtgtgtctaataattttttattgaaccatcagggagtctcagggagtttagcttctggtaggcagagtagaagcagattgccttaatccaatcaggcattgagatgagttgagattgagtaccagcctcttcatccacgtcacttaagaattagtaggtttcttggagtggtatagaatgttaaatttaccccccaaaatttctctcttttcgttgagatattcatcccttgtgtcttggctgcttggtgtttctctcaaatggtattttttaaaaaattgatccagttttcctatttattctcaatagaaaagtattctacaaactcacagtcagacatggaagcctggcatgtattaattataatattgcagttttcatatttggtgcatataattttattctggcctagattttaaagattgtaggccctgcatttaatagtggctagtaagaagaaaatttaagggtttggactcctactctgcaacttaccagctgaacaaaattgatagtgataagtcatgataattaatattctctagtgcttattatatgccaggaactattctaaccacttttacataatacgtattattaaatcatcattaaccccatattagagaatagtaactgtggcacaggaagtatgatagtagcctcaagaaagccaaatgtcctgattctggtg

SEQ ID NO: 3684 - DNA, 712 bp, Homo sapiens
ttttttttttacctactttattccttttcagatttggaggaaaattagctgataatacttttcatgttttcttagactcattaaagtgcaagtgcaatcttcaaattagatttctgtattagtaggaagtcatttctgataactttctgctttagtattttaaagtatttataggagacatgtaaaattaccgagctgatatgacatatatggtgtaacttgataaggtgaactatgatgtggccactgaccctctttttcatggaattttgatgggaaccataaatttcttctttggttcccggttatttctctattcaccaggatttgggtactattgggaagtgggggagagggtggggggggtctggccgaatctatggcctcaagtctttatttaaaacatcttggtgtgtgtgtgtgtgatataagtgcacatatcataaagttctgccctgagtctggattgtaaagctaaacataccccacgggggataaaataaccgttggtcttcataaaaacaaactttcaaaagctggtgaactaaaaggaaactttttattctaatgctgttcaacttaaactcagtatattacagttaatttgtgccaacatggtggatcacatctgtaatcacagcactttggggggtgaggtgagaagatgcttgatgccagtatttgagatcacctgggcaattagaagaatcaa

SEQ ID NO: 3685 - DNA, 756 bp, Homo sapiens
cggagatgaagcggggctccccgcggccgggccgggacatggtggtgtagaaatacctcatggagtgggagcctgggagcgaggaggagctgagaccggcccgaccctcctccctgcgcggatccccgggtcctgcgcccccgccgggcgggcccctcgctcctcccgaccatttccctgcagaccctgcactcacgcgcccaggtctgggtcagggtcagggccagggcccctgagagcagcaggaggagggttcggggcgccatgagcaccatcctcggcgtctggggagaatctgagtcccggtgggtgcgtggggactttagaaccgggaccgcggcggcaccgattggcttctctagaaacccgacacctagtgggaatgagaactgtgtccgcttcgtgagtatcaaggaagaaggacccgtcgcaggttgtagagaagaagagaaactgcggaggtggcgaatccctaaggcggggcatccccaatccatacaccgccttcggggcctgagaccctgagagccacgcctggggccctgggacttcgcctgacccgctcctcctgtgccaagcgctctgtctcagtgtttccctgagtcttgggcccaggagctgtctgagaaaccaggaaggaaaccctcgggtgggccctgtccctcttccttcacttttctcccgggatctccgtcctgaactggatccctgtcactggatctctagagaatccccgggttgggtcctgcttgcttt

SEQ ID NO: 3686 - DNA, 814 bp, Homo sapiens
  misc_feature (618)..(618): n is a, c, g, or t
tttttttttttttttacgtgtagtgtgtaaagaacacaggttttttaattgggcagcaagaaattctatgacagcttctgagacaagtaatcctatgccctatatccaccccatgccaatgacgaccagtcaaaatggtaacacagagtaaaaagtgatctactgtatgtgagtcagaaagtacttgaaaagtgacaaaactgtatgttattaaatgacaaaacatatttagaggctttatttaaaaatctctcactgttcattatcaaagttacaagattgcataccaatagacagactgtaaacataggaaattttcgttaaggaaagatgggtttactgtaattcaatcttttacaaaaaattacttgcaagttattgataacagaatttctcttttactttcttaattctcttgaaaattaaaccaatgtttccactttcatgagctaaagttcaaccatggtcaccttaggaaatacccctgtttatctgttaatcagaaatacaaatcgagtggcacatacttccattttcttcttaggccaaaggtttcagcttcattatattttacagaagaccttcagtggtccggtaagtctttcatgtcacagctgnagtttaatgatggcagtggaggaaagcagaggtgatgcaagtaagaccagcccagttgccttatctgaacatggaatcttttcctgtctggcttgcagagcgaagtgttctggtcagtgctccaacaactgattgagcaagggcatggcgtaacccttagggaatcggcaggaaatgacttcaccgagggggggaa

SEQ ID NO: 3687 - DNA, 621 bp, Homo sapiens
ccaaagcatatgtaaaactggacactgggcagaggctgtgcaaggagtgagtgtgtggctgcattaatccagaaagccacggaggcttctatggacttgcaggggagcccatcttctcctctctcctccaaacgctggagaagctcattctctctgtgagtggagggtcccaggtgtcgggaggagggaagctgcaatcccccactcatccaatcctcctctcttgaaacctcatcagtcacatgtccctgtgtcctgtgagaacctgaagccacatgggccatgactacacagtgccaaatctaaccaacaacaaaacaaagcttttgagagatgcagcaatgcaaagcagtaccctgagtctctcctgctgcagcaatgcaacgagaaccccgagtctctcctgcttgcagcaatgcaacgagaaccccgagtctctcctactgcagacaatgcaagcgagaaccctgagtctctccttgcatgcagacaatgcaaaacagaaccaccgagtctctcctgctgcgagaaatgcaacagcacccgagtcatttcctgttgaacagcaccaatgaccagatgggcagggttaccaaagaagaggtgagagttgacgatcat

SEQ ID NO: 3688 - DNA, 707 bp, Homo sapiens
gcctgagacgccatccacctgttggacctccatagaagacaccgggaccgatccagcctccggactctagctaagccgcgggacggataacaatttcacacaggaaacagctatgaccattaggcctatttaggtgacactatagaacaagtttgtacaaaaaagcaggctggtaccggtccggaattcccgggatatcgcgggcggccgctcgccatttattttgctttagcatccttactctcaccttttatgagattgagagtggacttacatttccttttttacattttcgtatacttattttttttagccatcattatatgtttaagtctattatgggcaaccaatctttggaagctgaatactgaatttaaagaatgctatcttggaaaattgcatacgtctgtgcaattttttattctgcctagtgctattctgcttgtttaactagattgtacaaaataacttcattgcttaatatcaaattacaaagtttagacttggagggaaatgggctttttagaagcaaacaattttaaatatattttgttcttcaaataaatagtgtttaaacattgaatgtgttttgtgaacaatatcccactttgcaaactttaactacacatgcttggaattaagttttagctgttttcattgctcaataataaagcctgattctgatcaataaaaaaaaaaaaaaaaaa

SEQ ID NO: 3689 - DNA, 691 bp, Homo sapiens
tttttttttttttttttttttttatttttttttttttttttttttttgagcaacaaggctgtttatttcacctgggtgcaggcgggctgagtccgaaaagagtcagcgaagggagatagggatggggccattttataagatgtgggtaggtaatggaaaattacagtcaaagggggttgttctctggtggccagggtgtgggggttgcaaggtgttcagtgggggagcttttgagccaggatgagccaggagaaggaatttcacaaggtaatgtcatcagttaaggcagggaccagccatttacacttcttttgtggtggaatatcatcagttaaggtaggaaccagccgtctggatgtgcacatgcaggtcacaggggatatgatggcttagcttgggctcagaggcctgacacacagaattattacaaacacttaggacacagaggtatccattcatggatttctttccctttaccaaggtatgagtacctcaaggatgtgctgctatgtatattatccatccttgaatgcgtagctggggacctggcatgtgaccgatatccactgaacatccgtgaagtgaacgaagtcgatgttaagtagccaggtaggagcagcgagggcgtcacctgacagtcctcattctcaagaagatggtgtaccctgagagggtcatgaatcccatttgg

SEQ ID NO: 3690 - DNA, 582 bp, Homo sapiens
ttttttttttatattttttttttcatgcattactgcgtttatttctctctaaaaccttatgaagtaagaactagctagcaaggggaaggctgggcccaaggagataaggaaactgggccagggtctcccaccttgagcttggagacggggtttcatgtccaagcagcctgatgccagagagctggccctcgtccccttactctcctggggtggggacagggggagcaggggttctagctccctgtgtagctgttcccaagtctctcttcctaacgtggctgctcccttggactcttccgtgtctgctacagagcaggtgcgcagtcagtgtctgctagaacgcgtcactggtgaaacccaggatgcctgggccgctgggcagtggactgaggccttcctcatcccctgtctcctccgaccttggaccagtgcagggtggggccgactgcgtccccgaaccaggaccccaagaacacatggtggtgagtgcagaagactggaagcggctgacccggtccccaggccccggagcaaaaaacctatcggtgcagcatcacagtgaagggtctgtcatagactgtc

SEQ ID NO: 3691 - DNA, 695 bp, Homo sapiens
ttttttttttttttttttttttaacagaaacatgttgcccttttatttgcgtttctcagaatactgtacaaagggagtaaaaatcctattcacactttgcttagaaagattttaaggtgaaagttccctatgatacacagggtgggagatgcagggtcaggagggagaaaacaggcccagtgacctctcctgttcccttggacccctggaaaaggacacagggacccacaccttttcaaaattaacactgcccctagtccaactggggaggggagaaggctccagcccaggctcaggctcccggcctcactttcttctctgcaggctgagacagtgcctacaggccacgtcttgccccttcctctgtgctgcttgagcagggatcctacaggactctcaccacagaccccacatggggtggcctcacaacgccacatgtggctgccacatgagaggccctgccagtgccagtctgcatgaggaagttaaggggtgagggcctgcagaggaccacagcacccatcgtttctgtcacagcttccccatacccccgcaggagtcagggccaagttggacctgtgcttacaatgactcacgggccttttccccacctgtctacccaacagcaacccaggagttaacccacagagctccctccctattactatcaccattcctgtggggtaaatttaaac

SEQ ID NO: 3692 - DNA, 679 bp, Homo sapiens
  misc_feature (660)..(660): n is a, c, g, or t
ttttttttttttttttttttttttttttttttttttagtatttaaagagatttattaaatcatcttatcacaaagatggaaacatatacaaactagaaacatgcaaccatcatcttccacagtcaagtcacaatgtcaaatatttttcttgcctctgcagatgaaaagttcagatcttatacccaactacttactcaccccgaatatttaagtcagtcttcctgaaagtactcagggtagcaagtaacaaaatgcaaacgattatataaagaaagtgcagttaaaaaggaaactatgtggcaagtaccctctttcccttcccaccccccaattaaaggcaaacaatggcacttgtgctcttgcttaacctagatggtcttcaaaaactattaaaatgtaaaagacttaacaaaaaaacaaaaagacgtttaacagatgtcaaaaagctccttagtgtttgaaaataaatgcttaaacaaaagacaacatattttatatcaaacaagtttgaagagccctgaattgcagcattctgtaacataaacaaacaaaaagctggtataggatttatgtcaaaggcagaatttcttcaggcaggtaagtaaggaggtggtggtttccttttcaggcatttttcacggccatttcataggttggcanaacgtactgaggaagtgcc

SEQ ID NO: 3693 - DNA, 747 bp, Homo sapiens
  misc_feature (692)..(692): n is a, c, g, or t
  misc_feature (695)..(696): n is a, c, g, or t
ttttttttttttttttcattttccagttaagtcctatgtcttttgtgaaattccaatacttaaactgcaagtctgcaatcgtctctgaagtcagtgaaattaagaaaaaagtcctaattctcttgaaggtcattttttcctcttaggatatgcagatgcaaccgttgctgcagtctgtgtagaactgccttttatttcccacgaccttgacgttcctttttaacactttcttcttcctcttggcgtttctcatagtgtgagaagtcatcaaaaatggaagtggtgtgcttgtagctggctataattttcaacacctgcttagccttttccagaggcacttcctgagtgtccctagagttggtcactggtttattctcgttgttctctaggcgaatgtgtcgcagttggctattgggaacgtccttcacaaaaatccacctgacatcaaaacgacccttccatttgtcctgggaccacacacctgcacatggtgttgtagtccacagcagatttcatttctgccacgccacagaagtgtccactgccgttgacactgaaaagtaagtaaacggggcctttcccgttcatggaacgatagcagcatccagtctcttgttaccatgctctgtgctgcaccaatattatacttatggaacggtgaatatcgtcctcagagtagctcttatgatganacnncggcatgttcagattccgtcaaatcttggggtatacgtttatggaccgagc

SEQ ID NO: 3694 - DNA, 761 bp, Homo sapiens
tttttttttttttttttcaatggacacttttattgtttacttaatggatcatcaattttgtctcactacctacaaatggaatttcatcttgtttccatgctgagtagtgaaacagtgacaaagctaatcataataacctacatcaaaagagaactaagctaacactgctcactttctttttaacaggcaaaatataaatatatgcactctagaatgcacaatggtttagtcactaaaaaattcaaatgggatcttgaagaatgtatgcaaatccagggctgcagtgaagatgagctgagatgctgtgcaactgtttaagggttcctggcactgcatctcttggccactagctgaatcttgacatggaaggttttagctaatgccaagtggagatgcagaaaatgctaagttgacttaggggctgtgcacaggaactaaaaggcaggaaagtactaaatattgctgagagcatccaccccaggaaggactttaccttccaggagctccaaactggcaccacccccagtgctcacatggctgactttatcctccgtgttccatttggcacagcaagtggcagttgtctccaccacctatgatggtgatgcagcccctagaagtggctttcaccacctcatccatggagagcttttggttccccgggcaaaagcttcccattcaataccccccacaggaccattccaccaatctgcttagccgagtgacagccttcagcatacttcttgctggtttcggacccg

SEQ ID NO: 3695 - DNA, 291 bp, Homo sapiens
ttttttttttttttcgaccagcctctgccttaaaggaaatctttattaatcacgtatggttcacagataattctttttttaaaaaaacccaacctcctagagaagcacaactgtcaagagtcttgtacacacaacttcagctttgcatcacgagtcttgtattccaagaaaatcaaagtggtacactttgtttgtttacactatgatactttctaaataaactcttattttttaaaagtctggtctttccttcaatgttacagcaaaacagatataaaatagacaataaat

SEQ ID NO: 3696 - DNA, 366 bp, Homo sapiens
tttttttttttttagcctagaataggggtagtgggattagagcataggaagagaaataggaccaattcaagtgacattttgtgaaacaagccaaatttattggtaaaagaaaagatcacaacgatttactcagtcttcatgattttattagtcttgagatacacattattcaaggctactcaccaaagtcataatagacaaaactatttatgtattcctatagattggcagttaggtgagaagggaagggaaattatattaatatgggcgattaggatagtgtgtgatttagtgtcacaagatgtctacaacagagaaacccacaagtgatgaaagacgcgggggatatgtagagagatatatagc

SEQ ID NO: 3697 - DNA, 670 bp, Homo sapiens
  misc_feature (39)..(39): n is a, c, g, or t
tttttttttttttttaaaatatttatatggatcaacttntatgaaagtgaataaacagagataatgtggcaaaaagaaattttcccaatattaaacccttgatgatacttttaaattcactataaggaaaagaatccaccagtagtaggtagctacttatttttgctgagtgtcctctgcttttctgcatgctccacaatcttttcttccacataaagccccttccgctttcgtactgcgttcatgtacttccgggcttggttctcagagtcagccttctccccaaagtgcaagtattcctcctcagtagttggcacccagaaggggtcactgggaatgatctcccaatggctgaatactagttgtgggctggccaggccacttgtcctcttcctgatttcatcagcaaaaccaaagctttcagcaacaggcagcacagccttgatgatgaacatgtctgtcccttctttcatttcttcttgaagtacccgaccttctctctttgacaagacagcatagactcgaccgagaacatcaccagtggccatgatgtcacatgtgtacatagctgccatcaggcgctgaggtttcacttgcagtgcatagcgacatgcttctttcatggtggcaattagctgtcctgaggacagggtccatagcacatcaggga

SEQ ID NO: 3698 - DNA, 706 bp, Homo sapiens
  misc_feature (180)..(180): n is a, c, g, or t
  misc_feature (192)..(192): n is a, c, g, or t
atggactttcctactttgccagtacaatctaacgtaattagtcatcgctattaccatgtgatcgttttgcagtacatcatgggcgtggatagcggtttgactcacggggatttccaagtctccaccccattgacgtcaatgggagtttgttttggcaccaaaatcaacgggactttccanaatgtcgtaacnactccgccccattgacgcaaatgggcggtaggcgtgtacggtgggaggtctatataagcagagctcgtttagtgaaccgtcagatcgcctggagacgccatccacgctgttttgacctccatagaagacaccgggaccgatccagcctccggactctagcctaggccgcgggacggataacaatttcacacaggaaacagctatgaccattaggcctatttaggtgacactatagaacaagtttgtacaaaaaagcaggctggtaccggtccggaattcccgggataaacggtgaaatctctagcctctttgtgtttttgttgttgttgttgttgttgttttatataatgcatgtattcactaaaataaaatttaaaaaactcctgtcttgctagacaaggttgctgttgtgcagtgtgcctgtcactactggtctgtactccttggatttgcatttttgtattttgtacaaagtaaaaataaactgttatgagtagtaaaaaaaaaaaaaaaa

SEQ ID NO: 3699 - DNA, 714 bp, Homo sapiens
  misc_feature (305)..(305): n is a, c, g, or t
  misc_feature (423)..(423): n is a, c, g, or t
ccgttttggccgtactccatgggctggatagcgtttgactcacggattgccaagtctccaccccgttgacgtcatgggagtttgttttggcacctatctacgggactttcccaaatgtcgtaacactccgccccattgacgcaaatggcggtaggcgtgtacggtgggaggtctatataagcagagctcgtttagtgaaccgtcagatcgcctggagacgccatccacgctgttttgacctccatagaagacaccgggaccgatccagcctccggactctagcctaggccgcgggacggataacnatttcacacaggaaacagctatgaccattaggcctatttaggtgacactatagaacaagtttgtacaaaaaagcaggctggtaccggtccggaattcccgggatggcgtttggcacanagtcccctctgcctgtttggagctcagtgctagaccaggtcccctgccccgagctttgtttttggggttatttattgaaaccaagtgtggggagctggttgtgggtgtgagtgggggtgtggggtccaggctgggcccagtgaaaaggaggaaggggttcccatgcgggggaggctctggggctgaggggaacattctcacgtgtttggtgcttagagacctgcccggggcgttgggcaggccctccgggggctgaattaaaaatgctttatttcccaaaaaaaaaaaaaa

SEQ ID NO: 3700 - DNA, 747 bp, Homo sapiens
  misc_feature (663)..(663): n is a, c, g, or t
tcctcgctataccctggtattccgtttgccgtacatcaatgggcgtgataccgtttgactcacggggatttccaagtctccaccccatgacgtcaatgggattttttttggcaccaaatcaacgggactttccagatgtcgtaacaactccgccccattgacgcaaatggcggtaggcgtgtacggtgggaggtctatataagcagagctcgtttagtgaaccgtcagatcgcctggagacgccatccacgctgttttgacctccatagaagacaccgggaccgatccagcctccgggactctagcctaggccgcgggacggataaccatttcacacaggaaacagctatgaccattaggcctatttaggtgacactatagaacacagtttgtaccaaaaagcaggctggtaccggtccggaattcccgggatggaacacagcatgatcttgttactgtgatattttaaatatccacagtactcactttttccaaatgatcctagtaattgcctagaaatatctttctcttacctgttatttatccatttttcccagtatttttatacggaaaaaattgtattgaaaacacttagtatgcagttgataagaggaatttggtataattatggtgggtgattattttttatactgtatgtgccanagctttactactgtggaaagaccactgttttaataaaagatttacattccaccaaaaaaaaaaaaaaaaaaaaaaaaaaaaaaa

SEQ ID NO: 3701 - DNA, 166 bp, Homo sapiens
ttttttttttttttttttttttttttttttttaaacaataaaatagctcttggtttattcacttggattgggatcatggttcatttccaatgggtgtcagttctgctgaatagtaatatcttaagctgcatcctccattcaaggaagtggctttcctttacatccg

SEQ ID NO: 3702 - DNA, 201 bp, Homo sapiens
gcttttccattttcctggcctacattcatcttcgactttctaaaaaagctcaacccaaaagaaagacagggttggtgtttaacacttaaacagtataaaatgcgtgaacccgggaggcggagcttgcagtgagccgagatcccaccactgcactccagccggggcgacagagcgagactccgtctcaaaaaaaaaaaaaaa

SEQ ID NO: 3703 - DNA, 105 bp, Homo sapiens
ttttttttttttagaacatcagtgtggcctcctgcaatagcagccaggtggtggtggctgtaggcagggccctctactatctgcagatccatcctcaggagctcc

SEQ ID NO: 3704 - DNA, 183 bp, Homo sapiens
tttttttttttttttataaacttatgtattacaggggcaactttaatttatttgggtaaagatgataaagcagctaaaattttctatttcctggagtacatccaacaaaattttatttatttttatatctatatatgtgtattttatctatctatatctgtatctacctactcatatggtaga

SEQ ID NO: 3705 - DNA, 715 bp, Homo sapiens
gtacatctacgtattagtcatcgctattaccatggtgatgcggttttgccagtacatcatgggcgtggatacggtttgactcacggggatttccagtctccaccccttgacgtccatgggagtttgttttggcacccaaatcaacgggactttcccaaatgtcgtaacaactccgccccattgacgcaaatgggcggtaggcgtgtacggtgggaggtctatataagcagagctcgtttagtgaaccgtcagatcgcctggagacgccatccacgctgttttgacctccatagaagacaccgggaccgatccagcctccggactctagcctaggccgcgggacggataacaatttcacacaggaaacagctatgaccattaggcctatttaggtgacactatagaacaagtttgtacaaaaaagcaggctggtaccggtccggaattcccgggatccgccctttttttttttttgcattgtatgtcaaaagcgcttgttctttcgtgcatgtgtaagatttaatggttccacttgtattatttgaccatgacattttggagaaacattcccagctgtaatgttgtgtatggtagttctcactggatgctagagttttcaaaaccactattcttctaataaattttgttgtgaaaaactgttaaaaaaaaaaaaaaaaaaaaaaaaaaagggcggaaaaaaaaaaaaaaaaaaaaa

SEQ ID NO: 3706 - DNA, 192 bp, Homo sapiens
ttttttttttttaattctctacattttcctttatttaccacctatgcttaatttagtatctgcctctgaatatggcagcctacttcatttacagtaaacctgcctatctttcttttttaaatagagggttctgaaatatgaatttgggaatatagagaagccagtgaaaataaataattcatgggaaaacaa

SEQ ID NO: 3707 - DNA, 800 bp, Homo sapiens
tttttttttttttttagtagagatggggtttcgccatgttggcccggctggtcttgaactcctgacctcaggtagtctgcccgcctcaacctcccaacctgagcacgtttttaaattgaaagaagaaaagaatccttcaggtactcaggttgaaaagttaataataagctatttacaaaggagaagaaagtaatctaatctctgatttctctggcaatggtaactggcagaaaacaatggagccaaatctaacaaatttttgagtgggagaacgagtagtgagatctcaatatttctatatatccacgtggtgatctgcagaatatagataggagcggacagaagagaaagatgatgcatcatgaataggggaggtaatcaagaaaattaggatgggacgtatggctctctttgctcgaaaatacatttagtaggaaaggacatatcaaataacctaattgataaaagaatcaaagatcaacaaacacaacagcgatgaggtgccacacacaaaatacacctttcatgcagaagagcaggaatcccttcagcttggaaccatgttctggaattcagtgagactgtgatatctggggatatgtatactcagagactaagcttaccccttgttgagaaacattgttgcttgctaacgtgtttccctccttcctccttttccacccacaaaccccagactcagtacatctccatcgccttacataaccatgggcatccaaggaaggtagcctcatacccagacaccagtgggctggaccggtccaactccggctgggatggtc

SEQ ID NO: 3708 - DNA, 465 bp, Homo sapiens
gtctatcactgacatactgagtatttttatggttacagtgacagtgaggaagaaaaaactacaagaggggttggagatgagcgagaacaaaactcaggacagtaaacaaaggggacttcacacaggtgagaagaaactcgggaggctcccatgaagagtagtggggtttggtccaacaggcgggtcgagaaagggcttactcaaggtgtgcagatcccaccggctcgggtctgacaccaactggtgtaccgcaccacaattctaacaacgaacagaagagttagatcagagtgccaccagcgaagggacatagtccccaacagggctgccctcacctcagacaccagcacccagtgtatcccgggaattccggaccggtaccagccaggctaaaaggtacaaactggtactatagtggtcacctaaataggcctaagggtcatagcctgttacctgtgtgacatt

SEQ ID NO: 3709 - DNA, 192 bp, Homo sapiens
tttttttttttgccctatattgctgcaaccacggcgccagtacttttcacaagatgctgtgtataggctattttcactatctcctcagtcaacgctgagctgacagttcttcagtgctacactccaactaaactgtacagtaagttctgcagaaatggatctaatatttctacctttatttacaaatatcac

SEQ ID NO: 3710 - DNA, 154 bp, Homo sapiens
tttttttttttttttttcaattccaagtgactttaatgataactctgcagcaacagaacttcccaggctatattacaggtatacagatacagctacagtgtctctaactacaacatgcaaggctattatcaatctatttggaagtcataactag

SEQ ID NO: 3711 - DNA, 676 bp, Homo sapiens
tccttgagcctcgggcacgctacgagagtcacaggtagtgggtctgctgcctgcccaccccccgatgccacacgccgcccctttaccgcatgcgatctttgcgcctaatcatgtcgtcgcccagtcccgcttctggtactttgtatctccggtaagtagatgagaagtcttcacggggagattgtctactgtgggccggtgtttgaggagtcccccctgcgggtgaagaacttcgggatctggctgcgctatgactcccggagcggcaccccccacatgtatccgggataaccgggacctgacccccgcacggcgctgtcaccccgtgctatccgagacactgggtgcccggcacccgcgcccgagccccctcccttcagatcactgaaggtgtgaggagatcgcggcccgcaagtggccgccggccggctgtcaagcagttccacgagctcccagagtgcaagttcccgctgccccacccgggtcctgcgccgtcagcaccagccaccgcttcctaccaccccagaggccccacacgctttttttaggtgcagggcgcctcgtccgggtgtgcccccaataaactcaggaacgccccggaaaaaaaaaaaaaaaaaaaaaaaaaaaaaaaaaaaaaaaaaaaaaaaaaaaaaaaaaaaaaaaaaaaaaaaaaaaa

SEQ ID NO: 3712 - DNA, 685 bp, Homo sapiens
tgtagattttggcattttttctggcattccttcagctgattcttgacagatttagtcgttccacttcaccaaaggtgtaatgctccaggactcactttgctcatgttattgttgacatgaatctatgcgtgaaggttcttcaggttcttcaagtctccatctttgatttcggttattttgttgttttgcaggtctagcagagttgtgtcagggggaagatcctttggcactttgtccagaccctaatcagcacactggaccactcgaagatggcattgacatcggaaggggcacactgggcctagggagggctcgaagtcgcggtcatcaggaacttctgggccctatcccagaagcctcatcttctagcataaagtcaaataagcctctctgttgaaacggtccagcccagccgctcgcgggtgccagcagccgcggtaattccagctccaatagcgtatattaaagttgctgcagttaaaagctcgtagttggatcttgggagcgggcgggcggtccgccgcgaggcgagccaccgcccgtccccgccccttgcctctcggcgccccctcgatgctcttagctgagtgtcccgcggggcccgaagcgtttactttgaaaaaattagagtgttcaagcaggcccgagccgcctggataccgcagctaggaataatggaatagga

SEQ ID NO: 3713 - DNA, 248 bp, Homo sapiens
tttttttttttttttaaaagcaacaggcaatacatatgagcatgaatagggccaactccatgcagtgatggaggtatggaatttacttttgcctgtgaaacactctccatcagcaggcagaggattaaatgcatgcctcatgggccttccttacaggcacagtccagagaaaatcccggggcccatactatggcatgaataactagtgctgtggggtctgaagcaggtggcctgggagggagacaggc

SEQ ID NO: 3714 - DNA, 674 bp, Homo sapiens
gtcatcgtataccatgtgatcgttttgcagtacatcatggcgtggatacggtttgactcacggggatttccaagtctccaccccattgacgtcaatgggagtttgttttggcaccaaaatcaacgggactttcccaaatgtcgtaacaactccgccccattgacgcaaatgggcggtaggcgtgtacggtgggaggtctatataagcagagctcgtttagtgaaccgtcagatcgcctggagacgccatccacgctgttttgacctccatagaagacaccgggaccgatccagcctccggactctagcctaggccgcgggacggataacaatttcacacaggaaacagctatgaccattaggcctatttaggtgacactatagaacaagtttgtacaaaaaagcaggctggtaccggtccggaattcccgggattgcacccagcaaagccacaggcacggggctacctgaggccttgggggcccaatccctgctccagtgtgtccgtgaggcagcacacgaagtcaaaagagattattctcttcccacagataccttttctctcccatgaccctttaacagcatctgcttcattcccctcaccttcccaggctgatctgaggtaaactttgaagtaaaataaaagctgtgtttgagcatcaaaaaaaaaaaaaa

SEQ ID NO: 3715 - DNA, 428 bp, Homo sapiens
tttttttttttttttttttattataaatatttattttaaaaaatttcttggcagttaaaaggaagtggcataatgagcaggacaggacagttaccggctccccctcagatgcctctggctggcttctcacattctccaagatccagcctctaggctccagtctcggctacctctgctgggcggtagctcacaccccctttggttccccttctgtgctgccttctcatctgcacaaggaacgcgacgctggtgacagcaaaaaggaggccaaaaaccaggggtaggatgtcaccagcagccaggcaggaattcagctggactgggtcagccagcccgaggaactgcttgtcgcactcctagcagggaagagaggccgtcaactcactcgcccactctcaaaggctgcgttcgcttcggtaagtacatgc

SEQ ID NO: 3716 - DNA, 735 bp, Homo sapiens
tttttttttttttgaagttaactcattttatttctaggattggatttcaacattttaatttctttggaatataagtcacttttgcaagctaaaaaatagaatcaaactaaggtgatctagtcctctaggcatccaggctgatcctggaatcatgagcagaatgatgacatactacaagggtgctagcaatacggctataaactctaaataataaccactacatgtttcattaggaaacagccaaaagtccggccgttaaaggaataatctgcagaacatcttgatttacaagggacaaaatgatgcaaattatatgctgtccaacctactggtgaactggatcagaatggtccaaggactgttaaacagaggaagtatttacattttgaaaacttgctctgcaggataaaaaaattcctggttgctgtcagtaagaaagcaagtaaaaaaaatattacagatgaactcactgatctttgattttactaaggtcttccactggaacatgaaggtagggataagtgtacaggataatatactcagatatttttaaaataaactacttaataataagaaattagccataccacattgttccatttgctacaagaacaaatggccatgaagactatttaaaaagaaaatgctcagctctacaagaacggtggtgggcaggcaacactttccattacagaataacctctattcttccatggattccatatcctggggaaa

SEQ ID NO: 3717 - DNA, 742 bp, Homo sapiens
ttttttttttttttttttaagtcagaaagaattaaaacatttattgggcataaatatattacatgatacactacagatacagttaggtattacatatagcataatatttgcaaaatctatacattaaaattgatatggcagttttaatacaatgtatatgaaatagtctaaaatttacaatacaggaaagacatgattttcgttttgcgtcctagagttgaaaagcttggaatgtagtgtccaagcagtgaggtaaaacattttatcgtttcaatttaaagaattgtgcaaggataacattcaaacacattcaattagggcacttctcaatgtggacatgaatactgaattagttgtagccaacaaaacaaggttagaaaatgccaacatttcaagctgataagaacaaggcagagaatatgcagaaaaatctcttgtaaaaagttttctttttcaacaatttctttgaggacaaagggcagtttgcttcacatgactggaatttcttgtgccagggatgagttgacatacagagaagagtcagagcatcagaaggccactcattcactcctcacatagcaaaagggcaaagagatcaggttatagaacacttcattgtgatgtacggtgtgatggcaatatatatcgttatatatcaagtatcacatatacactattgtgatcacaaaccgtgcatagagagtaataatttctgacggaggacttatgataccatatggga

SEQ ID NO: 3718 - DNA, 699 bp, Homo sapiens
  misc_feature (658)..(658): n is a, c, g, or t
  misc_feature (699)..(699): n is a, c, g, or t
tttttttttttttagtttcacagtgttagccaggatggtctagatctcctgacctcgtgattagcctcccaaagtgctgggattacagacgtgagccaatgcgcccggcctgctttttcttttttctttttttgcagtggtgcaatcgtggctcactgcagctttgacctttggggctcaagcaattctcccactgtagcctcttgagtagctgggactataggcatgcaccaccatgcccagctaattttaaaattttttgtagaggcaggggtcttgctacactgcccagattggtcttcaactcctggcctcaagtggtccacccgtctcagccttccaaagtgctgggattagatgtgagccactgcactgggccttattccacagctttcaaagaatacggttacagagaggttgggtctcatagcacttttattgctgcagctcatatgcaaaggttttttttttttttttagagggagtctcactcttgtccaggctggagtgcagtggcgccatcttggctcactataacctctgcctcccaggttcaagtgattctcctgcctcagcctcctgagtaactgggattacaggcatgtgccaccaagcctggctaatttggtattttagtagagatggggtttcaccatgntggccaggctggtctcaactcctgaacccaatgatcaccan

SEQ ID NO: 3719 - DNA, 713 bp, Homo sapiens
tttttttttttttattatgccttatttattttaccaatagttgatatacctatataatattcacgtgccacaaaaatatgagaagattacatgtgaatattgatctcatgggtgataaagtatacaaaagttgattaactgaagcagaaatccattgagaaatgcttataaccatcaggtattacatttacagatgttggccaagtcaaagtttgaacatccacagggggacactcatcataaactctgtttaatctttaaaaggagacagagaaatagccaagtacgtagtaataaaatctgcctaatcattctcctacgattcttctatgcttgagttcgttttataggagtcttattacatgcacgtttacattccttcccgatatacatattctcaaggaaacgtggcatcctgtagcccctgcttagaatgaaatccttaaaggcaactgttccgtgaaggtctgcaagtaactcctcctaaaagagtacccacatttgaagaaaggggtcagccatcagaagcttgatttcatatttgttctcattaaaagcatttagttctttataaagtatctcattttaacccatatccttctggttttggaatatgtgtgtaatgttcatgagttgatgaatatgaaggcttttaaagatgtcagctttctctccttccctagacttttcttatcccatattacggatgggca

SEQ ID NO: 3720 - DNA, 706 bp, Homo sapiens
tttttttttttttttaatatcacctttatttgtactttctgtgatttttaaaaaacatacagagcagctctcttggtgactatgggctgataaagcttaaagatcagtaataaatagaagtccaggggctgggtctgtatttcgctaaggaaacctcatctgagcttcatgccctgtaaaattaagctctaaaacctcccctaaatgagatagctaaatgtcaaagcattttataaactgtaaatcaattcaaatgggagttagtattttttttttcaaatgaacatgaggaagtatctttctgtatttagttttaatattcttgccaggtgtttattgaaataccttctttcattgtacattagtatatttaaaaagtgcttgcatgtctgtttattatgaactactaattttttactaataattatttccatttccactatttactattctgaatgtcacatttatttatgttttttgggatggagtcttgctctgtcccccatgctggagttcaatggcacaatctcagctcactgcaacctccgccttctgggttcaagccattctcctacctcagccttctgagtagccgggaccaaaggcgcccactgccatgcctggtaacattcgtattttaatagagacaagtttcaccatggtggcagggcggtctcaaactctgactcaggtgatcactggctca

SEQ ID NO: 3721 - DNA, 684 bp, Homo sapiens
  misc_feature (41)..(41): n is a, c, g, or t
atctaaacattttctggcttactaggctgcccttttcctangtccttgggaagaaagagcaagcctttattgagactttggttttggtcagtgtacattgacatttttgtgttgccagcttcttcagcttcaggtctgggatatatgaggtaaaagagcccagggaactcacgactgtgttgttccttgagtcccaaggttcctatccattctgccttcttctctgtacttctcagtcttctgatctctgttttatagacaatgtctagggtttagggtggtacttagagggaagaagagggaaaagaatgctccctttagcttcctggaagttttcacattagtccttaaacagcattatgactttgaattccacccacttctttccatttcacaggcaaaataagagcagtagaaaatgataaagagtggtgtgggtgtgtaagtagatatgaggaggaacatttctctataaagagaggtgttatactatggccccttttaaccaatcaaatatgtattgaacacctaccacgtacaaaacattgtggggaacagacaagtatacacaagtataagccacaggcctctccttcagactgtgcagaagcctatatcacttgtgtatttgtccagagatgcaaaatgtttaatgcctggctctgtggtggcgtggatgggagc

SEQ ID NO: 3722 - DNA, 786 bp, Homo sapiens
  misc_feature (735)..(735): n is a, c, g, or t
tttttttttttttttttgcaacaagtgtagaatttcccctgatcaaaatctgaatatgggttaatgcatgttttctcattctccgtgtatgaacccactcctaacctctctcatgcctttttaagcttaagagagagaaataaaagaaaatggatatagaccatgtatttttatttatgaaaagagaggcatattctaatagtcataaggcaatgtgtttaagagctgcacctgaactggtattctcaaaactgaaaatagttatcaactctattcaacttgtaagatgtatctatgtgcttcccaagtcactggttgtcacccaaatggaccacggtgactccatcatggccttaaggaggccattatatactgtgtgtagtatgcacatgtatttttaaagaaatgacattaagagaagaaaagaacagcctttcaaacatcagttcctcaaataaggggtgacagtgctatatgggtccctttttaatctcctcaccttactcagttatcacatacctccaaaattagacaaataagggccagagacaaagctccatggtgaatgcatctttcagatgtgctttcaattcactgggttttttaatttcccattcctgatttactgaggagtaaaggtgagaatcatccaactgatgacaaagtaaacaggaaacaggataaacagctaggctctgcggttggaggctggtatcagcaaggaaagctgtggangcactatagaccaggcaacatcacaatcacacaaaagccgacatgaagttc

SEQ ID NO: 3723 - DNA, 684 bp, Homo sapiens
  misc_feature (468)..(468): n is a, c, g, or t
ttttttttttttttagagggtactatttcatatatgtgtgagccccacaaatgtctattttaaaaagagtatagtccctggccaggcgcggtggctcacgcctgtaatcccagcagttgggaggccgaggtgggcggatcacctgaggtctggagttcgagaccagcctgaccaatatggtgaaaccccgtttctactaaaaatacaaaattagctgggcatggtggagcatgcctgtaatcccagctactcgggaggctgaggcaggagaatcacttgaacccgggaggcgaaggctgcagtgagccaagatcacgccattgcactccagcctgggcaacaagagggacactccgtccccaaaaaaaaaataataaaaaaaataaaaaataaaaataaaaagagtatagttcccaagtggtttctcacaaacattcctgatttatactgggggaagtgatgcataantggaacattaatccattatgttggaaaattaaatatttcctgcaaagcaattccttgtgcaaaaatgctaagctgccaatgagcttaccacaatagaaatggagtcatttcccaaagtacctgttcacaagttatagaaacctggccttccattccaaatcactgcaaagagagtacatgcagtagtcctggtttacaatttaatagagatgagga

SEQ ID NO: 3724 - DNA, 713 bp, Homo sapiens
tttttttttttttttttttttttttttcaaatcctaaatatttagtcctttatttaagcctgcccctctaaatttaaaaaggtatcagcactctgggttaccaatggtaagcaatataaaaatttcactggtatcaattctaatgggttcagtccatccattttcttatacagtgaatgtctttttttctatcagaatccaacagaagaataatgcaaatctcacttctgagcccacgggcaagcagtctcaacaataaccaaaaaatgtcactttacgactggtagtctgtttctgaagtaaaaatattctcgccagtaatcaaaattggtcatgaggaaatccttcactgttcaagaagcacagttcgaagctcatcttctttattgatcatcatcgaagcaatggcaccatcattaaactcaaaagaagttcctccatccacaaccatacaggcatcccaacaacgagaacgaacacaaacctttgaggagaaacaacgctgacgactggcttgagaaaactctattggctatgggttctcgaatactgaaaagtatttgggttcttccggactgtagagcagtgattcattatattcatttgttactttctctaccaattctctgttcaagtggaagactcaaatttcctgtgtcgtttggcaatatttaaaacatcttctacagcctgagtggcaaccctgttaacta

SEQ ID NO: 3725 - DNA, 719 bp, Homo sapiens
ttttttttttttttttgagcggtagcaagctttatgtgaagagcaaaatgacaaagctcccacagcgtagaaggggacccgagcgggtgcccatcactggtcctttctgggggttccttccccaagtttcatagggatttacaggctagagctttgtccgctattcagtagcaggtcacaataccttcaatcctgctctaatcagaggcatctctgccataacttcaggaggaattgagggagagggggcagcaggagccctctgtgtactggggaaggaaagaattcctggcttatactccctaaagacaggactacactcagatgtggatgaagggcaggaattctaacccctgcccctcaacacacacatccctgctacattccctctttctcactagaaatttgagatgaagggtcctaatcacatcttctgcttgaaacagcagagatttcaggctccacccatagtcaatagaaagaaaggggcaaggggactgtgaagtcctgaatgcccagctctgcgcaggaagacaggcagagccagctgcaaggctggcagctttccacccagttcctcctgtcacccccacaccaaaacccctccaaagatacaacattccctgctcctttctccaatcagttcccctaacccttagacagctgtacggggagcaaggggggtgctgcgtgatgacagctggcagaggagcagcaaa

SEQ ID NO: 3726 - DNA, 727 bp, Homo sapiens
ttttttttttttttttacttatttaaaaaggcctggtggcaggaatatagtgtaaaaatcattggaaaaactaaaaggcatcgatacatatccgaatatacattttgtacataaattacatttcctttagtctttctgagtgaggtcctgattcagtactgaggtctagtaattaagaggtcccgggagctgcacgttcaggccggcatagtccaccatgtacattggccattgctagagagagggacaaagggactggattaggactccaggtgaatggccgggaaaaaacccaaaaatttgtttagtttctggctttgggaagaagctttctcagaaggctatttatttatattttttatttttttggagatggagtttcactcttctgcccaggctggagtgcagtgatgcaatctcggctcactgcaaccttggccccgcgggttcaagcgagtctcctgcctcagcctcccgagtagctgggattataggcgcccgccaccatgcccggctaatttttctatttttagtagagacggggtttgccatgttggccaggctggtcttgaactcctgagcctcaagtgatccgcctgcctcggcctcccaaagtgctaggattacaggcgtgagccaccacacccagcctatttatttattttgagatggagtctcgttctcttgccaggctggagtgccatgggcgatcttggctcactgcaga

SEQ ID NO: 3727 - DNA, 727 bp, Homo sapiens; identical to SEQ ID NO: 3726

SEQ ID NO: 3728 - DNA, 700 bp, Homo sapiens
  misc_feature (481)..(481): n is a, c, g, or t
ttttttttttttttgtgatggagtctcactctgtcacccaggctgcagtaaaggggcatgatcttggctcactgaaacctctgcctcctggactcaagcaattctcgtgcctcagcctcccaagtagctgggattacaggtgtgagccaccacacctggctaatttttgtatttttagtagagacacggttttgccatgtggccaggctggtctcaaaatcccgacctcaagtgatctgcccacctcggcctcccaaagtgctgggattacaggccaggttaagcacttttctaactgcaataaagcataagcattaactgagatctagactacttaatattttttgagacaggggctccctctgtctcccaggctggagtacagtggcacaatctcggctcactgcagcctgaaactcccagactcaagcgatcctcccacctcagccaccggagtagctgggacaacaggtgagcgccnacactccccagctaattcttgtatttttctgagaaaatggggtttcaccatgttgccggggctggtctcaacctcctgggctcaagtgatctatcttcctcggctcccaaagtgctgggaattacaggtgtgagccaccatgcctggctgatttactaacattttaactttttttcacgatgtattatggtgagattacacttgtctattagaaaatca

SEQ ID NO: 3729 - DNA, 655 bp, Homo sapiens
tttttttttttgtttataatttgaaaactttaataatgtcatttatatagttataaaaccataaaatcttttaaataaggtacattcaatttctcagagcatctaatattcagataatttatatttcatatgttttccaacattaaacaattgactaaataatgcattttctataaaatgatattacagcttatacagataaaattataaaaatactccacacagaaaaatatggcagtacctattagaaaaatgctacaaactttccattaaaaatatatattttctctttcatttgtcataataaacagaatataattttctttctaaaattaagtcataccgttctctttataggatgataatatgtacaacatcttatatctgaatgaatataaatagcaatactgtaatagtgttacagatatattagtaacttttacagaaaaacatatggcttctaataaaagcctctagcatagctgaaatctcaaagctatttaagttagacattcccatatatagtaaggcacaatggagtctagtataacataattccagttgaattactgcaagcagtaactagggaacactactagtcagtagataacgatccagatctgacagtggattaaccataggggtaatcggagga

SEQ ID NO: 3730 - DNA, 143 bp, Homo sapiens
ggataaatcccacttggtcatggggcataattatttttgtccattactggatttgatttgctaatgttgtgttgaggatttttgcacgaatattcatgagatatgttggtcagtactttttttgtaatagctttggtctgggt

SEQ ID NO: 3731 - DNA, 640 bp, Homo sapiens
tatgttgtccaggctggtctcaaacttgtggcctcaggtaatcctcccgtttggcctcccgaagtgctgggattacaggtgtgagccactgcaccttgcccagtttcattttcaatggctccagttagtcatggtcaaccacattctgaaaattttaaatggaaagtttcagtaataaacaattcataagtcttaaattgtgtgccattctgaggagcatgatgaaatcttacactgtccctctccattccacttgacttgtgaatcatcccatcaaccagcttatcctcgctgtacaggctaccctctcattagtcactgaacagccatcttagttatcggattgactgcagcagtatcaagatgcttgtgtttgagtaattcttattttacttaataatgaccccaaagcccaagaggagtgatgttggcatactgttataaatattctattttactactagttatctcggttaatctcttatgactgatttctaaatgtttaaaaaaattgtttaccaagttcaacaatttttaaaattaaaaagtcgaaacattttaaatctacccattaccaacacatctctcgtcaatctcttgtgcctagcttataactaaacttatcatatgtatctcagga

SEQ ID NO: 3732 - DNA, 752 bp, Homo sapiens
tttttttttttttttgacatccttgtatgtttactataataacagcaaaattttgccaaaccagagccaatttccttggctctaggtacaccccttccaagcaatgcaaaggacatctccaatcatgacatttaagacaagttctttatttctctgacagtgacttcttgaagtgcacatataataaataaatagaaaatatatctctgttcatggtgatgcctacaagaaatgtttacatacaaacactctatacatctaactcccgaaaaaggaccagctatttcggcaacagaaaaaagacaagcatttcagaggagcgtgctttccttaaagacctaactcacttaagtcttacaaacagaaataacaaggaggacaatttctaagcaataagaaaatttgtgctaccaagaaaatgcctagatataggctctcggtgaatggtttaggaaagaaacttttatgtacagatcctgtacgtgtgaaaacatatgtacaacctctgagcaactttcaaatagatatcttttttaaatgaactgagccaagacattcaacattcctgcaccactgaaagtgatcacatcctaagtggttcacagtgtgagaccttgctaagagagtgaaaactccaacaaaaaccggtggacaagaaaggactgcaggtccttcaacctctacctctcataaacactaatctcactggaagaagtcctcctgtgaatcggccttgagccagccatatctta

SEQ ID NO: 3733 - DNA, 752 bp, Homo sapiens; identical to SEQ ID NO: 3732

SEQ ID NO: 3734 - DNA, 83 bp, Homo sapiens
cacaatgctctgatcaatccttctttttctctttggcccacaatttaagcaagtagatgtgcagaagaaatggaaggattcag

SEQ ID NO: 3735 - DNA, 424 bp, Homo sapiens
accgccttcctgggaagctgtcccctggcaggcatgggtgctttacatcctgagctgggaagctgtttgcttgagggtttttctcaaggatcgaggcgcggtgtgagcccgtccatgctcggtcctgtagatcccgggaggccatgttataaaaggagacttgctgggatgtgacgggttgccacttgaaatatcttccatttggataaagtaggaatatttatacatgtgccccaaacgtccctccgtgtcccacacccccaagcggaaatgtgaaaatgggccttgcctttgctggtgcccaaggaccgacttccactgcagtgacggcgctggcggggtgaggcgctctagagcccacatcccgagaggtccctcatgccataagcaagacaagtagcgacaggacacaaggcaggccatc

SEQ ID NO: 3736 - DNA, 749 bp, Homo sapiens
tttttttttttttttttttttttttttggtttctgtcaaatatatttttaaataaaggcagtaacgttggcaactgtacagggtgcatgatgggtaaggaactgggcatggggagttgggagggggacatggagagaacacagaggaggaggcgcaggggagaatggagtatatcaggtcaaaccatacaacggtcagagccagctccatagaccacgccaccaggacaggcagcacgagtctgacagacacggtacgcagacacacgagagcgacatacacagagacacacgtgttctccaagcccaagagcctccactggcctgcacaagcagggatcagtcagagccaagagtggagaaactcaagcaaatgccgaggctacgaccccgtccctcgactctgtagcccctaaagcccacaatgtaccccactgtccgtccagaggcctccctccccagggcctggagatccgggcccagcacactgccgtgtgaaagcagaacgtcagtgtgagaatgaagataaaccggcagaccactcaggatcacccctggcagaaggaaggggcaggaggcagacagggagggaggcaggcagtgctgctgggcatcctttgtcacacaagtgtgcccggaacgaggagaagagaaaacagcccccagtgccagagccagacgacaggaatgaaggcatgatggctcctggggctctagactcagctggcttcactttctggggcccgaaag

SEQ ID NO: 3737 - DNA, 784 bp, Homo sapiens
tttttttttttttttaaagattcaatgacaaagttttattaaataccaatactggctaggcacaattagacacattattatctcattgctgtatctggtatcaaacaacaaagcctgaaagattaccatagattttgatggcctcattaacataattaatccgtagtgacattccctggataataaatacagttttatgtccgtgtgtcttctgtgtcttccaagttgctacagggctctatttgatctgagaaactgactgctgtttacatccaggtatgcaatgtgacattagaattgaagcagaaaggaagcaaaacaaaacagggttcatgaggaaaataatcttctaagaactaacatggcctggaggtaaaatgcaaatatatccggtaataagaagcccagattactgcagataaaagattaaaataggattcaattattcatctccatttgcaaatctacaaactaggaggaaggactaacccttttcctgggattagtaactaaatttaatgattacagcaaatataaagttctttggtaaattatggttggttaatgattgacttgcattgacaacacactttagctctcgcccctttcattctccgcctgcaagaacaaaggcaaaatgaacagtgaggaaaacctggaaacaggaccgagtgtttgctatcacttgattcctttgaaggagcatgcttctcataatataggtcatagtatcatcaagtacatcagttaagcaaatcagtgcttggggtccggtatattactt

SEQ ID NO: 3738 - DNA, 766 bp, Homo sapiens
ttttttttttttttttttttttccatcattgaaaatgtttattaatttttatgtaattcttctaatcctaaaagactgaaaacatgctctttatagtttgcgggaatttttaatgccctaaacagaaactccaacagcctcatggctgctttaaagcagagcctgaatacagggggaacacaggtttgcctgagggttaagaagcatccaagagtaagggaagactgggtaagcaaagcaaaataaaggggcaaacaaaacaaaccacacagcacaagacaccctagcaaaggcttcccacagtgcccccacacgggtaggcacccaggccttttgttcttataaaatatgtttttattggtctttgcagtctcacgtcacaaaataacaaaatgaacacaaggcagatagagctggttggggagcacagacatgtggtggccttgaaagcagcttttccccttaagtctctagaacctgccatgagtaattaagacagtctttgaggatggggctgtcaggtgggggcgtctcagcaggtgccgacgagcgccttacaaacgactggctgaacacctttcctcccaggcctctctgcccagcatcactcaatctgctcagtcctcgactgctgcaggggaatgcgtgctcagagagagatgacacttctgagggtggccccagctctgggtgcagaggaaccggggtggggtattcaggccacacttcctgtggccacagggaaggccagggaaaatgggcggat

SEQ ID NO: 3739 - DNA, 766 bp, Homo sapiens; identical to SEQ ID NO: 3738

SEQ ID NO: 3740 - DNA, 737 bp, Homo sapiens
ggagtacatctacgtattagtcatcgctattaccatggtgatcggtttttgcagtacatcaatgggcgtggatagcggtttgactcacggggatttccaaagtctccacccccattggacgtcaatgggagtttgttttggcaccaaatcaacgggactttccaaatgtcgtaacaactccgccccattgacgcaaatgggcggtaggcgtgtacggtgggaggtctatataagcagagctcgtttagtgaaccgtcagatcgcctggagacgccatccacgctgttttgacctccatagaagacaccgggaccgatccagcctccggactctagcctaggccgcgggacggataacaatttcacacaggaaacagctatgaccattaggcctatttaggtgacactatagaacaagtttgtacaaaaaagcaggctggtaccggtccggaattcccgggatctgcttctcccaggagaacatcatctgggccaacctgcgttaccgctgcaatgacaccatcccagaggactatgagacccatcagctgcggcaagcctagggaccagggtgaggacccgccggatgacagccaccctcaccgcggctggatgggggctctgcacccagccccaaggggtggccgtcctgagggggaagtgagaagggctcagagaggacaaaataaagtgtgtgtgcagggaaaaaaaaaaaaaaaaaaaaaaaaaaaaaaaaaa

SEQ ID NO: 3741 - DNA, 129 bp, Homo sapiens
aaactctacagaatgtacgcaccaggctggaaattctagagaagggtcttgccagttctctgcagaatgatcttcaggaggtgcccaagttatatccagaatttccacctaaagacatgtgtgaacaaa

SEQ ID NO: 3742 - DNA, 702 bp, Homo sapiens
ttttttttttttttgtttgtttgtttgttttttgagagagtctcactctgtcatccaggctggagtgcagtggtgtgatctcggctcactgcaacctccatctcctgggttcaagcaattctcctgcctcagcctcctgagtagttgggactacagaggaggctgaggtgggaggatcacttcagctcaggaggcagaggttgcagcaagccaagattgtgccactgcacttcagcctgggtgacagagtaaaatctcatctcaaaaattatacacacacacacacacacacacgtacatgtaaacagtaataattacatataaataacaatagttaattaatataatatatatgtgtataatgcatatgtatgtccctggaggaagagtgactaaaatgttaaaaataattatagttatttcttgatagtgggagggtagtgatttttctttttttaaaaaaaaaaaaacttttaggttcaggggtacatgtgaaggctttttacaccagtaaactcatgtcacagggatctgtgtacagaatacttcatcaccgaggaattaagcccagtacccaagacttatcttttctgcacctctccctcctcccactctccactctcaagtagactacaggtctgtgttccttctggtgtcataagttcgcagataagtccatagaagtgattaagtggctttgag

SEQ ID NO: 3743 - DNA, 726 bp, Homo sapiens
tttttttttttttttttttttttttttttttttttttaaataaatacaacatctttatttggcataggatatcctgacatttgttcattacagttccttaaaaaacaaaccaaaaaatcagaacaaattaatcaaaaataaagatccaatggctctattatacatatagcaaagacagcccaggcatcttccatgcacacacacaccccgccccgatacagttaaggggttaataagcttgggggagcgcaggaggcaggttccacagttcatcaatcccaagacacccccatgaggtaggggtgcctcacacagccagacggatatcaagagtatgattggtagctttttcctctcctagacatctccaaagaataagcctacatctggcaactgacagtgtcttaaatacaatgagattcagccacttcaaggacctccatttttcccacaccctggatcattaatgatatgattacaccacaaatcccaagtccactaaaaaaaacaaatggcccctaccacaaccttctgccagaagggctgatgcaaaaatctaagctcttgtccctttactccctggggactcacaagaagcccatcttcaaggtatcaaggaagctggcccaaggccacacaaaagacggaactagtaccatgatccagagcggtggtaacgggacggagagaaggctcacactatgggcaagtgaaaccccacaggta

SEQ ID NO: 3744 - DNA, 631 bp, Homo sapiens
tttttttttttttttatatacatatgttcatagcagctttattcataacagcaaaaaaactgaaaacaactcaaatgtccatcaactggtaaatgaattaacaaactgtggtataactatacaatgcaaatactactgaatagaagataaaacaggaactacctactaatacatgtaacaatatcagtatctcaaaagtattacattaagtgaaagaagctggacacaaaagactggttatttgaaattctagaaaaggcaaaacgaaaagtgacaaaacgcagatcaatgggtttcgaggggatagaagtgggggtgagggattgactacaaaggggtaaaagggaaatttctaggtgatacaaatgttctatatcagctgggtgtggtggttcacgcctgtaatcccagcactttgggaggccgaggcaggtggatcatgaggtcaggagttcgagaccagcctggacaacatggtgaaaccccatctctactaaaaatacaaaagttagccgggcatggcggcgcatgcctgtaatcccagctactcaggaggctgaggcagagaatgcttgaacacgggcaagacgaaggttgcagtgagccgagatgcgccattgaattccagcac

SEQ ID NO: 3745 - DNA, 714 bp, Homo sapiens
agtttggtttattggtagtgtcgtctcagcagcgtgccacatggccaccatctgcgggctgcctgctgccctcccaattgtccttggccctctccctgcccagggagcctgcagggaccctcggtgccaggctcggctgctgagccagcttgggtgtgaagcctgggctggcagctgaatgatggagagagggtcaagaaggtgagagacccccaccatggagacccagcagagccttctcaaatgctggtaagccaaatgtcacaaggtgacaagtccaaggagtgagaccaggcccatgagtgcagcacaccctgctcttccagagatgccacaaagccccttcagggagagaggggcccaggagggcagaatgcctgagaaggtcactgagccaggcagaggtgagcacagggcggggccgggcgtgctctttctccatgggcgggtggaggaaagacagtccgggtggtctgctcaggaagcactgcctggggctgggaggggagagagtctctggctgcagttgtcccaccactcagagaaaagaagtggctgaagctggtcctgactagtgggaggcctgggagcagacacggtggcatttccatgggaaaacacaggtgtgcaggccgtgtggagctggggatgtaggagtggacagtgcccggtgtccacgggtgcagcgggacccgcatctgggaaggaaaccac

SEQ ID NO: 3746 - DNA, 754 bp, Homo sapiens
ttttttttttttttttttttttttccgtctccccaaagctttatctgtcttgactttttaaaaaagtttgggggcagattcatgaatggctaaaagacatgcatttttaaaactagcaactcttatttctttcctttaaaaatacatagcattaaatcccaaatcctatttaaagacctgacagcttgagaaggtcactactgcatttataggaccttctggtggttctgctgttacgtttgaagtctgacaatccttgagaatctttgcatgcagaggaggtaagaggtattggattttcacagaggaagaacacagcgcagaatgaagggccaggcttactgagctgtccagtggagggctcatgggtgggacatggaaaagaaggcagcctaggccctggggagcccagtccactgagcaagcaagggactgagtgagccttttgcaggaaaaggctaagaaaacaggaaaaccattctaaaacacaacaagaaactgtccaaatgctttgggaactgtgtttattgcctataatgggtccccaaaaatgggtaacctagacttcagagagaatgagcagagagcaaaggagaaatctggctgtccttccattttcatcctgttatctcagggtgagctaggtagaaggggagacattagcacaaaccactgaaacaacaaaacaattactaatgaggtacgctgaggcctggggagtctctgaatccactatttaatccgttagtgagaa

SEQ ID NO: 3747 - DNA, 492 bp, Homo sapiens
ttttttttttttttttttttttttactttttaattttttttatttttccatctaaaatggcaaagagaacatttacttttgatcacttaacaaggacacacccaggaaatttgattttctcaacattaggaggatgaggggagtacagatggaaaaacaaaagataaaacacaaaaggagtacataaaacattgtttagtacaaataatgaaaaatgacttcatgacattttccaataaaagttatttttacagattttgcaatgctgtaaaaaccaggtatattgaaaggggttatttataggttaaaaataaagccattgatgagtgataatcagttttaacagagttcacgcaattatcttagctggaaagctactgtcccaagcgacaaaatttatgtcctgacacatgattacatattaaatcattggccgcccttttttttttatattttttttgtttattatatttttttttgttttttattttt

SEQ ID NO: 3748 - DNA, 738 bp, Homo sapiens
tttttttttttttttttgcagttatgctttccttttgagacagggtctcactttggttgctcaggctagagtgcagtcgcgcaatcttagctcactgcagccttgactttctgggctcaggtgattctccccacctcagcctcccaggtagctgggattagaggcacacgcaaccatgcccagctaattttttgtatttttaggacagacggggtttcactatattccccaggctggtatcaaaactcctggactcaagccatccacttgccttggcctcccagagtgctgggattacaggcgtgtgccacggcgcccggcctagagtagttatgctttctgacttttccatgtgaacgtgaaataggaataattaaaaacaaaaaaaacttaaaaaatctcatacatgtttgtaacgaattcctcttggctgcaatcttctcttttcacttctttgttttattgattatatatgaagttaagtaaatagaggtcataaaagtttcttaaaaagacaaaaaggttacatgaatttactgacgtaatttgtcataataaattgaaatgttttctagaaagtatatgtaagacaatgacgacctaatcataattcattaacctatgattcaataggaaatagacgttaacaatttactgtaataaaaacggtagctcgttgtgctatgtttagtggtgctacttcagtgcagaaatattccatataactttgagaaaccc

SEQ ID NO: 3749 - DNA, 666 bp, Homo sapiens
ttttttttttttttttggttttttttattttaatcgttttttaatggttaattcaactgagtacattcacaaggttgtgcaaccatcaccctgtccattttcagagcatttccatcatcttacacagaaactacacccattaaacagcaactaccaccatccccagcgtgctcagccaccgatgatggtcatgagttttgatatgattggcttgtcagtccaccatttacattattaacctttaaaaaaaattccattattttttaaagagatttaaataagtatgaaaaaatgtatgtatttatccacacagttgccatttctagagctcttcatttctgtggcgtgatccttgtcttcattttccttctgtctgaaggaaaccactcaacatctctcgtagtgtgtatccggtaatgacttcttgtcacattctgtatgtctgcaagtatttttttccttcactttcgaaaagctgtttctgctgcataaaggtttctaggtcggcagtttttttcctttccagacttggcttcattgccgtctcctgtgtttctgatgagaaagctgatggtgcccctggctttgttcctctgtccatgacaaaccttctccctctggctgctgtaaggtctaccaccggctctgagcaacgtagatgtgtct

SEQ ID NO: 3750 - DNA, 711 bp, Homo sapiens
ttttttttttttttttttttttttttttttttttttttttttttgagacagcgtcccactctatcacccaggctagagtgcggtggtgcaatctaggctcactgcagccttgatctcccgggcccaagcgatcctcccgcctcagcctcccgagcagctgcaaccacaaggcacatcaccacacccagctagtttctgtatttttcggggtagagatggagtttcctcatgttgcccaggctggcctcaagctcctgggctcaagtgatccgcctgctttggcttctcaaagtacatttcatggctgggcgtggtggcccatgcctgtaatcccttgtgggacttgggagacatgagctaccacacccagccatgaaaacttttaacaggcaattacactgcttcaagatggcaatttaactatgaaaaacgaaattgttggtagtttactggatttataaaaatcagtcctcttcttaaaaggcgaattgaaaacacagacttgctttagcttgtcaataactgtgtccctgagagtagtaaagggtacatagaatgacggcagaacacatttatgccaacaactatagatcgatgattctcttaacttagtaaggaatgttcttctttgcctttcttccaggccaatgggtgcgtcatggttgactctgaggccaggcaggaggatcgagatatggtctcaatccaacg

SEQ ID NO: 3751 - DNA, 741 bp, Homo sapiens
tttttttttttttttaatatcaaaatatattttattctggacctctttcagatctgattcaaattacagttgtcaaagcaatacaatgcaaaggggaactgcaacaacaacaacaacaagaaatgtgcctagaaaggataaaagggtcactggggacaaatcattgtgatgtggaactaaaatacgtcgtaagtgtaattaacatggtccaggacagcacagaacatctacatcagtcttccttacacaataatcatgaaaactgaacaacgaagttctttaacatgtacaaaaacctgtcatgggctggtttacacttttacaacagttttaaagttaactggataactaaagaaatgatgcagacattttaatccagtgctataggtaggctcacagaattagacccaaaggattgtaaaaacaaaaatggaaacagtatagctacaatgtcaaagtcaggagagaagaaaatttacttccgtattcaaggattacagagctacaaatgcagtctgtgtgtcccgtcgtaactgagatggatacagtacatcagactagatacaacatgcagaatgtattcctgaacttatccggaaattccaaagaaacacctcatgaaacagcttacaagaaaaaaaaaatatatgccctagtattcaccctgcttcaacactggtaacgtaaaggcagaataaagcaagctatcaatactcagaactatgatatagactcaatctt

SEQ ID NO: 3752 - DNA, 804 bp, Homo sapiens
tttttttttttttttttttttttttttttttttaaggggttatataaatttatttttcatgtaacaattgattcagttagaaaaatttcccattttcaatgttaattccatctctcgtttttggaaaaaaatcactaaaaggacaaaaacccacagaaaaatacaatctgtatctgttctatatttacagataaccagtcattattaaggcgcagattaaaagttaacatttattcaaatcatcaaaatatttggtgcatcatataacaacaactctgtatactgtagtgtcatattcccttcattgcatcaagagaaagtgagagaaagaatttccagtgtttttatttattttatagccaccctacttaatctaatttaagtgggacagttttcccttgggcatatcaaagcactgttcataaatcaacttaatactgcatattcattacatcttcctcctgttgcaaatgcatggtagacagctgggaaaagagctccaagattattatctgggaaggtcttattaaaagcataacaacatttagagtactgagtgttgaacaggacataaatctggtatgttaaccctgtactacatgtttagcatgatgcaattaatacaatcaatacgatggatgatcatcacatgatccacatgaccctttggtacacatatgcccagggatgagtacagggagtgaatcagtcacatccgtaaaccagattaagctagtgtagttaacagggcgtcctgggcagttatatgaaattcagaaggcctatgtgcctcaggatacccac

SEQ ID NO: 3753 - DNA, 763 bp, Homo sapiens
tttttttttttttttttatatttttttttttttttttttcagtggatcctttgttccatattattttaaccaaccaaagtatcttgccacaaagaaccacagtcaaggcacaaaggtaagaggaggagatgtctgggacaaagtcctgattgaggtggtaggaggaactgaaatgccctcagtaaactgcagattcttcatctcagtcatttctgtgaagattacccgaatagcagataatccaaactgggtttagttgggttgggcatgcatcacttttaccttttatgacaacatatgtaccctataagatagtatatttgggcctaacatgaaaatcatttacgttctctgaaacagggaaatggcaaagggtgagggatggcaacaaacaagcaaaagcctggcttaacaccagttccaggccagatgcacacaagccaaatgaagttgcctatctggcccttccctatataccaccctcattccaccactgatccttagggtgagaaagactccataaccttaaaccttactggcttggacaccttggccaggtaagaaggctgacaattgggagtagatactaagtacattctataaggcagggcttggtatacaaatacccttctcatttcctctaatactgactctcctttccaagtcccttgggaacactgtgaaaggataactgtgtattgcaagatactcatccaatgtgcctctggacagaggaacaaggtgatgactattggttaaggag

SEQ ID NO: 3754 - DNA, 763 bp, Homo sapiens; identical to SEQ ID NO: 3753

SEQ ID NO: 3755 - DNA, 734 bp, Homo sapiens
ttttttttttttttttttttttttttttttttaaagggatcaatcaaaacctttaatgctcagttttcacaaacacagtcaagtctatcaaatttccagatttacagcaaaatgtgccctctaaaaaagtgtacattcttcagtttctcctatacttttttttttttgcctatctttcaaaactgagcactgggtatttttaacataagccatgtcatatgtacagtttaactatgtaactatgtttcaggaataaacaaaatccatgatattttagtaactcatagtgtatttatagaatgaaaagttctctatcaaaatacacttttcactgggaaaaataaataaaatagacaaatggatctacacaaagtaaacattaacttgggtagatttcagtgtagttcataacaagcatatttgcccttattcccccagagctgctcaactaccaagaatttttaaaatatttttaactgagattttattatgttgacattggtttctcattccacatcatcttcagccaagctctgagcacttacaattctctgactaattgtggggagcttagtcagaagcatctggaacactggtggtggaagagttgctgtaagacctgcagcaactgctgtggctgtccacacacagcaatgcattgtcagatggtctacgcccttctcatattcaccttgagctagtaattcttcacaagctgtattcttcagagagaa

SEQ ID NO: 3756 - DNA, 528 bp, Homo sapiens
ttttttttttatctaatcttgtcctctcactttatttcattaaatagatcttcattctctgatatcctttcttccacttgatcatttggctatgatacttgtgtatgcttcacgaagttctcgtgctgtgtttttcagctccatgaggtcatttatgttcttctctaaagtggttattctagttagccatttgtctaaccttttttcaatgttcttagcttccttgaattgggttagaacacactcctttagctcagaggggtttgtattacacaccttctgaagccaactctgtcaatatcgtcaaactcattctctgtccagttctgttcccttgctggtgaggagttgtgatcctataggaggagaagaggcattctggatttggaactattcagcctttctgcgctggtttctccctatcttcgtggatttatctaccttaggtcttcagtgttggtgaccttcagatggggtctcatgaatggattcctttaagtaaatgtagatgctacttccatttctgta

SEQ ID NO: 3757 - DNA, 682 bp, Homo sapiens
tttttttttttttttttttttttttggctatcaatatatttattattagcatgacatattatgaaaaattattttccaaagacttagccagtaacactacaaaaatagaaagcccgttaattcctgtgaatttatctgtgtgtgtccatgtccagtaattatttcactgtctgtctgaagtactaacaatactaaatccaatgctcggcgccacgcctcaatcttggtgtaacaacgtcataaactctcggaatctgctccagtttatttgaaatgtctgaattaaaaattctactatttagtttactatattcattcaagatgtaagatgaaggagagccagagtctgtggcatttcgcagatgatgttgaatgtatgtgctggcttcaaattctgatgagtaatggcagcgtatataggagagtcgaaaggtatttctgccatccatttgccaggaatttaagcacagttcggtctgtatatggccagagatgaagccagccaagaggaagtattatgcagccaccctgagcaggcatggtttcttaaacagaaattgctctgcaagaatatgaagacagctaaagacacaaaaattcaatgaacacctccaggaagacttttctcttttagagcatatacaaacgcataggcacatgtcagaaactatcttctgattgc

SEQ ID NO: 3758 - DNA, 754 bp, Homo sapiens
ccccgggaaccgtttgcagacatcaatggcgtgaatacgtttgactcacgggatttcccagtctgccaccgcatgacgtcaatggagtttgtttggcaccaaatcaacgggactttccaaatgtcgtacaactccgccccatgacgcaaatggcggtaggcgtgtacggtgggaggtctatataagcagagcctcgtttagtgaaccgtcagatcgcctggagacgccatccacgctgttttgacctccatagaagacaccgggaccgatccagcctccggactctagcctaggccgcgggacggataacaatttcacacaggaaacagctatgaccattaggcctatttaggtgacactatagaacaagtttgtacaaaaaagcaggctggtaccggtccggaattcccgggatctggcagcgcggaggccgcacgatgcctggagttactgtaaaagacgtgaaccagcaggagttcgtcagagctctggcagccttcctcaaaaagtccgggaagctgaaagtccccgaatgggtggataccgtcaagctggccaagcacaaagagcttgctccctacgatgagaactggttctacacgcgagctgcttccacagcgcggcacctgtacctccggggtggcgctggggttggctccatgaccaagatctatgggggacgtcagagaaacggcgtcatgcccagccacttcagccgaggctccaagagtgtggcccgccgggtcctccaagc

SEQ ID NO: 3759 - DNA, 754 bp, Homo sapiens; identical to SEQ ID NO: 3758

SEQ ID NO: 3760 - DNA, 737 bp, Homo sapiens
aagcggttttgcagtacatcatggcgttgatacggttgactccgggatttccaagtctccaccccagtgacgtcatgcgagttggttttggcaccaaatcatcgggacttttccaaaatgtcgtaacaactccgccccattgacgcaaatgggcggtaggcgtgtacggtgggaggtctatataagcagagctcgtttagtgaaccgtcagatcgcctggagacgccatccacgctgttttgacctccatagaagacaccgggaccgatccagcctccggactctagcctaggccgcgggacggataacaatttcacacaggaaacagctatgaccattaggcctatttaggtgacactatagaacaagtttgtacaaaaaagcaggctggtaccggtccggaattcccgggattgagtgagccaaggggagcacagtaggaggtgagggcacaggtgatggggtgccagattgagtagggccttataagaccacctgttctgttgcatttagcccaaatcagtgctgtaagaaataacacatagtctacagcctggaagtgcctaaggacagagctgacttgctcctggaagcattttctccagcaatgagcatagtgactggcacatagtaggcattcgtgatgacttttaatgaaagaatgaatggaatgaatgaatagccagataaaacaggcattatgcctggcaatataattgaccaaaaaaaaaaaaaaa

SEQ ID NO: 3761 - DNA, 698 bp, Homo sapiens
ttttttttttttttttttttatttttttttttttttttttttttgctttccgcataaatatgcttttattacaagaaagaagagaccacctctgaagtaaggcacaacacaattccattgtcactgtggcagaagtccctggtgctcatccctttgatctcagccaagactgtggtccacgggcctaaggcacttgagcttttccctcaactgaagtgtagggggtgcctgagagctgagcctcgtgggagtgtccatggtctctggacctgcatcgaagttcatgtgtttccactggtgctgaagatgaacatcaagaattactagacatgtaaaagtgtctttaagtgtctttcctcctgagtccacctttggcaatggtccccaaagcctggccccttagagatgcagctccagatcctggccaccctcagggttcaaagagactggcccaggggtacacaatgtgcctggacactacttctctgccgaggtcaagtgcacacgttgcggcgggtgaggtgcagttatactggtgacacacacaggtgttactggtgagctctcagggtgcacagagggcaggtgacaagggcatcagctaatctgtcccacctggctccagcccaatccacgtacaggggcaaccaagggggctgaggcccggaagccacgaagaccctgttgactatcactga

SEQ ID NO: 3762 - DNA, 676 bp, Homo sapiens
tgtcctacttgcagtacatcctacgtattagtcgtcgctatgtacctggtgatcggttttgccagtacatcaatggcgtggatatcggtttgactcacggggatttccaagtctccaccccattgacgtcaatgggagtttgttttggcaccaaaatcaacgggactttccataatgtcgtaacaactccgccccagttgacgcaaatgggcggtaggcgtgtacggtgggaggtctatataagcagagctcgtttagtgaaccgtcagatcgcctggagacgccatccacgctgttttgacctccatagaagacaccgggaccgatccagcctccggactctagcctaggccgcgggacggataacaatttcacacaggaaacagctatgaccattaggcctatttaggtgacactatagaacaagtttgtacaaaaaagcaggctggtaccggtccggaattcccgggatggctttaccatcttggctttagtaggtatagaagacatggattaccatctttattgctgtaatgtgttaagcattatatgctagtagaatctagtttaattgtttcaggtggaaagtattctttgagtttccatattgaatgtgtttggactaaacaaacaataaactactgatgtctgcaaaaaaaaaaaaaaaaaaaaaaaa

SEQ ID NO: 3763 - DNA, 241 bp, Homo sapiens
tttttttttttttttttttttttttttttttttttacacattttaatcaatttaatacaaatacctgatttatacttttacaccaacgggctaagtcccaagttccaaactgtagttcgcatgatctctacagaggggatctttggaaggataaggtacctttggagaacagtgtataaacaattgtaaacactacactgattgtccactagcttatcttaaatagaatttctgaaatgtt

SEQ ID NO: 3764 - DNA, 102 bp, Homo sapiens
tttttttttttttttttttttttttggaagcactggaatacagctttattcctacacgattagacccgttaccccgtgggtctggccgaccgtcctgactcg

SEQ ID NO: 3765 - DNA, 759 bp, Homo sapiens
tttttttttttttataaataatttcatttttaattctctgtacaaaacttctcaatctatgaaaataaagtttgcaaaaggcaaagtagcacaggagcctcaggtcaggaggctaagcacgctgacctacactatgtacacgtctctctcccacgacggagagagaggcctctggggcagagccctgcttgcagtccgggaaagccaagttggcttccgtcagcacagggaaatgtacccctctcttccctggccgccctttttttttttttttcaatgtcaaatatattatatgggatacaaatgtaggtttcccaattcagtgacagcagctcccactataagttcttgcctagtgagagagtgaccccagaactcttcaaggttggtagggctctcctcacacatttatttctcacagatatggaaaaaagtgttccaggggtggatgcgcagatctgaaatgacaaattcacgccaactcttctttctccataagcttgtcaatcccttcctctagagtaaccagggtagttctggcatttcaaagttcgtttactgtgggtaacattttgggtccatgtttcagccatccaagcaaacaaaatgagcttcttctgactccccaaacttgtctttcaggatgtgctctgtggtcctcgatctccctttggtagaaagctttccatagctttcttggggacttattcttcaccctctctgatggtgtggtcctgcatccctggtgctccggaccac

SEQ ID NO: 3766 - DNA, 738 bp, Homo sapiens
ttttttttttttttgtatttatatgacttttattttaatatcattttaatatcgaatatgtcacaagatttaatgaccaaattagtcatttacatttttcaaagtatctaaatataaaattgctaaaaattcaaatacagatagcaagctacaaatatttcttttgtttttgggtggggggtaggaatggaagacattagaaaaggacgctcctgttggctgaacaaagatcagaatgaaagaagaattcatcagcatgaccccttgtgcaaagaaatacactcagctttaagatgctgttttagacacatctcttcctgtacaacaatttaaaaaatgtttctaatgcaggtcctcagtgaaacaccggtccccggccctggctggggacagtaaggacatcaccgcaggagggacactgaagaggctgtcgaggactgcagaggcatctggtgtggccagaggcgtggtgtcaggggcatctgatcccttgcctgttcccacccagggagccggacggcacggacacaggtctccctccgctcacccctctccctgaaacgtgagaaacagcaagttatccgctgcttgaaaaaggaggcaggcgctgtaaggagaagaggaatggggaatggtgggccccttccaaggcagccgaaagcagagaacatgcaggtggaaccgccagctgaaacctacaaatgacaacttaagaaacgggaagaccatgtctgggcg

SEQ ID NO: 3767 - DNA, 701 bp, Homo sapiens
tgctggtggggctcacggcgcctgccttggcgctggccggctacatcgaggctcttgcagccaatgccggaacaggatttgctgttgctgagcctcaaatcgcaatgttttgtgggaagttaaatatgcatgtgaacattcagactgggaaatgggaacctgatccaacaggcaccaagagctgctttgaaacaaaagaagaagttcttcagtactgtcaggagatgtatccagagctacagatcacaaatgtgatggaggcaaaccagcgggttagtattgacaactggtgccggagggacaaaaagcaatgcaagagtcgctttgttacacctttcaagtgtctcgtgggtgaatttgtaagtgatgtcctgctagttccagaaaagtgccagtttttccacaaagagcggatggaggtgtgtgagaatcaccagcactggcacacggtagtcaaagaggcatgtctgactcagggaatgaccttatatagctacggcatgctgctcccatgtggggtagaccagttccatggcactgaatatgtgtgctgccctcagacaaagattattggatctgtgtcagaaaaaaacaacaaaagggcggccgcgaggcggcgctcgcgatcccgggaatccggaccggtacaagcctgctttttgtacaacttgttctatagtgtaccctagataggctaatgg

SEQ ID NO: 3768 - DNA, 643 bp, Homo sapiens
ttttttttttttttttgttttaaaaaaggtttatttgttacaaaaagttaaatactaaagctaaaaacatataaattcaggtcaggctatattaaaatacacacatacccttctttgcaaaattattaaaggttgaattaaacagatgctttaaataaaataaagtactctttgaggacatttttgtcagattaactataacagtgtagtgtagtttttaaaattgcagttgaaaagtttagctgtcttggaagtcaaatttatccaattgttcagacttctgttactacttaatatgaagccaccatgctggcttggacagaattaatttcattcatgttatggagaattctatattacaaatctggtcccctataatatgaacagtgagcagtcagaaatatacaaagggttaaatagggtaaagactttggccaagaaaggaaaggccttagttctaccatagagtatcttctctaattaaaatgactgggaaatatatggaagcagaaaccagcacaaagcactacccatctagaaataatctttcagttaaaaaacaactctcaaaaccagcactcatttctctaagataggttataagtattttacgatttcttgttatattaaatggagttaaacg

SEQ ID NO: 3769 - DNA, 93 bp, Homo sapiens
cgcctaaagcaccgggaggagtgagatgtggatgttgcttttgcacctacgggggcatctgagtccagctccccccacagatgagctgcagcc

SEQ ID NO: 3770 - DNA, 780 bp, Homo sapiens
tttttttttttttttttttaaaaaggatgaactggtatccctgagtccacattttcacatagcatgggctttgggatttaatgtcaccaccagcaatccctgcacactcatttcctagaaggggaaactgaggcccagagagccacatgacacacttacagtttcataattagttggttgcaaaacaaggacaagaactcaagtctggtgtttctccctgctcaatattttcctattatttgggcgtatgttatctcggggactcaactgcatttgccaagaaaatccatgagaagtcccagtggccaccagaactttcgtctaagtgacagaagaacgagggtgggaggggtgattcactttaattccctacaggctccctctattctgcagacttccaaatataagacaaagcagacctgccctgaaatctggctctgccagcccagaaacaatgcacaaactattgtggctcaccacaccaacaacaacaacaaaaacagcataatcactcatgggaacttctaccaagggtgttcagcccttacgatcagaaatacaaagaagccaagctgctgctccatgtttcacaggaaactcgtgagagattcatgaagcaggtctagtccggggcagatacagacgtgggaggcaggtagtaataacaacgttcacttgataaaatacaactttctctgaaaagacggatgtgctgtgtcttacaacggtacctagagtgtacatcactttggattccctgggaaaatcggccaactcaat

SEQ ID NO: 3771 - DNA, 675 bp, Homo sapiens
cctatttttgccagatcttcaagtctgggcacagtgtaacaccagcactttgagaggccaaggcaggaggatcacttgagctcaggagttcgaaaccagcctggataacttagtgagaccctgtctctactaaaattaaaaattttttgcactccagcctgggcagagagtgagatcctgtctcaattataaacaacaaacactgagaaagcccaatcctatatgtttatgggcctgtggcctgaatgatagtatttaactatcaatgtagtgtatgtatcttcaactggtgtccaaagacatgttcttgggagtctgaattctcaagtttgaataacaatggtaggcttccagttaaagacggtagattggtagattgggctgcgcgtagtggctcatgcttgtaatcccagcactttgggaggctgaggcgggtggatcacttgagaacaagagtttgagaccagcctggccaacatggtgaaaccctgtctctactaaaaatacaaaatcagccaggtgtggtggcgcatgcctgtaatcccagctacttgggaggctgaagcacaattgcctgaaccagggaggcagaaattgcagtgagccaagatcgtgccattgcactccagcctgggcaacaagagtgaaacttcgtctcagaaaaaaaaaaaaaaa

SEQ ID NO: 3772 - DNA, 717 bp, Homo sapiens
  misc_feature (717)..(717): n is a, c, g, or t
tttttttttttttttttgtgggaacaaaacaataaacacctttattacatgggtgaagacaaaacaaggatttatttgcctttgcgggccttgattttcctaagatagaactccaactctttgccctctagcacatagccatctgctcggccacactgtcccggccttgaagcgatgcacgcaagaagcttgccctgctggaactgctcctccaggagactgctgattttggcattctttttcctttcatcatatttcttctgaatttttttagatcgttttttgtttaaaatctcttcttcctcaggagtcagcttggctcccttcttgcggcccaggggcagcgcatagtgggactcgtaccactgtcggtacggtgtgctgtcgatgagcacgatgcaattcttcaccagggtcttggtacgaaccagctcgttattagatgcattgtagacaacatcgatgatccttgttttacgagtacaacactctgagccccaggagaaattccccacgtccaacctcagggcacggtatttcttgttacctccccgcacacggactgtgtggatgcggcgggggccaatcttggtgttggcagctgggcgccccaactcatacttccgcttcttgtggtagggctttctcttgcccccggttttgcggcgcttgtgccagtgtcccgagagatgcccatcgccggagcggcgccttttn

SEQ ID NO: 3773 - DNA, 717 bp, Homo sapiens; identical to SEQ ID NO: 3772
  misc_feature (717)..(717): n is a, c, g, or t

SEQ ID NO: 3774 - DNA, 457 bp, Homo sapiens
catcatgggtaaatgtcttagtgtctagtggatcaggccacaggagagagtgccttgtggagcgctgggagcaggacctgaccaccaccaggaccccagaactgtggagtcagtggcagcatgcagcgcccccttgggaaagctttaggcaccagcctgcaacccattcgagcagccacgtaggctgcacccagcaaagccacaggcacggggctacctgaggccttgggggcccaatccctgctccagtgtgtccgtgaggcagcacacgaagtcaaaagagattattctcttcccacagataccttttctctcccatgaccctttaacagcatctgcttcattcccctcaccttcccaggctgatctgaggtaaactttgaagtaaaataaaagctgtgtttgagaaaaaaaaaaaaaaaaaaaaaaaaaaaaaagggcggcccaaaaaaaaaaa

SEQ ID NO: 3775 - DNA, 641 bp, Homo sapiens
tttttttttttttttttttttttttttttgagatgaagtcttgctctgccacccaggctggagtacaatggcacaatatcggctcactgcaacctccacctccggggttcgagcagttctcctgcctcagcctcccgagtagctgggactacaggcatgtgccaccacacctggctaatttatttcgtattttagtagagatggggtctcactctgttgcccaggctggtcttgatctcctgagctcaggcaatctgcctgccttggcctcccaaattgttgggattacaggcgttgagccactgtgcccagcctcagattcttacaaggtgtgaatgtgcgtattctgtctaaattcaaggattgctgcaaatgaagtgtatttcccaaaaggccacagggcttcattagcagaccttagtttgcaagatgggaaagatcttcaggtagatgtttgagtctgagcgccagagggtaggtgtaactgaaggaatggggcatggagaagatagactggaatcttatctccccatcctgttccccaccatgaaaacaaatgcctgagctctcttgggaagagttactacatgcttgctgagagggctcttttcttcggaaaactctgttgagacacagggacc

SEQ ID NO: 3776 - DNA, 730 bp, Homo sapiens
ttttttttttttttttttttttttctcaaaaagcttttatcttttttaccttttcccattgcctattacaaaactcttttaatgttccatattaaaataaatattaatggatttgggttccatttaaatattataacatacactgtcctgtcttcccacccagattcatctctgaaaccacgacaagtgcgtggagcagctatttgagcaccaggaaaggaaattgtacgcagtggtttgggatggccccagcagatgaaatacaacagtcagtgtgagactcctattttttctcggtgtcccctggcaggattccagacagccccaaatctgaaggggcacaaacttgaaaacaaaaagaagtccagaaatacctcttgttcaggattgaggataggaaaggaaacttcttcggctcaaagtgaaggctcagtcccctactccacacccctgttctcatctctcttgcaccagtgcctctccctgggttcacactgatatcctatggatggagatgatatttcctgcaccaggtcactccacagcccctgttaacctgaagaggtgcagaccagcactgttcaatcacagtatgatgagcctaatgggaatcccactgtctagtcaccacattagacatataaagagaagaagtaaatgacttcaaataatatattttattgactagcatatcaaaatagtgcctttcatatgttatcctagtataatg

SEQ ID NO: 3777 - DNA, 99 bp, Homo sapiens
ttttttttttttttttattttttgaaaatctgggattgagaggttgatgaatgaaaattaatcctttcacttggttgtgtataggtttgcaataattag

SEQ ID NO: 3778 - DNA, 701 bp, Homo sapiens
tttttttttttttttttttttttcagttcaaactcatttcccttttattaaagtccaagttaccattacatggcttggtactcaataaaggaaaacttgttcaaataaggtaatatgttatcatcagtatttccaggtaactgttcacactcaagtagcaatgtcaataaatccttggggaagcccatccatgcggtttacactttgtcaaggcccagttcctccggagtggagattcccagttcatttaaagttggtctaagttcctggatgacataggggtagatttccttatgaggtcctgctttgtccttaacaacctctaggatacgaactgtactagcaaaatcatttaaccgtctgcatgcccgcaaagcagcatcaatgattttgggctctggaaccatatcataggtaacaagtgtgtttatccctttacgcaattcccaggcatctatatctggcttgttgaagtatgttacccagcgagcatcaaactcctcatctgtctcctgtgacccatgggaatagcagcgaactgactggatagccacggcggggccgggggtccgggcggagtgcaggaggcctcgagggtcggcccgggtggttgcggccacagcgcagcggcggagagcggcgcccagcatgacggcgatggcggcgcgcgggctgaggacagagagaagccgtgtaagatc

SEQ ID NO: 3779 - DNA, 701 bp, Homo sapiens; identical to SEQ ID NO: 3778

SEQ ID NO: 3780 - DNA, 769 bp, Homo sapiens
tttttttttttttttaagatagaatctcactttgttgcccaggctagaatgcagaggtgcgatcacagctcatcgcagctgtgacctcctaggctcaagtgatcctcccacctggcctcccaaagtgctggaattaaaggcataagccatcaaacccagcctgaattagtaaaaacaaccaacattatgatcctaaaaagtatctgcatgttgaataatattgtgtcagtcctgtactcacttagcacctccaaagaaaaccaaagaaccaaaagattcctggaaagagtataatggcttattatgatatgttttggttactataataatcattccaataagaatacactccattattactataataatcatccccatgagaatatcctttaggcaggggtaactaaattaaaaacacttttctttcacttcatagaaaattataaaatgataatttaacttctaatagcaagttgtttttaaagcaaaattagatacattctttataccttgcaatacagtctatagatttcaactgagcaaaatgatctttcccaaactaattttcttcttagctataaatgtattttcttaaaataatgacagatgatgattctgtagcaaattactgtaagtagtgcctaacttgacattaactaaactggaaattacataccactaaccggaattctcaaatttcttttgatgtgggaattgcatacattagttataagatgagtatagtggatgctaaaatacttattttcag

SEQ ID NO: 3781 - DNA, 723 bp, Homo sapiens
tttttttttttttttataaatttatattacatatttattaaggcaaggaactatatagaaaaacacatttgttctgcttaaggcatacttgggaataaaccattgtacaaattattgcacatctgaaaccacagtgcataacagactgtctgcataaaaatgctaaagaagtaaaccaggtatattacctgacttaggtcataaatgttgatcggaagacaaatatagattttccttgtcaaagtatgcagcagatttgaaaactttggcttccttgtaggtacctttagaaccaagactcaccaagcaccatcatttaggctatcttaaacatgttattctgtacctgaatttcttcctcttcttctaacatcataataatggcttttagaaggtaacagagaatacaaggtgatcttttatgcttatattgcatcaatacacaattcaagggaattctggtcttccctcccccaactcacggatataatttataccctgatatccacaacttccagtcacccccttggcatttgtaagtccaggaatattcaagtcggatatagaattggaatgatagaagatccagtcacagaccccatctgttcttgaatttggtcttacggatacctcatattcccgtgattatccactcagcaagatgactcagttgggaacttgacatgattgtagtgcttactggctgggctcattccctcatgg

SEQ ID NO: 3782 - DNA, 628 bp, Homo sapiens
tttttttttttttttttttttttttttttttattttttttttttttccaaacgcatgtcttgtatattccaaagggaagcttgaaagtattcataatacataggcttgtctgtttcaggtaaaatgacagattgctataattcttcctgctattatagtcaaacaaaaaatgacccactttcgcaaaagtttagaaatctctcactttcattcctagtttatagtatggaattcacttttttaaataagggctacatctataatgaatacagaacttcaattcacacaacatttctaacattccattcacatcccacccagtcaatgactgaacatttatggttaactcagcaaagtttcttcacagaaagatattcattaaatggctgaagaaattgcaaactttaacaaagtgctgtgagtaattactggaaaaacccttacactgattggcaagggtctttaaacggataaaaataggaagtaactgatactggactacaagtttgcaaggaaccatttccactgctcctacttgactatatacatctaataatatgatagaataaataacagaacctggcaggctgacatcagttcttccatctaaaaaacaccatatcataca

SEQ ID NO: 3783 - DNA, 659 bp, Homo sapiens
aagcaggcttgcaggatgcaaggttaatatgcaaaagtcaattgccttcctatatatcagcaataagaaagtggaatttgaaatttaaaacacagtacaatttacattagcatcccacaaaatgaaatacttagatataaatatgtacaacataggtacaagatttatttgaggaaaactacacaactttattgaaataaatcaaaaaggaactaaataaatgaaaggatattcaatgttcatggataggaagacaatatagttaagatgtcagttcttgccaaattgatctatagtttcaatgcaatcccaatcaaaatcctaccaagctattttgtaaacatcaacaaactgattcttgggaggccaaggtgggaggatcacttgaggccaggagtttgagaccagcctaggcaatgtagggagaccttgtctctacaaaatattttttaaaaaacaaaaatttgccacgcatgatggcacacacctgtagtcctagttactcagaaggttgaggtgggaggactgcttgagcctagaagttaaaggttacagtgacctatgatgaagccactgcactccagcctgggtgacaagagcgagactctgtctcaaaaaaaaaaaaaaaaaaaaaaaaaaaaaaaaaaaaaaaaaaaaaa

SEQ ID NO: 3784 - DNA, 807 bp, Homo sapiens
  misc_feature (807)..(807): n is a, c, g, or t
gggtggggcaggctggaaggaagacgaacctacgaagcagagatctgaagacagcatgtacacagccattccccagagtggctctccattcccaggctcagtgcaggatccaggcctgcatgtgtggcgggtggagaagctgaagccggtgcctgtggcgcaagagaaccagggcatcttcttctcgggggactcctacctatgtgctgcacaatggcccacaaagaggtttcccatctgcacctgtggtatagtgccgagcagtcatccccgcgcggatgatcagggggcctgctgcctgtgctggcttgtgtcgatcgctcaatcacaacatgactggcgtaggagacgaggcgtgtcgtggatgaaccgaccagcgtagcgtggcaaagggcaatcgtagatccttgcatcctctgacacttacgtctacttccgcgcggtggcctcccggtaccagtagatggtggtgtgagacgatctagcaatttcacatacgacctccacaggagccccagtctgccatcaacgtaaactctagccagggtgaaggggaagaagaacatccgtgccaccgagcgggcactgaactgggacagcttcaacactggggactgcttcatcctggacctgggccagaacatcttcgcctggtgtggtggaaagtccaacatcctggaacgcaacaaggcgagggacctggccctggccatccgggacagtgagcgacaagggcaagccaggtggagattgtccctgatgtggaggagcctgctgagatgatccaggtctgggccaagctgctcn

SEQ ID NO: 3785 - DNA, 747 bp, Homo sapiens
ttttttttttttttttgagacacaatctcgctgtattgcccaggctggagtgcagtggcgtgatctcggcacactgtaacctctgcctgtcaggctgaagcaattctcctgccttagcctcctgagtagctgggactacaggcacgtgccaccacacctggctagtttttgtatttttagtacacacggggtttcaccatgttggccaggctggtctcgaactcctggactcatgatctgcccacctcggcctcccaaagtgctgggattgcaggtgtgagctgccacgcctggccagttagctgcttttaaagtcatgcatgcagctaaaaagcgttccagcctcttggagcctcctccttcccacagtcccactcctcagagggactcccctgccaacagttgggtatgtgtctacctgcctctttgatttttttcttttcatgattttacatgctagtctggctttttgcttctgcagatgttctgtgtctgctctggagagctctcccttggagtgtggttcggggattgtggggtgtggctttgtgagacgtagccgtgttttgcatctggctggtgtggctcagtctgactccacaagcctctgcagtgctgcttctgggggagcgggagatgtacatcggggtcctaaggacattggactaggagtgacctggccatgttgaggtctcaggttctctgaagttggattgggtgaactctacaattctccaaaaggctccc

SEQ ID NO: 3786 - DNA, 742 bp, Homo sapiens
tcgtatagtatcgctattaccatgtgatgcgttttgaccagtacatcaatgggcgtggatagcggtttgactcacggggatttccaagtctccaccccatgacgtcaatgggagtttgttttggcaccaaaatcaacgggactttccaaaatgtcgtaacaactccgccccattgacgcaaatgggcggtaggcgtgtacggtgggaggtctatataagcagagctcgtttagtgaaccgtcagatcgcctggagacgccatccacgctgttttgacctccatagaagacaccgggaccgatccagcctccggactctagcctaggccgcgggacggataacaatttcacacaggaaacagctatgaccattaggcctatttaggtgacactatagaacaagtttgtacaaaaaagcaggctggtaccggtccggaattcccgggattgttggttttcggaactgaggccatgattaagagggacggccgggggcattcgtattgcgccgctagaggtgaaattcttggaccggcgcaagacggaccagagcgaaagcatttgccaagaatgttttcattaatcaagaacgaaagtcggaggttcgaagacgatcagataccgtcgtagttccgaccataaacgatgccgaccggcgatgcggcggcgttattcccatgacccgccgggcagcttccgggaaaccaaagtctttgggttccggggggagtatggttgcaaag

SEQ ID NO: 3787 - DNA, 754 bp, Homo sapiens
tttttttttttgctgggttttaaatttttgtttcaagagaatttgaatgattgttgaagcattttatgatgctattttaatatcattgttagataatttgaacacttgatttatctcatcatttgacagccgttgattgcttttctcatccgtgttgtgatttttctggttcttggatgaatgattttttattgtatcctggatattttggatagcatattataagagtttggatttgtatcctatttaataattcttcttcttcttcttccttcttccttcttcttcacaggcatgtttagtttccctctgggccccactgacagtaacttggcaaaactgaagtactgactcacatggtcttattgcaaatggtgggctggaagttcagctctcctattgctccactgacaacatcccagtgaaagtgtggcaccatcttcgaccaccttgatgcctctgattggggatgtaagcttgtctccttgctcaatctgctgggggaactggagcattgtctgcttctataaggtagggaataaaaggtcagctcccagacagacctaccaaagtcacccacagggaactggagagctgcctcccacttccataggttaaggggtagagtggaatatcaacttcctggttggctctgctgaaactgtgctgggggttgaggtttgcggaatgcagttgttcatcagtgtttggttggactaggaagaagctgatgaggtttcattgtgggcccctt

SEQ ID NO: 3788 - DNA, 567 bp, Homo sapiens
tggcacctgagtggatgttaccaactcctggtatatcctgataaccaatgaatatcggagatagtcctgtctccatccagtcaagctctggagctgtggcaggtccaagttggaggcctgctgtgggctggaagctacctggctgttcatccttttccagcttccagggactaaagtgcccggacactggctgagggggtctggatcctccgagggaaaccaacctctaggacagactgaaccacctcctgccagctctgtaccacctcacagatctgagctgccatctccttggtccacctcaatcctctataacttcataggaacccaagtattccaccagggatttgccgaatcgtgcataatcctgggagaggggattatgtgctcatttacatgttgccccacgaggttctactgcgaagagtcatcaaagatgtcatcaacatgggcacctataacttccttggtcttgcagccaagtatgaatgagtctatgaggacaataaacggatgttcagaaggtgtcatggcacaaggctgtggccaagcaaccaggcatgacac

SEQ ID NO: 3789 - DNA, 787 bp, Homo sapiens
  misc_feature (674)..(674): n is a, c, g, or t
ttttttttttttttttaaaaaggagtttccctgcacaagctttttctctttgcctactgctatccatgtaagatgtgacatgctgctccttgccttctgccatgattgtgaggcctccccaggcatatggactctgtaagtccattaaacctcgttgtggccttctggtaaagttgcctagtcttcgggtatgtcttgtagtgtagcaggagctgaaaatgaagctaattcagccatgcctacttcctcctgtcgatcgtggtgaaggctgagtgtagaagtttgagagagagcaggagtcatgctcccaggcccaagtcttctttgctgcagactgaacatcctgtgtcctctgctctgatcattttcctctttgtccagatcctcctgaaattgcatccaggagggaacacgcatggtggcctaggatggaagtggtgttactatattttataatgcagccctacagccagacagtgacctagcctagcataggtaaaaatgcagatcacattactgattacaaatggaaccgagtttggggtacctatgaaaaataccagaaagaaacctctatcacctcccaccagtctgatactttgtcattctccttgtctctaaaaaagacatttttataactgaattaataggaaagtcagtgagcaatctcctangggacttttgggcccatgtactggaggttcctacctgggattccgctccatatgaacaagatcctttggttataaatgtcttagatttagggcctccaattcccatcccaagt

SEQ ID NO: 3790 - DNA, 740 bp, Homo sapiens
tttttttttttttttttaatatttgggtcttccccaaccctctgtcgataatcaatcaacaagaccttcattttcccatggggaagaataattcaataggatggaaacagaagccaggaggattctattaggttagtccatccatttaaaaacatgaggagctgaaaataagtgtaactgattgcatattgtcctgtattccccagccttgttggtaatcagttatcctctggcaaatgtgccctacatttctagaagctaatttttctctgttcctcatttctaaagtcacatttcattgtgtttctgattggaatttcttagaatgcttatatttaacttttcttgcatgttcactgtgttccaggccttattttacgacttttataaatagctattaatttaattctcacaagtctataaagttggaggtatacaccaatagtattatatcagagattttatagatcaagacattgagatatggagtgttaaataaattaccccaggccaaaatctagtattgtaaaatcaaagtttgagccccagaagtctggttccagcattttattcttaatcactactatatattgtacctacactaaaaataatcataatctatttgtacttcatctgtgttttataattggtcctttcccagggccaccactgctacatatcatgtccagtgttcccattagctccagtccttatctcttcataccctttttactcctgac

SEQ ID NO: 3791 - DNA, 674 bp, Homo sapiens
ttttcagtcctgcgacatctcaccctcacctgtgtgttgccctttatcactgtcagtcattctcatagggtgacaatggcattctcagctgcacagcctgtggactatgatgtaagcaaagccctggaatcctgtaatgtagaaactgcagcaccaaggccacaggatacatgacaggccagcctttggctactcagtgagcacaaacaaatacatgcaatcaatagtcctggaaaatctgatgagccacttgatgcctgccttctagcacgccaaataaattccaggtgcatttaatcagacctgcatttaatctcagttaagcacaacagggtgactaaagtcaaccataatttattgtatattcaaaaataatgggctgggcgtggtggctcacgcctgcaatcctagcactttgggaggccgaggcgggtggatcacgaggtcaggagatcaagggcatcctggctaatacagtgaaaccccgtctctactaaaaatacaaaaaattagccgggcatggtggcaggagcctgtagtcccagctactcgggagactgaggcaggagaatggcgtgaacccgggaggtggagcttgcagtgagcccagatcgcgccattgcactccagcctgggcgacagagagagactccgtctcaaaaaaaaaaaaaaaa

SEQ ID NO: 3792 - DNA, 679 bp, Homo sapiens
ttttttttttaagattatatgaagtctgtgcaaaagctttaaaaaaatgcctctgccttgcctgcaatacatgcaatgtatgttaacttagtctctcttctcagacactgttggtagttatttctgtgttttcctttttttaaaaaaaaatatggacttattgtggttatctgagaggttctaacattcacatgcaatttggtgtggccatttagctattaatgagttaatggcgcagaacttgttgatatttgaagtgttctctccccttttcccatgacgtaaatacataggtgtgttccaggatttgttcaggtttttcccccctcctaatcttgtacataacttgtattatgtgtaagttaaacattttattttgaacttggaatgttcccagtgatttcattcagcagggtattttctgccttgttggcaagtgacaaaaaatatgggaagtatttgctaccagttggtagatggtgcccttaatggtagaatgaggaaacatgtccgcaaaagcatgtttctattatctttacttataggggggtcggagggggtagcctagccagaacatcattgtaatcttaaaacataagatgctttattagatgatcactaaaatagctggaagacagtactttagaaacagatagtggtacagattataaacatgcca

SEQ ID NO: 3793 - DNA, 632 bp, Homo sapiens
ttttttttttttttttttttttttttttttttttggaaggttctttaaaaaaatttttaatagtactatggtacaatttagctatctcatttctgcatatacaataaatttactatctcaaagaaatacctgcacctccagtgttcattgaagcatttttcacaatgtgtcaagatacaaaagcaatctaaagtgttggtggaaactgactgcacacaaaaaaaacagtggtatatatacaaaatagaatattattcagccataaaaaataataaaaccctgacattctacaacatgggtggacctagatgatgttatgccgagtgaaacatcacagaaacagaaagacaaatactgtatgatctcacctctatggagaatataataaggttggactcctagaagaagagagtatagaggtgagtgctaggccctagaggtggggaaagtgggatatgtggttcaaatggtacaaattttcagtgaaaagacataagttatggtaacctaaggtatagctttatgattatagaaagtaatactgtaaggtatgctgaatattgctgagagatcttaactgttctcactacaaaaaagtaagtatgtaaggttcatacaatggtcccataaat

SEQ ID NO: 3794 - DNA, 736 bp, Homo sapiens
ttttttttttttttttttttttttttttttttttttttttttttttttttttttgtttatagtaaaaaaggtgctttattttacatatcattggtacacgatacataaaactgcctaaaatcagtcttgaaaaacacaacagtcagtcagttacaccttaaagggtcaaagaccaagtctattttgcaagctacttcatttatgatcaaatgactacaataattttaaatactaataatgtcttcatatccaatgttacaaatgattttggttacaagggctgtaattttttaaaataaaaatatctttagctatagaccttatttctaatcagaatgaatcttggctagtctacaagtctttgaaataatagatcaacaatttcaccttcctatagataatggtatttatgtaatggggtaatgaggcaggagtccttcatacatgcaatcagattatttcaattttttaaaaaatgcagataaaattgagtttatatataccctatgtctaattaagttgccaaagaagtttattaaactaaaatgaagccaatatgatattttagaaaacataattctgagagcatgcaacatcaaaaatatttttactacttatgaaagccagagttgcagaacacagaagaggactggccaaagtctggtctatatttgacctgcttacctgactgcgaagagtaagaaagtctttactcagtgcaatccttgaaaaattc

SEQ ID NO: 3795 - DNA, 97 bp, Homo sapiens
atggggcgtaatggaatgcttgaaggctgctccgtgatgtcggtcggagcttccagactaggcgagggcagggtgaggcctcgggcacacagaccgg

SEQ ID NO: 3796 - DNA, 721 bp, Homo sapiens
tttttttttttttttgttgaccgcacgtatgtgttcttttgcaaagtgtctgttcatgtctttgaccattttgtaatggggtagttgtttgcttgttgagttgttaaagttacttatagattctggatattagacctttgttggaagcataatttgtgaatatttctttccattctataggttgtctgtttattctgttgatagtttctttgccaatttttgtttttggtgcaattgcttttggggactttgtcataaattctttgccaaggtcaatgtgcagattgctatttcctaggttttttccagctggattcttttctcgtcttctggcaagtcagtttagaagaggttgatttattcagaaagtatccattttctttttctagacttcagacaggaaaatgtaaaatgagcaaaattctcgtgtataaactagctcaaaggtttgtggaagatttaaatgctgcatgacaggtagcaggtagtcgataaatgccagttgtgaatattgcttttcagattaaataacaaggctgaaagtaaatgttttggacaggctagctattcttcatacatccaacctaaaggtaatcatcctggtttatttatttattccaacaaatatttgaaaaattcacactgtgaagccgggtcctaactatgcccttgagatagcagtgaacgagacagtgtggagttccccttctagtgggaagac

SEQ ID NO: 3797 - DNA, 646 bp, Homo sapiens
ttttttttttttttttttttttttttagcaagttaaccaattttaatggaaccaagtaattacacaataaaattttatattcatccacaaaaaaacatcttgcaacctttggaaattgtagaaagaaaacagtggggagcatatccttgtggagcatctctggttgtaactagtgattagtattttggtcttttgacttcaacccccaattccaagtttccatcttcttcctctttctcaatgatggcactaatcttcttccactggcgatcaagctctgcttgtgtcatgtggtttccttgaagcgcctggttttccgcccttcagacattttgataccatactggaatgcagccttgggcaaagcttctttgttgttcatatactcgctgtattcttcctgggtatcaaagtcccaacggcctaagggccccttcttgttaccctggtccattttgctataatccacctcctcatcactatccacagccatgtcatccatcgtggctgggtagcactctgcataactgttggacatgccaaagaaatctcccagctgctttttgtcttctggcttcttcagcgattctgtgccttcccagccagcagacccagcaaacttttcattgatggacttgatcaactc

SEQ ID NO: 3798 - DNA, 718 bp, Homo sapiens
ccaagtacgcccccattggacgtcaaagacggtaaatggcccgcctggcatatatgcccagtacaggaccttatgggactttcctacttggcagtacatctacgtattagtcatcgctattaccatggtgatgcggttttggcagtacatcaatgggcgtggatagcggtttgactcacggggatttccaagtctccaccccattgacgtcaatgggagtttgttttggcaccaaaatcaacgggactttccaaaatgtcgtaacaactccgccccattgacgcaaatgggcggtaggcgtgtacggtgggaggtctatataagcagagctcgtttagtgaaccgtcagatcgcctggagacgccatccacgctgttttgacctccatagaagacaccgggaccgatccagcctccggactctagcctaggccgcgggacggataacaatttcacacaggaaacagctatgaccattaggcctatttaggtgacactatagaacaagtttgtacaaaaaagcaggctggtaccggtccggaattcccgggataaaaaaaaaagggcggcctgaaaaaggaactgttcagcaggctgatgaataagatctaagagttacctggctacagaaagaagatgccagatgacacttaagacctacttgtgatatttaaatgatgcaataaaagacctattgatttggaaaaaaaaaaaaaaaa

SEQ ID NO: 3799 - DNA, 422 bp, Homo sapiens
ggcctcttgctccacagcctgcaaggtctgagcaggcaacggccctggggcggtgaggcccccgcctggtcactccccgcgccccccatgcaggcagtggaggggaggacacgcaggaggaccagacgctaaaggtgtaaacgggcagccgtggcactcctcacctctcaataagataaataactaaataaataaacaactaaataaagacatgaaggaatggatgcagagacgtgaacggatggcgcaggacgtccctggtgggggccacggtccccttaaggcatgtgggaggctgcaggcctctggtggtaggtgggtcagcaggctggtggaggacacggacagcgtcggggaggatggcggcgggaaattgagcagctccagcacccgcaacccacactgtgcgccgggtgacatgc

SEQ ID NO: 3800 - DNA, 754 bp, Homo sapiens
ttttttttttttttttttttttttttttttttttttttttttaacagcagaaattagcatctgtttaatatattttaaaatatggaaatatatttaaacagcacatttaaagaataaaacaatagacttccatttcttattctctcaatggtacaccattaattaaaaatatattacttaatgtaccccttaatatagttactgtcaaattttctttaagataaactgtatttcaaaacaacattttaatatacccgaattacaaacaaagccataacatttttgaagacatttttgggtatacgtttggtttgaaagatccaaaaggatgattaataaatggtgctttatgaatactttagattaacggtaaataagcctaaccacagagtcaccataaatagcaagttatcaatctaaagatcattcttcaaaaagtcagtgtgtgttaaagaaaggccttagagggcattctaatagatagagaaaataaattaattttagagggaagaacacacatgcacacacagacacacacacacacacacacacaacagaaccttcctgttgtggaattattctgtgcttggaagaaggtttacaaaatgcctttacaaaataaggtttccattgagctcactctcaaagatttgaacacatgaatttcagctgttcttagaaatggcattctgtcaaagccattcttgcgactttggtattgcgagcggccaaaaaaaataaaaaaaaaaggggg

SEQ ID NO: 3801 - DNA, 517 bp, Homo sapiens
tcttgctatgttgcccaggatgttctaactcctcaagtgatcctcctgcctcagcctcccaaagtgctggggttacaggcgtgagccaccgtgcccagcacatgtcttctaaaagctgctgtttcttcctttttcaggagttctttcccatactgttcttctggatgactcctcgtcatccttcggatctcaaatgaaaggtcatttagagaggcttggcctgaccatacaattcaattagtttcttacccctttagtctctctcatagaccctgttattttccttcatctcatttatcacaagtcttcatatatttattgcgttggatacattcaattctgtcgattttcttagaatgtaaggtttccaagggaagggacttcgtattgttcacttttgtattcctagaaactagcacaactgcctgacacatagcaggtgttccataaatatcttgcggactgactgtctattcacttatccttgttcctgtactgcatatcagtactccctaac

SEQ ID NO: 3802 - DNA, 786 bp, Homo sapiens
ttttttttttttttttgttacgtttatatatcatctggtggacacaaaatatcaagatttagctgctaccctcaataagtttacaagtaaataaaatgatgccttattagcagtaatgatattatttgcattaattaccatattgataatttataatcaaagatgtcaaacatttattgagaaatcaggttccctttacattctttaactgaattatcaaagtaactccatgatgggcattgtaatgcttagatcacagatgagaataatgaggaagaaacagggtaagtaacttgtccaaagtcacacaccttctaagtgtaaattttcataaataagaaagtgtattctggaacagttaagtgacttaaacacaaatttacccagcaacaagtgatagacccaggattcaaacaccaaaatcatggctttaattcaagggcgcacacacacacacacatacacacaagcctggggaaaaatgtgcaaagaaaaatataaattagaaaattatgactcaagatatataacggaatagtaataaattttccaggtagctgagagattatgggaagcacttggaactccagagatctgagatctaatcaagcccctgtcactacgactgtaactactttcttaagcagaacgtttgggacataacggtaccttatcttagcacctcagagtcctggttatgaaaactgacattgctctgctgtgatgcagtgaaaaactcagatccacagtttgtccaaggtgttatcctgtatgagtggactaaat

SEQ ID NO: 3803 - DNA, 693 bp, Homo sapiens
tttttttttttttttttttgccatttgctatgttttattttgctagtagcttattaaacataacatgcaaataatcaaagagaaacatacatgacttagagtgaaaaataattctagaaaagtttcactaggtaagtatgcaaattcttattctaaaaatacttctttaagtgcatgaagcttcatgtattttgcaatattcttggcctcaatatctaccacctattttttaaccagacaaatttgaatgtatcaagataatttggtgcaagagagtaacatccatatgtatttaatccaagctttgaggaacattaagatttaaggattataaaacttggctgatttccatgcaaccagtaaaaggttttgcacatcatttgacagtagaaataaaaaaacactaaatttacaaataaagcattgagtttgatgtctattcgtgtatatgtgtgtgtccttgtgatgaaataggcctgcctttcatcttttctttaaaaaaaataaatgtttacaaaacatttccctcagattttaaaattcatggaagtactaaacagtaataaacatatggatactatgaaaactgacacacagaaaaacataaccataaaattattgtgccaggataccagatattattaagagtgacttcgttagacaaacacgtagacatttcatacctattccggt

SEQ ID NO: 3804 - DNA, 693 bp, Homo sapiens; identical to SEQ ID NO: 3803

SEQ ID NO: 3805 - DNA, 688 bp, Homo sapiens
tagctctttcctctgttgaagactgtttccatctgctgaaacagtcttctctcaggatagctacctcgactccctccctctcctgcctatagaattttcgcttctctgttgaaaggtttttttgactgttcctatttacaattctaactctcaccatcttcagcctcctcatctcttcctgcagcaaatacttcctttcaccttctctgcattattttattctttaatacttgtacagcatctgacatactatatattttcccttttcaccaatttagtacctgactttccatgttgcccctccttcctacacacatcactagaatataaacttgaagaagggcgaacgatttctcgtacagggtttttgttgtgtatttctgtgcagctgcgtctatgcagtacctagaacagtgcttggaacattctaggcattcaatatatatctgttgaaggaaacctcatttcacagttgacacgtaattgcagctcaaaccttggcctaggtgacactgggtgtgaataacggcttgaatgacaaaacccagttctgtctgtctcaacacacatcctgagccatcagcatcattttgctgtctatcatttctatgtatgtatgtatcatgtatctatctatctagtcggtatcaacgtgactccaggacttgaatatttccactggccagca

SEQ ID NO: 3806 - DNA, 751 bp, Homo sapiens
tttttttttttgtacaaatggctttcccaatagactaacagagaagctccataagtgagcttattactcccaccctactcattgcccatttttgctctaaggttacggtagagtacagctcctgccataagaagctcacaaaacagaaaacctgccctagccccttaaagacctccacccaaccatccagagtcccacaaatgtcttctacatacaaattgaatatttctacctccttacccataggaatcaagtagtttccatttataattctttgggattaattatttttctttatttgctatccaaaattagcaagctagcagctatcgtctggttgtgagtggtgcagacaaagatggagaaggactatcaactcaatgtgaatgtaatattaaagtgaaagatgtcgacgataacttcccagtgtttagagactctcaggtacacccattgctccttagagaatcatttagatatatatttaatactttgaaatcctaatgcaggacttgcctgtttgttggcttttatttaagttctctgcgcttatctttaaagaaatatgctttttaaaaaatataagaattcagtaataagaagaaggaaatacataatttgagaaataaggattaccatttagaagaaacataatctctccatgtaaaacctgtcattaggtctttaattctgcttctcgccttttcagtattcagcacgtattgaagaaaatatttaagtctgatacttc

SEQ ID NO: 3807 - DNA, 755 bp, Homo sapiens
ttttttttttcatacaattatatgggagatggctagagtgactttcaatatatttcacaactggtatgacatagcttcacattaaattgttgtagacaataaatcaacaagaaggccttgcagggtcttctacttgggaatgagcatgcttgccctcccgactttagtttgacatggcaaggctgaaactccttttagtatgtagagctctagtgtgggactggacaaatttgcataagttattcagggatactaaatcacatcctggctttttaaagtcagcaattcctggactatcatctgaattgcttctgacgtaggtttgcagacagaacaaggacaacaaaggcctgtaagatgaatcgtccagaggaagaggatatctaagttgtctcaataaaagtctaagggttgggtaggggaggactgattatatactacacaagtagctgcaaactagaagccaatctcaacccagccctagatcaaaaggttttacttgatgctcttgcctcccctatacagatcagctcagtaacatctgctgatttcttatgtgggaactcaggaatatacataccagatgttcacatgctgggtatcacagtgaagatagagcccaggttgtgtcactacagtgactgtgcactttaacaggttatgtgcttcgaatggggtccagtaacctctccttgccaaggtgccattcctcggggactgagtcatgattctgtcccccattcatctgcacattc

SEQ ID NO: 3808 - DNA, 716 bp, Homo sapiens
  misc_feature (112)..(112): n is a, c, g, or t
tactcgtaaggaacactctgacccactgatccattttgttgacttgagctataatatgaatagcaaaatgaaaatatggaaagtgtaaacaatgaaatatacatagtgcaantatgtgaataatgtgcaaataatgtggacatccgcaaatctccataggtagaaaacacgaataacacagaagttgtcaccactttattctggaggcaaatgggctgtctagtatgcgggagaaaaaaggtacaaattgtctagctcctttggatgcagtcctttaattcagaggttcctaactcagggaccagggaccagtctgtggcctgttaggaatggggccgcacagcaggaggtgtgtggctggcaagcgagcattaccacctgagctccacctcctgtcagatcagcggaggctgaccggcgcggtggctcgcgctggtaatcccagcattttgggaggccgaggctggcggatcgtctgaggtcaggagtaggagaccagcctggccaacatagcgaaaccccgtctctactaaaaatacaaaaattagccgggagtggtggcgtgcccctgtaatcccagctactccagaggctgaggtaggagaattgcttgaacccaggaggcagaggttgcagtgagctgagatggcgccactgcacttcagcctgggtgacagagcaagactcggtatcaaaaaaaaaaaaaaaaaaaaaaa

SEQ ID NO: 3809 - DNA, 705 bp, Homo sapiens
ttttttttttttttttaagtaatcctagatcccatgaaatttgatttttatctactttaaaagaatctcaaaataataagagtgttagtaacataaatgacattttcctaaaacatactattaccatacctaacaaaaaataccaataatttcttaatatgtattatatgataccctattatcataattccctggctattttctttctttctttttttctttttgagacggagtcttgctctgtcgcccagctggagtgctgtggtgcgattttggctcactgcaacctccgcttcccaggttcaagagattctcctgcctcagcctcctgagtagctgggactacttcattttcattggaagtctttgtcttcatggcttgtgtcacttacaaatgaattgtatttacatattcaatatgttttaattaggtgcagtcttttcgtggggggaagacgttggggggagttgctaaaatgctttactatattggcaagtgagaacttcttccagttggtttctatatcctttttatgcaaacccataagaatttgatagctttcttgtcttctggcataagatagacaggtttatcggtgtatttttgccccagagctggaatcggtcatttctctaaagaaatccaagctctttagtgggaaatatttcttagaaacacaatctgggcattatgcctggtcctgc

SEQ ID NO: 3810 - DNA, 697 bp, Homo sapiens
  misc_feature (583)..(583): n is a, c, g, or t
tttttttttttttttcctcctgagtgtgtgcgtctatgtgttttgtctttttggccgggctgggagtcggcaggggtgttcttgttcactctaattttccaccgaaaacgtgggccgggggccggctgtgctgccccctgggattcctgggacgatggagaaggggcgagggaagaagacctttgctatcccagataccaggactgagtggcccagtggcgacagaaagagggagagagaaaaagggagagaagtcgaggggtcagactctgctgcagacatggtttacctcttcccacgctcaccccccacctcctgcaaccctgtgacctcagtttccccatcccaggctctaacaacctgctgggtgacccatggcaagtgactttgtctctgagggaggcttccagacacagtacaggatgcccagtgaaactggagttctggttaacacagaattcttttagtataagtctagcccacgcaacattggggatatacttacacaccacacacaaaagatccatttatctggaactgtattttatattttatttattattttattttttgagatggagtntcgctcttgttgcccaggctggagtgcaatggcgtgatattggctcactacaacctctggctcctgggttcaagcaattctcctacctcagctccccgagtagcctgggattaa

SEQ ID NO: 3811 - DNA, 715 bp, Homo sapiens
  misc_feature (154)..(154): n is a, c, g, or t
ctacgtattagtcatcgctattaaccatggtgatgcgttttgccagtacatcaatgggcgtggatagcggtttgactcacggggatttccaagtctccaccccattgacgtcaatgggagtttgttttggcaccaaatcaacgggactttccanaatgtcgtaacaactccgccccattgacgcaaatgggcggtaggcgtgtacggtgggaggtctatataagcagagctcgtttagtgaaccgtcagatcgcctggagacgccatccacgctgttttgacctccatagaagacaccgggaccgatccagcctccggactctagcctaggccgcgggacggataacaatttcacacaggaaacagctatgaccattaggcctatttaggtgacactatagaacaagtttgtacaaaaaagcaggctggtaccggtccggaattcccgggatgccacagtttattttaaatagatttaagactctccaataaaatttgacttctcaccctcaccaacagggtgaaaccccatctctactaaaaagcaaaaattagctgggtgtggtggcatgtgcctgtaatcccacctactcaggaggctgaggcaggagaatcccttgaacctgggtggcagaggttgcagtgagctgagattacgccactacactccagcctgggcgacagagcaagacttcgtgtcaaaaaaaaaaaaaaa

SEQ ID NO: 3812 - DNA, 725 bp, Homo sapiens
tttttttttttttttttttttgcatgaaaagtgatctctttgcattcgatgactttttgtgtctcgcttgttcattgattgtgatctgtctacgctacaaatttctaacagcccatttaggatgcaggtccttttattcctggacgacctaaccaaggtgaatgatggctttaccgaagttcttgccttcaaagagggacagcaacgcttcaccactcttgtcaattccctctgtgatatctagcgaaggcttgaatgagccgtctgcaatccacttggatacgttcttctggaactcttcagcatacttgggtccaatgcttcctactaggaaacctctgattgtcaattgacgctggaagagataaactaggttcttgacgccgtatctgtcttcgggcttcaagttatactggctgatagctccgcaggagacaattcgagcgaagtctcttgtagcttcgagagcatcatcaagagtctttcctccgacgttgtcatagaagatgtcaattccatctggagccagctccttcaaagcctccgcggtgtccttcttcttgtaattgaaggactttgcgactttgatgtcattcttcaagaattctacttttttatcatcgccagctgaggctatgacgttcaatccgtcgtggagcgcgagttggcagactaacttgaccgactgctcccgctgctgtgttaccaagatagttcacccttct

SEQ ID NO: 3813 - DNA, 738 bp, Homo sapiens
tttttttttttttttttttggtgttcagttttgccaattttattgaaccaataaaattcctactaataacaatgaaataaatttctgcaagtataaatgtgatacagtttaacaaaacccattgttctgtacctataaatagattttcaaaatgtcataaaaagtgcagttatgaattgttaacatgttaatacacagttcctttatttcagatgtgtttgtcttgactcactaacagttccttctgcatctgtccaaataatgttaccctccctccaaagaaaaaaagagtcattaaagcactagaatattacacataaactgatccatttaggtcagctttagtcagaactgtaaaatcagcaaacataagaaaaacaaaacctagtaatacatacaaaagctttcatgggttctagaaccttcttaactgctgattcatgtggagggcattaagagttgaaaaggcttatatggttaactaccttagactatatctacagcagggtctggtttgccagaacaagtttaaagtggctgtttattaagtttgctattttcagaattgaaactataagaccgccatttgacactgaaacttgcgtgaatcctaaattgcatcaattatctatttgataaaagcttattctaaatttgaaaccttatagagtaagagactgatttatatagcagtctttaaggatcacgtcatctggcttacattagtccagtcacgtg

SEQ ID NO: 3814 - DNA, 747 bp, Homo sapiens
ttttttttttttttttttttttttttttactgtcaaaacgtttattgcaaaatggagtcttagaacaaaggaaagcaaagaaaagttcacatcaaaatgaaatgtatgacaccaacttggatttctgaatacactgtggactttgtgctggaatatcaaattccaactataaaatcagtaactgaaatagtcttaccacacaagagtaaaatttaatcttccatacaaacattatacaagatatttggcataggacttgctcagaataacattgcaatagaataattgagaaaaagtttttgttaaaaaaacaataaagtgataatgccatctattcaaagctcacactcaaagaatataaatattttctattatttagtacaaaaattttaagagtgcaaaagcaatatgtgcagtgtatcatatctgacattaaaagatatactattctgcacacaatataaaataattaatgtaggtgcttggaactctagttttgaagtaaataatcacatgccagaaagctcctcacaggcaacagagtgcaaacaaaggtggagtctgagaaaacacggctagtcttctagatttcctgatggatactcatttttcatcatagaaatgctgtatctagagctgtcaggctatgctacaatcgagaggagagaatagattcatgtctggcgatgcttaacatttaaaccggaaaccagcttactcaaagcagcaaaggtgcctgattataga

SEQ ID NO: 3815 - DNA, 707 bp, Homo sapiens
tttttttttttttttagcttttcaaaagtttattttaagtttggagactagacaaggtcatactggttttacatcctacgtgatataagtatatatacaaagaaaaaaacaacattggaatattacacagcttgaaggtttgcaaaggttatttgtgtcttagttatttctgcacttaatgacacatcagacgcattgagtatatttcataagttgttgactagcaaagatacaatcattagataacccaagatcttcaaaattcacaccaaactttatgaagtcattcagaaagagaaagtcaatcctaaaattaaaatgggcaactatgataaataccttcaaaaggatgtagatataatggagatgtttaaaagtttagtttcattaatggtaaaattagcatgttatatttactcaatatagtgaagactaggtgatccttacatgtattctacttatggtactgtactggttttagtgtgaatttaccatagaataaatttacttcacctttcatgtcatcgaccatgaatgacacaaaagctacttcataatactactttacaatagtttcaacattcccatatgggtgcgaaccccttttgtctctcatcaaatttggggtgtcatgcagaacaaataggtatcccgtcggacatgatgtattgcgaagagcatttaaagcagcacggaacatgacaagc

SEQ ID NO: 3816 - DNA, 678 bp, Homo sapiens
tttttttttttttttgataaggaataatgatagagtaggtaaattccaacattaacaaaaacaagaaaataatgaactagattttgatatactaacatggaatgttcttcgagctatattgttaagccaataaaatatacataatatacaagtatatgcatgtaagtgcactaaaagaaacgatttgaaagtatatacaccaaataaacagactttacctcttagaagaaaatagtgtggtaggcgaaggcataaagagggaactttagtttttactctccatagttcagtattatttactttttaaaaaaaaccataggcacacatttatattttattctttaatttaagaaacctaaaggaagtttgcttttttgagattaaaaagtatttaggcatgtagatttttggcagaatagcaagtcaccaaccaagtggccccttatttccccgtagaaaagggtagaacatccagctatgttaagagattaaccgtatccatccttggcacttccaatatataaggggttaaattgggctgtgtaatattgggtacactctctatgtgaatataggtgtgctcaacacatcttgattcaaaatgtgactctattgtgtcagtggctataatattcccctcatcatgggatatacgctgggttatatcttaatatatta

SEQ ID NO: 3817 - DNA, 655 bp, Homo sapiens
gctgagcagggagtgggcacccggagacctccccagttcctctctgtgcctctgctttgctacctgtggcattgggacatcaggggaacaagccccggctcccaggcccctggctgccttctcatgtggcttcgtgtgaacccctattcggcgtagcttttgtggctcctggactctactttgggtcccagatgtagagagagcagcctgattacccagggctgccagggacagctggggcccgagagatggtggcccctcctctgtgtcttgactgtgggcaagttacttcacctctctgggcctcagtttcctcactagaaaataggggtaatagtacaggcgtggtggctcacacctgtaatcccagcactttgggaggccaaggcaggtggatcacctgaggtcaggattcaagaccagcctgacgaacatggagaaaccccgtccctactaaaaatacaaaattagccgggcttagtggcgtgtgcctgtaatcccagctactcaggaggctggggcaggagaatcgcttgaacccgggaggcagaggttgtggtgaaccgagatcgtgccatggcactccagcctgggcaacaagagcaaaactgtctcaaaaaaaaaaaaaaaaaaaaaaaaaaaaaaaaaaaaaaaa

SEQ ID NO: 3818 - DNA, 714 bp, Homo sapiens
tttttttttttttttgtaggcacagacaaaggcttctatcgctgcctggcctgcagagcacaggtgccgcccacagcccagctggcttgaggtggcccacacgagctgcgtgtagtgggtgcaggtggcgttgcgagcacactctcctgccgcgtggctgtaccgctgcccctctgcaaaccataggctgaccacttcgacaaaggacaccaagcccgcgggtagcagctgcatgttccagcccacttgcagggtgcgccacaggccggacgccaggctcggggttggggttccacagagggctgccctggcttgagccagctgggccaggctgtcactccagtcctgggggcagcacaaacagacatctgtgggaggcctttgactgctgggccaggcctcaaagattcaactcccctgccatctctgagcatccaccgggtgccaggtcaggtggcaaagagagcactggatgaggagtcctgctggaggaagcactggtgttgtctgatgtccctccaggaggagcccagctcctctcacgactgagcctccatctccaaatcctgtcgtgggcatccttcggccctgcccaggcaatgggacccgctcctgctgtctttctcccatctggtcatgtgagcagtgccacgcgttgcagactggttctgtgtttgggcctggcaattgtcagaaaggctccactggtccacc

SEQ ID NO: 3819 - DNA, 215 bp, Homo sapiens
ttttttttttttttttttttttttttttttttttttttttttttttggagtttcttaatgttgtaatgggaactctttacagaatcactggtggactattttgacaatatggtatttggaatgggaagtagaataatatttttttttaacttgggatcagtataagtccgaagttattttaattatgggatttttcagacccatttcaggagact

SEQ ID NO: 3820 - DNA, 358 bp, Homo sapiens
tttttttttttatattttttttttttttaacttttaagttcatgggtacaagggcagatttgttgcacaggtaaacttgtgtcttggggctttgttgtacagattatttcagcacccaggtattaagcctagtacccattagttatttttcctgatcctctgcttcctcccatccttcaccctctggcaggccccagtatctgttgttccctgctatgtgtccatgtgtttttatcatttagcttccacttatacagtgagaaggtgcggtatttggttttctgctccctgtgcaagttagctaacagcctccagactccattgcaacaattcccctggaaaagggggattatggatc

SEQ ID NO: 3821 - DNA, 750 bp, Homo sapiens
tttttttttttggtggtggtgggaggtgtcaaaccgcattattgaggggagtgggggtggtaaagcagtggtgaggacgatgagaagcgacctccttagccaggccaggagctcacctcccagaccctgcccttcaggcactgaaaactgttttaggcttttctgcatggttggagtttactcttagttgctgacagtcactcatcccctggagaggggtactgagcataatcactgttggtattttatttactaccagttcttcatcattaccgagactcattccatttggaaaataaacattgcctcatctgttcatggtatatttttacacttgcctttcactcacatgttgcatattaactgaaaagatcagcatgatcttggagcctaatgtgatctggatcttattaccatgtatgtttttatcgtcaggtgctgctttggactctggcccattcctcccacctgtcttcatcctgtcggggttgatctctgcctggttccatagtcacttggcttttggagttttatttcttctctaacccactcttcccttccctgtcaaatataattctctcatgagcaactgtgcctgataatcccagtgtatagggcatagctcaggttgttttaatgcttgcaaggaagtctcttcagattactacagggtaaaagaatcatttccctttcaacctctcattacttactgaatcatatctatctacttgtgtaattcacatcatgctc

SEQ ID NO: 3822 - DNA, 763 bp, Homo sapiens
tttttttttttttttttttttttttaattggcttattgcatatatgtactactgaaagccatctcaaagtctttttttcaaaagatagttttatttggtgagaggaacagcccaagggggacaaagttcaattttttgtgatctagttttttataaaaggtagcatattcgaataactagaagcagataaataggtagttagcatgtgtctttcacactccacaattggatgtttaacaaggtttgacgacggcaattacatcgagattgagctgtctggaaaaagcctgcactatagacattgtgcctatgttgctagttgaggaaattttcatatgctgtagtgactgggtgtgcatatgttaggggtgttatttggttataaaagttcagaaatccaacttgctttcttgttgtcttgagggggtctcctaacctatttcggtagggccataatttttctctaggagaaagtcaagtagcttgaatgaatgcttcattgagatctcagagcaccacagcctgaccagacatgcaaactttgattgatttgtaggaacttttggcactgtgttgaaaagggttctgagatttcatccagactcaatgggaaagatgctctgcttcatgaatgggatctctcaggaatggagcgacggtgtgcgtgggaagcatggatccatatgacatcagtgcttatggatcagggtccctctgagagcttttgaacacagattgcctttttatagctgggtggaccaag

SEQ ID NO: 3823 - DNA, 720 bp, Homo sapiens
tttttttttttttttgagacggagtttcactcttgttgcccaggctggagtgcaatggcgtgatctcggcccaccgcaacctccgcctcccaggtccaagcagttctcccgccccagcctcccgagcagctggtactacaggcatgcaccaccaagcctggctaattttgtatttttagtagagacggggtttctccatgttggtcaggctggtcttgaacgcctgacctcaggtgatctgcctgcctcggcctcccaaagtgctgggattacaggcatgagccatcacgcccggccaaagttttagaatttaagttattccaaaaaaaattttttttttcaaaaatacagactgcatccaattaaattctatgttaactggtaatgactaggtctaaaatgttaggtatttaccaataaatgacataaaataactcaacaacaaagggattttttttttttaagagatagggtctcactttatcactcaggtttggctgagggcagtggtgtgatcacagctcactgaagcctccaactcctgggctcaagtgatcctcccgcctcagtctaccagagtatattcttgaaagtaaaattacaaatgaaattcagcagtgttaaaaataagcccacttgcagacattatcatttttcttcctttctttcctcactatctgtacttggcatattcctacagggggtgtcttaagaaaaaac

SEQ ID NO: 3824 - DNA, 741 bp, Homo sapiens
tttttttttttttttactacttttactgttagcacaatgctataattgagctaatctttgtagtttggtgcaggaccaccaagtttgtgtgacccattacctactttttccatgctcagccattaccctgtcctggggcatctgagggcagtaaggaacaggtgtccaaaggaggaatgttggtgcctatgagtatgttttccagttgtattgaatttcttacttggtgtatttttgacttgtcttagtttctttccttgtggtctatgctattttacttgcgatttgttggatattctccctgtcattaaagagttgtaaaatggaagttagtttctctatgcaaatgctttaatggatgaagctgataggtttagcattgatttttgctggtgtccttcaacaagcatgaaggtgataaatgtgtttccatggctttagactcattttcgaagtcttggcattgtgtgaacattcttagaaacaataaaatgttttaattaacaagccctcgactaccagctgaattcagtgtctactaggaaaatgggtagatttgttacattgtccctttgctctctatgactttgttccagttgtcaaggaacttaaactgggtattcaggaacaaagaattctgtttccctttcctcaccttgccagttaaataactcctggtgacacttcacgtggtagaattgaaacacaaacctgattctgaccacatgggtcaacgcaaaa

SEQ ID NO: 3825 - DNA, 766 bp, Homo sapiens
tttttttttttttgtgggtgttttgtttgggtttaattatttcctcagtagaagtcacagcaataggggccaaaaggagggaacacatctgtggcgagaggctttcaaaagggagagtttggccagggatgggcagcaagacccatgaagcaccgtgacccagatgtcagggcttccacatgggaaagagtggcctggtaatcagagtgcagacaccatgcgtcacctggatctggtctcaaccgccggggctgtgtggcttatttccctgagtcccgcattctcatcagcaaactcttggccttctcttctaggaacaaaagacacatcctagaaaaataagcccctcttcttcatttacatgagaagagagctgtgggtacctcttcctcaaatggatgggcaggataacaggtgtgggaggtggaataacagccccacacagttgcctacatccaaatccctggaacctgtgagtgtgtagcatcacatagcaaaggggaattgaggctgcaaatggaattaaggctgctagtcagctgactttaagacagggagagtgttctgagtgtccaggtggggccaatgtaatcacaaggacactttaaagtagaaggctgcaggaagtcagggcaactcgatgtgggataaacccagcgactgttgttggcttggacgacggaaggaggggcccggagccaggcttacaggcagactctaaggctggaagggcgagaaaacaatctttccagaggctccaaaaagc

SEQ ID NO: 3826 - DNA, 699 bp, Homo sapiens
  misc_feature (89)..(89): n is a, c, g, or t
cgggttttcgttcactgagacacactgaatcatagcttctacctcagctacttatttacttggacttgcatgtgatgtgcctgaatacnatacattcccagcaggagcggcaaagggccagtgatgtgacaagagaaaggtgtattgagtttagctgaaactcacagagactatctccagcaggaatgatacttgactccacataagagttctaattctgaaaaattgtgaaatgagaatttaagtcatcatcaaactaatgaggtctgggaagtgacaaatattagatggctgatagggattgtacaacctgtttttgtatgtataaattgtgtaacagtgtgtggcagtgttttattgaaacaagattgtcctagccagtaataaaaatgctgttcctggctgggcatggtggtttatgctttgtaatcccagcactttgggaggccgaagcaggtggatcacttgaggccaggagttcgagaccagcctggccaacacagcgaaaccccgtctctactaaaaatacaaaaattagccagacatggtggcaggcacctgtaatcccagctacacgggaggctgaggcaggagaatcacttgaacctgggaggtggaggctgtagtgagcagagatcacgccattgcactccagcctgggtgacaagagtgaaactccatctcaaaaaaaaaaaaaaa

SEQ ID NO: 3827 - DNA, 225 bp, Homo sapiens
cacatggaacccttctccacttcggccttcaaagttctcgtttgaatatttgctactaccaccaagatctgcacctgcggcggctccacccgggcccgcgccctaggcttcaaggctcaccgcagcggccctcctactcgtcgcggcgtagcgtccgcggggctccgggggcggggagcggggcgtgggcgggagagaagggagcgaggcgctgggggggcgggc

SEQ ID NO: 3828 - DNA, 175 bp, Homo sapiens
ggttaggagcaaaccttggggtctaggagaggaggatggcattgagaggcttgctggttatgaggcagaaagctgacctcatgcatgacttggttgctatctcccccacccccacaaaagtgtcctcggagttcagcccacagacctcctccactccccaaggcggattacaggg

SEQ ID NO: 3829 - DNA, 795 bp, Homo sapiens
ttttttttttttttttgagatggagtttctctcttttccctcttgttgcccaggctggagtgcaatggcacattggcggctcactgcaacctccgcctcctggattcaagcgattttcctgtctcagcctcccgagtagctgggattacaggcatgcgcccccacacccagctaattttgtatattttgtatttttagtagagacaaggtttttctatgttcgtcaggctggtctggaactcctgacctcaggtgatccacctgcctcagcctcccaaagtgctgagattacaggcatgaaccaccgcacccggcctggactcctaaaaggcacccagatgagcttaacagacagccaaggttgaaaactgctgctttaagagctgtgctatccaagtatagtagccttagccatatgtatatacttacatttaaattaattaaaaattcaactcatcagttgctgtagccacattcagctcagccacacatgggtaggggttatactttattggacagtgcagacagaatatttccatcatgtcagaaggtcctgttggatagtgctgcttaagagggaaggaactgagactactcagttttttaattaaagttaggaagagcaccttttgggaggcgaagtgctattagggatgaaatagaaagctgggcaaaactctgtggggtccttaagaacataaagaaagataacccggtgctgactttttgctgaacaagctacatcagcagtggctctcgtgctcctaccacaattgtgtggctacagaccctggg

SEQ ID NO: 3830 - DNA, 692 bp, Homo sapiens
  misc_feature (10)..(10): n is a, c, g, or t
atctacgtantagtcatcgctattaccatggtgatgcggttttggcagtacatcaatgggcgtggatagcggtttgactcacggggatttccaagtctccaccccattgacgtcaatgggagtttgttttggcaccaaaatcaacgggactttccaaaatgtcgtaacaactccgccccattgacgcaaatgggcggtaggcgtgtacggtgggaggtctatataagcagagctcgtttagtgaaccgtcagatcgcctggagacgccatccacgctgttttgacctccatagaagacaccgggaccgatccagcctccggactctagcctaggccgcgggacggataacaatttcacacaggaaacagctatgaccattaggcctatttaggtgacactatagaacaagtttgtacaaaaaagcaggctggtaccggtccggaattcccgggatggccgccctttttttttttaaatggctcatgtagataaggtaggcattttaaaaagcagaataagtaattatagaagcaagaaggcgatagcttttagaaagagggggaattggagtcaaaccactaaaaaataaagagataaagtaggaaggtggagtatagaagaatatccttggaagtacacagggtgaacataaaaaaaacaaagtaataccttttggaaaaaaaaaaaaaaa

SEQ ID NO: 3831 - DNA, 763 bp, Homo sapiens
tttttttttttttttggtctttatgtgcttaaataacgctgaattataattagccacacaaataatgagagttttattttttttttctggctcactccaaatcagcctgttaaggtatatttccttctacagcctttcctgattttgcatgttctcattcccaaagtagtctaccttagtttacactcaaaggtagcacttgttgaaactacatgacagaaacaggctgcaaaggtggacaaggggaagcatgtccctcttgtcttgataaatcagtgccacacacagaacccacattttctgagacattatcttcattatagagccgtttgattccatcatagaagtcatccacttccatttcctctactttgcgtttagtagaggtctgcttgcacccactggcagctgggagatgatggtaaaaggctgctgtacctctgactggcacttctggcttgctgttgtccttggagaagtctgggcctgggacagaggagggatgtaatctgaacactcctttgtcacaggtcaccagggtgtgcttgaggggacggtagacataaacggaattcagaggcagggaagactgcagagtagaaaggtgatgtgccacaagctcccgacaatggatcaactgggagctatccatctgtgctttctgaagcagttcaattgtaagagaaagccaatcaggaatgagtttctccatttccagataaccatggcagagcagcatgatctctgaatgcgattggtgccg

SEQ ID NO: 3832 - DNA, 735 bp, Homo sapiens
ttggacagctttaattcacttgttcagatcagtgtttgaaatggcaattatcagtgttggatttagttccaactacttgatttacagaaatgtacatttagagaaggttaaaagaaacagtgagaaatgtaaacattcaaaatgataattgaatctctcagttgtgggaataattatcagagacatgcaactgaaaatgtctcacctttcatctttttttcttaattcagaaagttatcttgtagaatttgatgagaccctcctagtcattctcaactggggcggtgctgtcaccgaatggtgtttgagagtgttggggctagggcacatttttggttgtcacagcaactggggtggcatttgctgcccagtgccaggaatagtaacattatgaatgccagggacagtgtgctcagtaaagtcttccatccaaaaggggcagggcacggtggctcacgcctgtaatcccagcactttgggaggccaaggtgggcggatcacctgatgtcaggggttcgagaccagcctggccaacatggtgaaaccctgttgctactaaaaatacaaaaattggctgggtgtggtgtcacatgccagtaaccccagctactagggaggctgaggcaggagaatcacttgaacccgggaggcagaggttgcagtgagctgagattgcaccactacactccagcctggatgacagagtgagacttcatctcaaaaaaaaaaaaaaaa

SEQ ID NO: 3833 - DNA, 576 bp, Homo sapiens
tttttttttttttccattttgaggggtattttcactggatgtatgcttctaggttgacaggattttctttcagcattttaaaggtgttattccattgtctctggcttgcaatatctccgatgagagagaagctattatgcttatctttgtttttctataagtaagagtcttttccccctctgtgtcttatcccattttgtgttgctctaaaggaatacctgatgttgggtaatttataaagaaaagaggtttatttggctttggaattacactttggaattattggtggctggaaagttcaagactgggcatctgtatctgatgagggactcaggctgcttccatttctggcagaaggcagaggggagccaagatcctgtggggagaggggaagcaaaggagagaggaggtgctgggctctttttaacaaccagcttctttaagcgacctattacagcgtagaattctctcacccttgagaaagggcattaatcaattcatgaggaatttgctcccatgacctgaacacctcccattagccccacctccaacactgtgaatcaaatttcaacatgc

SEQ ID NO: 3834 - DNA, 759 bp, Homo sapiens
  misc_feature (113)..(113): n is a, c, g, or t
ggtcgttacatccggccatggacgcaatggccgtagcgtttacgtggaggtctatataagcggagctcgcttagtgaccgtcagatcgcctggagacgccatccacgctgttnttgacctccatagaagacaccgggagccgatccagcgtccggactctagcctaggccgcggacggataacaatgtcacacaggaaacagctatgaccattaggcctatttaggtgacactatagaacaagtttgtacaaaaaagcaggctggtaccggtccggaattcccgggatggccgcccttgtttttttttttttttgggggggtggccgcccttttgttttttttttggaaagcaaagtaataaaacttagtttatataaacaggttgaatgatatatttatcaaatctcacagacatcaggcaaattatagcctggtgacaaaagtgttgtcttcactggctacagtggcttatgcctgtaatcccagagctttgggaggccaaggcgggtggatcacctgaggtcaggagttcgagaccagcctggccaacatggtgaaaccccgtctttactaaaaatacaaaaattagccaggcgtggtggcaggtgcctgtaatcccagctgcttgggaggctgaggcaggacaatcgcttgaacccaagaggtggggattgcagtgagccaagattgtgccactgcactccagcttgggtgacaagagtgagactccgtctcaaaaaaaaaaaaaaaaaaaaaaa

SEQ ID NO: 3835 - DNA, 694 bp, Homo sapiens
tttttttttttttttttttttttttttttttttttttttactaagcaacaaaaagaaactggttcatatcatcaccactttacctggaaatctatctcggtaaataaccagtttcattacttacaagttatgctttccatgtaactataggacacaattcagcccagctttctgccactatagaataaggttctcttttcctctagttttgagtaacaagttcctcattttcttctggcccctcaccagcagcacttttaatgtcatttttctaccaacaatctgtttatgatgttctcttaagacaatataggttttcactactgtgcttcttacttccttctgagtccataatagcagagtagtcaatatccatatttatacctacagtctatttaaggcagtctaggtttttgctatcatgcccctcaaaattcttccttcttctgcccaatgcccaattccaaaatcacttccacatctttggtatttatatagcaacatcccacttctagatactgaaatctatattagtttcttatcgctgctgtagcaaattatttttaaaaacaacacaaattggttatcttacagttctgaatatctcgaaaatcaagtttccaaatatctgggtaccgtggttggcctattggcatataaattgaccatcacacatattagagattcagggata

SEQ ID NO: 3836 - DNA, 681 bp, Homo sapiens
tttttttttttttttttttttttttttttttttttttttttttttttttcatagagacggggttttaccatgttggccaggatggtcttgatctcctaacctcgtgatccgcctgcctcggcctcccaaagtgctgggattacaggtgtgagccacctcgcttggctgagaagggtcatgatttctgactacactcattaccctatctctctgctcccttttacagtgaaagtcatcaaaaaaattgcatgcacttgatgaatgcagtgcctttctggtgccatcatctatttaatttccaagtattgcggagggtttctagctattcttactgacttcttatctaatcccatttccaggtcaaagaacaaatgatgtagaagtgtcagtctttgcaaatttatggggagttatttcacaacccagcatgtagtgtgagtcggggaatgtaccatgggccctttaaaagcatgtgcattctgttgaccagtgatgagctaatatcagttgggtcacagtcagctaattatgctccaaatcttgtatttccttatggactccccttcctagcttatttatcaactgttcgtggcaaggctgttaattcgaactaggattatggaattgccaatttctccatcgagttctgtcaatttggcttcacgtattcagaagcattgc

SEQ ID NO: 3837 - DNA, 738 bp, Homo sapiens
ttttttttttttttcctgagcaaaccctttctgctgttgtctggaagcctggaatttgcaaacagcagctttctgacagctgaaactgtaaaaaagtttttcttcttcattcccactggaacctaaactgatctgaaacaggtgagatgggcttacagtagaacagaagagaccactggaattgcactgcatctgcctcaaacccaggagtccagagggttttgggattgctgtgtgcttcctgcaaaccctcccaggagtgcaagcttcctttgtttaccattttagccagctcgttatctctctgttttctagttctgccaacactctccacaggattaccacacaatcttactgattttcccaaacatctgcccatttcatttactcggaagtgacagctctctagctgactacatctgcacttcggttgtagtcaaatgctcttaaatgactttttttttttttaaactttctccccttaaaccagtttatttaaccatgcatttattttacatcacagtgaaatttaaacagaaggaaatgcactattctatattctgcaggaggcagattacagaaatcattaagtccagtgacaatgaaaaacaatcaattccagtctcatgcacatcatggatgaattccccagacataatgctgagcacgacagaaggagatgcaaagagtaccgttcgagtattcctatttgtgaactcaaaagcagcaactaatctg

SEQ ID NO: 3838 - DNA, 756 bp, Homo sapiens
tttttttttttttttttttttttttttgagctctcttggcctttattgcccatagaaaacataaaaggtcagcaaagtcacacgagcatccacccgtcatcatatggacctctgtccttggctgtgttgaattccttcccggccagctgactggacctcggaacacagtggctgtatgtgctgagagtggcttccaggccccagggatccacagatcccagcaccccggtgcagccaacaacacagggtgtcctgtctactgttgggtagcatgggaagggcctggcctcagggtgaaggttcccattgcatgttttccaggtgcttctgccaggggactgctggaggtggttcagctcactacagtggccgtggcattgagtcagagattggcaaaggataaggctgtgggtgcctctgcccagcttctaactccagtctctgcctcctgggttcaagcgattctcctgcctcagcctcccaagcagctgggattacaggaacacaccaccatgcccagctaattttgtgtttttagtagaaatgggtttcaccatgttggccaggctggtcttaaactcctgacctcaagtcatccgccctctatggcctccaaagtgctgggattacaggcatgagccaccaggctggccgacattttcagtcttgattaatttacttcattaaaaatgtgtcgcatgtggcaaatggtaaccatctggacaggtcgtctaagatacaaatcatcttgcatgt

SEQ ID NO: 3839 - DNA, 769 bp, Homo sapiens
ttttttttttttttttttttttgaaagaaacatgttttaatgaatcttctcaggcggctgaggcaggaagatggcttgagcccaggagatggaggttgcagtatgttatgattttgccactgcctgggtgacagagtgagatccatctcaaaaaaataaattagaaaaagataaactgcagagcataaatgttatgggctacttttgacagaggaatcaaatcttccttgccaaatttagacccgtgtgggtcagcagaaattgactagaaatagtggccaccgaatggtaactcacaagggtagcagttaagagttggtaaaattttaaatgcacacaaataccaatggacgaatcaacttttcctcgcaaaaccaacaactaagtttcaactaactgagaaaaagtttcatattatcaggccagacactgtggctcacacctgtaatcccagcactttgggagactgaggttgggggacagcttcagtccaggagttcgagaccatcctgggcaacatagcaagactctgtccttaaaaaaagaacttcaaaagcaactgtattaacagggagttaccgatggatatatacagtaaaatggtttaaaagtagaacactatctaaatagtagaacagccattacccgaagttcagaaatacattactaacactataatgtgttggacacaccacatatgaagtacgtacaaggacgggtgccattcctttatatagcattatctagaagacgttcacaggccaccatt

SEQ ID NO: 3840 - DNA, 259 bp, Homo sapiens
ttttttttttttttttttttttttttttttttttttttttgaagatcgcacactttattttgaaaaccaggccagggacagctccagttgggggggaggggaagagattataacttattaaatctactacgaaaatacaaaaagagcaatgtgacagggttccttcctgtgttatgtcaccgtctgtaatcagatcccacagtccagcccagaatcataattcacataacagcgaaactcatttgccaagttccgggtg

SEQ ID NO: 3841 - DNA, 724 bp, Homo sapiens
aaaatttattggcagataaatttcttaggtcatttatttttgtgaactaatacttacaagaatttccccctaaattactatgtttacctaatggtaaggtaagagaaacgaattctttttttctgccacaggagtaccacaaacactgccctctgaaagcaaccatcctatgaggaacactattcctcacacctaacatctccccaaatctgtaacagataggaaaatattttcagggatgtaaatcaatatcttaattttattaatttgaagatgtgtttcaaataagcattccaatgtaatttctgaaattcaggaattcccagactatgcttcaaaactacagaaaatcagtaaagaggtctccccacaaaagcaaatctaggctttattttctcagtaaggtactcatgtgattgattactacgcctcttgctaaaacatgaacgagaaattcaattttttgactaaatttgtctacaggtactttttgtgacaagggggcttactgctaagcccttctagtttcacaaggaacccatatacaataaaagcatacattcaaatatgcaatgtatttaaaccttttctatgaacttctttctcactacaattacatgtatttgtccccctctaaaaatagtgagcctcaacagaggtagttttagtcctctggaccccatttaccacattaaccatgttggagacattttattcccactgt

SEQ ID NO: 3842 - DNA, 663 bp, Homo sapiens
tttttttttttttttgcaaagcaaaagcaagtttattaagaaaattaagtggtgaaagaatagatactccatagacagagtagagcattccctgaagagaaggaacacatcaccctaagtacgaaacttgtgtatatataggataaaataagatcatggggagatatgctctgtctacaagggtttgtgataaagggtggattttcttaagataccatattttgcaagaattgatagtattatcttcaaaacaaaattaggaatgcttctgttctcaagatattgggatatcaggacactcccaagtctgggtctgtatagtaaatgctatcaatctgtgcccttagctgtaaacatctagaagctaggaatacctaactttctaggaatgtagcccatcaaagccccagcttcatttcctagccctcactcaagatggagtcactctggttcaaacgcctctgacatatcatcctaccgataccctttacaagaggaccccttaattccttcatggtgcagagggcatggggatccatcttctgtagcttcttacagagcggacatgggatgatgaaaataaccctcataactatggatctcttgacatccaagggtagagaggagactcaagtcagaaagcaattggtatggtaagggtca

SEQ ID NO: 3843 - DNA, 319 bp, Homo sapiens
tttttttttttttttagtttaacttttcctttttgctgtctagtcatcctcgtcggtcttctgcttcttggtatcgacatcgtcatcctcatcatcttcagctgcccgcttgcccgtagctgactcagcttcctcatcttcatctccatcctcttcctcaccatcaccttcttcttcctcctcctcttcctccccaccttcttcctcttcttcgtctacctcattgtcagacctcctgctccccattattcctcattctcagcatatcccgttagcaggggcgtctcttccccatttttccttgcctcttccaacagac

SEQ ID NO: 3844 - DNA, 755 bp, Homo sapiens
tttttttttttttttttttttttttttttttttttttttttttaacagcaaacaatttacagaatttttattggtaaacagaagctcattactagttattacaaactgaatcaactgaaactcaagttagcaatgtgaaacacatttataggcttatttttgtataccataattggtaatttttgccccctcaatacttttaagaagactgttaaaattttcagcatttcaatgatctcttatttgtcaggtttagcaccatgacattctcattcccttaaaaaaacactcattcaaatctaggtagaacttccacctttcatcatcaaaattatcacacaaaatttatttggtttttttcacaatgcaaaaagaagacaaataagtatattttaaaatattatcagcagtccgtttggtgtggttttacatttttctgtctgcccattattaagaaatcttgcattgatttcatttgccccccttgtcattgcaacccgtctctagaatactgtggtaattgaaactagcatgtacctgcgccccctcccggggtcctatctttgtcacccacctcccccatggctactgcttgtcatatctgtgctcagtgcaaggctatgagcatacagcaggaagaggcgaagtcagcatttcatttacgaaaaatactatctggtgcgagaccaactgacgttgctgaagatttcctggggataaaaataagccggcaggcgtgtggctcaccctgtatc

SEQ ID NO: 3845 - DNA, 807 bp, Homo sapiens
ttttttttttttttttttttttaacagtgttatagtttataaggttttaaaaggaggaaataaaataggatatatggttttattttcatttaaaaaaaatatatatctgtttaaaggcacagaaaaaagttcagaggtatacttacaccaaggcattaaaagtggttatttggggcatcagaattttggttgatttaaatttcttttctgcttattttgtattttcatatgacatgaggaatgttaatatgcataacatgtactcctcacaaaagagtagtaaagctaaaaagagaaagcagtgccaggtagacaaaatgtctctttcaacactggctgaccctggatattatactggtaacaagatgatagactctgtgttctaccatgttcctgctgtgacagctgcatggcataaagagacagagatgctctacttccaggattccttgaatgtacttagagtcttcttcctagtgggtctgaccaccttcttagtctgggctaagagctggccgacattcagcagcagcaggaaccccaggcagacaatggctgggatacaggtgcttagtgactctttcagagctgccaaggtgaagatagcccccatcatgagcagaatcaagaacaagttactgatctcttgcagcatcggtgggcccatgaccagcagcaacccagccagcagttccagaaagcccacagctatttggtagttccggggatcttggctggttagccaattacctccagcgggaacacctcagcaactgacgaaagggatccatccgtccgaaatgagcg

SEQ ID NO: 3846 - DNA, 745 bp, Homo sapiens
ttttttttttttttttaaaaaacttaatgaatttttatcatcttaataaatatatatcaagaaaacctcgactttattacaacacattcatatacaagcatctattagctaagttttgaacatcaaatgtttatcaaatattgaaaataaaggacaaaacattactagactatttaactataacacaagaaaatgttttaaaaattggtctttgtggacaattgtccaaatgatcctactcatacactgtatgaatgagacctatatttaatattaatagcaataataaaaaaagctttatcttggagaaactgggagggcttacttatttcctccgtttggcatttggtttctgtgaagtattcatttgaacaggcccaagtcaattagtaaacttggaaactggaatacagtttagcaggaagagttggctggagtggaaggaaggatggtaggagggccactctgaacacttttcaaatgtacaagttaaagatattatttggcaaaagtgtagaccaacatacatagtaactattatagattaagtcccatttctccaaaataactttcaaaaacctaaagtctttacattctttaagataaaccttattgatcaccacatcatatattaacatagtgcttcttaatcaaacagcaaagtgcatatataaaaaccacatgctttataatctaacaagtgaatgatgcaaacagagacagtatatgcatgcactggtcggac

SEQ ID NO: 3847 - DNA, 711 bp, Homo sapiens
tttttttttttttttttttttttttttttttcaagttggagaaaccttttattgggcacaggcattccttgttaacttgacagggtgaagctgtaatttttcaaaaacagtaaaagctggtttctcctaaactattctccttggtggtagtagagatcagtgggtcagaaacaactcctgaccacttggtttccttttgagccgcgtcataaggaggcaatctgtaaaactagcacaggtctcccgctgttccactggctcacccacatgattagcagagtgcacgaaaaaataaaacttctattaaagaatcatgctgagcacaagatcagagaggttgtgacattgcaaactcgatagatgccgggggcctggggagactgggcgttctccaaagggctcccaaaaaacattcttcctccttctggatttctggtgaccaatggttggaaaggcttaattggcttgggaaggtactggggggaactggatggggggactttccaatcccggttagggaaccttcggtttccattcccggggtcttcggtcctggtttccctggaagaatgggattggattccccggaagggggccacagttcagcttggggcaccgggtaactccctacggcactagtctacaggggcgaagacgctctgtgctggcagcggtggctcacaatggcttgtctgcactggtaaccacagg

SEQ ID NO: 3848 - DNA, 726 bp, Homo sapiens
agtaaagttaagttaagaaatgacagtctcggggggaaaaaaacaaatggtatttatgtcactcaaagctatatggctatttggatgacaaagctactaaactgaaggtaagggtaagggttggaggaagaggtgtcttttaaattcccaaatgaaggagtaattgtttttggcaccagtacccacactagcagttcttttatttattttttgttttttttttgagacagattctcgctctgtcgcccaggctggaatgcagtggcatgatctcggctcactgcaacctttgcctcccgagttcaagtgattctctcacctcagcctcctgagtaacagggattataggcgcgtgccaccatgcctggctaaattttttgtatttttagtagagatggggtttcaccatgttggccagtctggtcttaaactcttgacctcaggtgagttacttaaggctaggagtttgagaccagcctaggcgacatggtaaaaccccatctacaaaaaatacaaaaatcagctgggtgtggtgatgtgcacatgttgtcctagacgcttcggaggctgaggtgggggattgattgcatgagcccaggtgttcaagcctgcagtgagctatgatcaccactgcacttcagcccaggcaacagagtgagaccctatctcccaaaaaaaaaaaaaaaaaaaaaaaaaaaaaaaaaaaaaaaaaaaaaaaaaaaaaaa

SEQ ID NO: 3849 - DNA, 461 bp, Homo sapiens
ttttttttttttttttttatttttttttttggtgctgcataaattctttattaaaccgaacatgatacagtcacttaatgtctgaaaactaagactttacaggtattaagtacaaaataaacatttataaactaggtacattttgattacaattttaaatataatttttagaaaactgaagtttttatttttttattatactttaagttttagggtaagaattttctcttagtacagaacaaaatgaaaagtctcccatgtctacttctttctacacagacacggaaaccatccgatttctcaatcttttccccaccattcacccccacctccactccacaaagccgacactgtcatcatcgcaccgctctcaatgagactgttgggtacaactcccagacggggtggtggccgggcagaggggctcctcaattcccaagtaggggcggccgagcaagagg

SEQ ID NO: 3850 - DNA, 737 bp, Homo sapiens
  misc_feature (566)..(566): n is a, c, g, or t
taaacaacataaaattgatctgtccgttcttttatgcttggaatcatttggatcaatacagtgaaaaagatcaatttcatttaaatgcttaaaattatcacttcctccgagacaactgaatgtaagtttggatttttcaaaatttacattaacatccttactgtcttcaacacaaaattcaatgaagacatagtcccttcgatcgtaccactttgcagaagcaggctgcctcaagtagaacatgaaacacagaaaatgtccgtatctttccaaagtcgacacgtgcggaactacctgctcaatggtaactcctcctcgctgccaggaagcggctgagttttggcaacctcccgtgttttcaagagactggagttaggaggcggactggaagtacccacactcaagaaacccagacactggagagggaagtatgttgcggcgtgggcatggcttccttctagttgcctagcagtacctgcagctcacggcgaggtccgcgtggggctctcccaggagctccgccaggcacctggcggcacccaccacaggtgcactcgactcagggncctggccccgggaccacaaagcaacagaaccggagcgcccaagcagcgagaggcgaccacgaagttcacgcttcaggcgccgcatggcgagcagtacgggagcttaagctaggtgagtacgaagagggagtaccaaaagcaagggtaaatagattccgtgggacagaacgt

SEQ ID NO: 3851 - DNA, 785 bp, Homo sapiens
acggggtttccagttctcagcgcctgacgtcatgggagtttgttgtggcaccaaaatcaacgggactttcgagatgtcgtacactccgccccattgacgcaaatgggcggtaggcgttgtacggtgggaggtctatataagcagagctcgtttagtgaaccgtcagatcgcctggagacgccaatccacgctgttttgacctccatagaagacaccgggaccgatccagcctccggactctagcctaggccgcgggacggataacaatttcacacaggaaacagctatgaccattaggcctatttaggtgacactatagaacaagtttgtacaaaaaagcaggctggtaccggtccggaattcccgggatcgcgcgtctcggctgcccctttgtacaccgcgccgcggaagggggctccgagggggcgcagcctcaaaccctgcctttcctttacttttactttttttttttttcctttggaagagagaagaacagagtgttcgattctgccctatttatgtttctactcgggaacaaacgttggttgtgtgtgtgtgtgttttcttgtgttggttttttaaagaaatgggaagaagaaaaaaaaattctccgcccctttcctcgatctcgctccccccttcggttctttcgaccggtcccccctcccttttttgttctgttttgttttgttttgctacgagtccacattcctgtttgtaatccttggttcgcccggttttctgttttcagtaaagtctcgttacgccaaaaaaaaaaaaaaaaa

SEQ ID NO: 3852 - DNA, 785 bp, Homo sapiens; identical to SEQ ID NO: 3851

SEQ ID NO: 3853 - DNA, 787 bp, Homo sapiens
tttttttttttttttttttttttttatgttttaaaaaatacatcatgatccagtgggatttattccatgaactcaatattggtttagcacttgaaaatcagttaatattagtcaacacattaacattaaaaaggaagtaaaccatgtgataatatcagtagatgcagaaaatcttttaaaaatttaaccccttgtcattcttaaaacaaaacatatcttaacaaattagaaaaagtggattcccttatttatttaaaactatatctataagagacatacatagttaatattccaccttgaaagaaataaaaatgtttaaccccaaaatatatttatttgaaatattttcagatggctgccagagaaccagcaaaataagtagtcctgcaatgctttcgtttgtgggaaaaatttgcatctgtagaaaatctgcattgattcatacaggccttctcttgtctggatctaggaaggattaacagagtctgaacccttacaagttttctctctcctataacctgttttggcatgatgcacttttttgtgtaacctcaagatggtatataacctcctgcacctcactgaggggctgagcaatcatacattttctatgtgttttctcctattaatctgcctctgtgagtcgattttagagcaaactttcagagtgcgcagagaaagattcccttggcccctgaaaatctggtgctgtgagcaggaacccaaagttggctctcttggaaccccagtgaggaaacaggagctgtcagcgctaggataagatctt

SEQ ID NO: 3854 - DNA, 687 bp, Homo sapiens
aggacagggtctggctgctctttggccttggatggaaagtggggaattgggtggggggctgcggaccccttaacgtggattacttggtgtgtatcagctgggctcagaagacccacgacctcttctccatccgtggattgatttgttctgcttaacagctgggtcgccaagctggaggtatttttccctctccaccctggtcttctcctgtaacgtgtggctgccttttccagcacggcctcctgccttcctggtgcactttttggagaacgtggtggaatcagaggtttctggctgactcggtgggtgctttgaaccaggaaaggacaagaaagaggatgggaaggactgatccacattcccaccaggaagtttagcagaacccccgcgtgccacctggaccccttggaaggacctggctcaggctggaccacctcttgagaggcaggagctctggatttgatcaagaattctttgctgagcatggtgcctcatgcctataatcccaacactttgggaggccagtgtgggaggatctcttgagcccaggagttcaagactagcctgggcaacacagagagaccccatctctaaaaataaataataataataaaataaaaaattagcagggcatggtggcatgtgcctgtagtccagctacccaggaggctgaggcaagaggatgtt

SEQ ID NO: 3855 - DNA, 756 bp, Homo sapiens
acagcctggaaacatcgcgaggagggaccccagaggtgaagcacttctgccccaacgggccccatcatcctggtggggaataagaaggacctgaggcagacgagcacaccaggagagagctggccaagatgaagcaggagcccgttcggtctgaggaaggccgggacatggcgaaccggatcagtgcctttggctaccttgagtgctcagccaagaccaaggagggagtgcgggaggtgtttgagatggccactcgggctggcctccaggtccgcaagaacaagcgtcggaggggctgtcccattctctgagatccccaaggcctttcctacatgccccctcccttcacaggggtacagaaattatccccctacaaccccagcctcctgagggctccatgctgaaggctcccattttcagttccctcctgcccaggactgcattgttttctagccccgaggtggtggcacgggccctccctcccagcgctctgggagccacgcctatgccctgcccttcctcagggcccctggggatcttgccccctttgaccttccccaaaggatggtcacacaccagcactttatacacttctggctcacaggaaagtgtctgcagtaggggacccagagtcccaggcccctggagttgttttcggcaggggccttgtctctcactgcatttggtcaggggggcatgaataaaggctacaggctccaaaaaaaaaaaaaaaaaaaaaaaaaaaaaaaaaaaaaa

SEQ ID NO: 3856 - DNA, 756 bp, Homo sapiens; identical to SEQ ID NO: 3855

SEQ ID NO: 3857 - DNA, 673 bp, Homo sapiens
tttttttttttttttggttgagcacaggtactttattgatggtacatgacaaggtgcggctccctaggcccctcccctcttcaaggggtctacatggcaactgtgaggaggggagattcagtgtggtgggggactgagtgtggcagggactccccagcagtgagggtctctctcttcctcttgtgctcttgctggggctggtggtccaggggtcttactccttggaggccatgtgggccatgaggtccaccaccctgttgctgtagccaaattcgttgtcataccaggaaatgagcttgacaaagtggtcgttgagggcaatgccagccccagcgtcaaaggtggaggagtgggtgtcgctgttgaagtcagaggagaccacctggtgctcagtgtagcccaggatgcccttgagggggccctccgacgcctgcttcacacacttcttgatgtcaatcatatttggcaggtatgactagacggcaggtcaggtccaacactgacaccgtaggcagatggggacacggaaggccatgccagtgagacttcccgtacagctcaaggaatgccctttgcccacaggctaggcagcagccaagtagaggcgggatgatgtactggagagccccggggacatcacgccacagatacccggagggggccatccaaaggt

SEQ ID NO: 3858 - DNA, 788 bp, Homo sapiens
tttttttttttatatgcttttgttctcttgaggctttgactgtggtgtgtattgtgtatagttgattggcttcatttctgagtgttttcagagggccaaggctctgtatgggttattgagttgtgactagattcctgtactgggtttcatagtcaatgtatgctaaaggaatttttgattggtggtataattcaggctgcattccagtagatggagcttaagagtaagggccagcaaataggctgtcactcagctatgtgcctcttttatatttcagggcattcacagcagtgctttgtggagggagagatgtcgggcgtgagagacgaccccaagtttgctcctaggccttggaggagcaccctctaatcattggcatcatgcctgcatttccttagccccaaaagggcccctgggaggctacactcccacctcccttgggtggccagagtcaatggttaggttgtcaggagacccacagctcccctgagatccactggtcctctgtgtttgacatagtcagagtgagttatggagtatgtctgcggatggtctgtagatgcagtgggtcaagattggaggatcctcagggcagtgttcgtcatgggtgcacagctggtgcagcacccatgactcatgactggggggttttgctccagcagaaaactgtggggactacccagcttggtgctcccctgactgaattctcttcgggtgtctgccccgtagcaggccaacagctagtttgtcaagcctctgtgccagatgctgggtgttcggtctggcta

SEQ ID NO: 3859 - DNA, 725 bp, Homo sapiens
ttttttttttgtatgctttgtttttagggagtttctcaacttgtcgaagtctgcgttgcagacagagatgaaatgatttttttttcccacacagaccaagcatgcagaaatgggaatgatttaagtttgtctttaatttaatttctatatctttcttttcctttccttgggaaatagaggaaatacttgggggcattttcaccaaattgtaacttgtaacttcacaagagcccgtcagcaggaatttctatgcgtgttttaatgcctggttgggggagacatgaaatgacaacagacagttgccctcaaggatcctttgttctgtttggggaatcaaaactgtgttcctccctgtaacaccaaatactagagccccaggggcaggtcccatcatgaatgcccagtagtcagtgccaaaaaaacccaagtcagggaagactatgagacctgcctctggggctctagtaaattcagatgagagaaaacgaaggtgggtggtgtttccaggcacacaggtgtgagaaggactagggagcacttaggtccaacttgaacattatttggaggagtgcagagagattgtattggacaggttggttaaccagattcagtggtggtgagagtttgactatcaaggccaagagtttgaatttgataccatacaggaataaggaagtggcccgggcgcgtggctcacgccttgtatcccagcacttgggaggccg

SEQ ID NO: 3860 - DNA, 766 bp, Homo sapiens
ttttttttttttttttctgagacagagtcttgctctgtcacccaggctggagtgcagtggtgtgatctcagctcaccacaaccttcacatcctgggttcaagcgattcttgtgcctcagcctcccaagcagctgggaccacaggtgtgcatcagcatgcttggctaatttttgtgtgtttagtagagacagggtttcgccatgctggccacactggtcttgaactcctagcctcaagtgtctagtttaactttgaaacaaaaacaataacagccctttcccaaaacaaacccccttcctgcctggggactagactgcctttgtgggactaacaaaatagccacaagattagatattatggtttaggagtcatgcagctggaggctacaagattttgaccctccccaaatttctcctggagataatatcattattataaaacctaagatcagtgctcaagatattttgtagaccctgcacttgatagatcagctggcaccacccagatggataaattggctcatctgatcttgtggccaccacccaggaactgactcagcacaagaggacagcactgtctccctgtgatttcatctttgacccgagcaatcagcactcccaaactcactggcccctacccacaaaattatccttaaatactccaatccctgaattctcagcggaggactgatctgagtgataataaaccccaggtcttcggtagagctggctctgtgtggattaactctttctctattgcattcctg

SEQ ID NO: 3861 - DNA, 731 bp, Homo sapiens
tttttttttttttttttttttttttttcctttcattaacttcttctcttatttagtaaaattctttcagaaaaggccagtctgtctcatattctaaggagggcctgggttttaaaggcagaggaacataacccaagagaagtgtaggcatatgatggcaagaatcaaagcagaagagccccaaggagaaaggaaacagaattgggagttctgtagcttctctagtcatagagatggttcttccatagatctcctgtgcaaaaaaaccatgaaatccctaaaggtcttggtttcgggcagtatgtgttttcggatcccatagttccctcattgccctcacaggggagctagctcagccatttggctgcttccacaagaaggttccttctctagtaacattacctttaggtagtagaaaagggactaagtcataatggggacagaaatgagcctctgggtggttaacctaactgaccctactatttctcttttttaactactgtagatttgaataagaaatggttggccaggcacagtggcacacacctgtaatcccagcactttgggaggcaaaggcggatcacctgaggtcaggagttcaagaccagcctggccaacatagtgaaacgccatctctactaaaaatacaaaaaattaactgggcgtggtggcacacgcctgtaattccagctactctggaggctgagcggagaatggttaaacctgggagcg

SEQ ID NO: 3862 - DNA, 683 bp, Homo sapiens
tttttttttttttttttttttttttttttttttttttttttcctggttattcaaaggttgagcacattttcatatgtttggcagtcacatatgttatcttttaaattgggttccctttttattgatttcttgatcactgcttgaagattaaattataaatatctctcaagtttttgatttaccttttgatttcatggtatatttttatttataagccaaagttctcagttttaatgagttcaattttaacaatattttccatatgatttttgtcctttgtatccacaatggaattgtaatctagaatggcatatccagaaaatacaaggccaaaaaagagccatttattcttaataaaatctcattatcattcactagtgacagaacttcattaaagagttttaaaagatctacttcagaaataaggccgataggtctgtaaaaacagtgcaccaagagcctatggaccacctagataaggcaaattataagtgagttttcaacaattctgacaacaatccatatatagtatatctgtgggaaaatatgataaatctggatatgcaaattgagaggtagacccatcttaattaaaacgtttccacgtcattacgttgtcaagacatgagcaccaacgaatcttgacatatttaatacttccctatttttaaacagcgaaaagt

SEQ ID NO: 3863 - DNA, 735 bp, Homo sapiens
tttttttttttttttaaaggttacaggttatagctttaactccttctgagacagcatccatttctcaagaggcctgagcaggaagctccgggagaaccaagcatgcggagctgctcagggacgtccactgggaagcctggtgtccactcccacctgcttgggccctgcaactggggtccctggagctggccaggctgtggggcgccagagagcacagcaccctagtgaccagcatggagcttctggaccgggtgagctgtcttgagcctcaaccacccaggtcaggaggtctgggaggccacatgcctccggccctccctacccggacaagttcagggcaaagtctcagccggggggtggccccgcaggacgtcgaggtccagcatcacggaacccagcagcccacggcggaaagtctgcaggaagtcacgggctgccgcaggatagttaggctgaataacgttcacgttacccgtgcccgtgagcaccttcaccttctgcgtcttccccagcttcacagccacactcttcagcacgcgctctacgttgtcacaggcactgcccaggccgtagtgctgcacgtacccaaagcgctggtgttgttgagggtgtacagcaggtagtcagccatggtctcctccccgaccaggtggtccagcaccgttccccacagggccagcttcaggcctgtctccacactttcaatccgaggagccagcacgccaggagtgtcca

SEQ ID NO: 3864 - DNA, 735 bp, Homo sapiens; identical to SEQ ID NO: 3863

SEQ ID NO: 3865 - DNA, 96 bp, Homo sapiens
ccttagctgagtgtccccggggcccgaagcgtttactttgtaaaaattagagtgttcaaagcaggcccgagccgcctggataccgcagtctaggaa

SEQ ID NO: 3866 - DNA, 719 bp, Homo sapiens
tattttgctgtctctagtcagcttctgtagtcaatgttgaagagtcttaccattgaggaatgtgtcctgcgcactgttctctttctagatactctcttgaaatgatctcatccaacctcaggctttcaaatgccatctacatgctgttaactttcaagaattgacttgcctaactaatggcttacctgatgtttttcagttggagattcttcttttcttcttcttttttgtcgagacagagtctcagctgtgtcatccaggctggaaagcagtagcataatcttggctcactgcaacccccacctcccaggatcaagcaattctcctgcttcagccacccgaggagctgggattacagatgtgtgccacacactcagctaatttttgtattgtttagtagagatggggtttcaccatgttggccaggctggtctcgaactcctgacctcaaacaatctgcctgcctcagcctcccaaagtgctggaatcacaggcatgagtcatcatgcctggccttcagctgaatttctagcaggcatgtaaaacctaatatgcctaaaagtactttgattagattcccccaagctctccttttccatattccctttcgatcacaataaatgatgccacttctacctattactgaaatcttttcccctcggtcaacatatttatcatctcatcatatctgagtctgctatctcctgttcagtgtaact

SEQ ID NO: 3867 - DNA, 740 bp, Homo sapiens
cccccaagggacctccatgacgtcaagggtggagtattacggaaactgccccactggcagtacatcaagtgtatcatatgccaagtacgccccctatgacgtcaatgacggtaaatggcccgcctggcattatgcccagtacatgaccttagggaactttcctacttggcagtacatctacgtattagtcatcgctattaccatggtgatgcggttttggcagtacatcaatgggcgtggatagcggtttgactcacggggatttccaagtctccaccccattgacgtcaatgggagtttgttttggcaccaaaatcaacgggactttccaaaatgtcgtaacaactccgccccattgacgcaaatgggcggtaggcgtgtacggtgggaggtctatataagcagagctcgtttagtgaaccgtcagatcgcctggagacgccatccacgctgttttgacctccatagaagacaccgggaccgatccagcctccggactctagcctaggccgcgggacggataacaatttcacacaggaaacagctatgaccattaggcctatttaggtgacactatagaacaagtttgtacaaaaaagcaggctggtaccggtccggaattcccgggatgaaagaaagaagaggaagaggaagcgagaagaaggagaaggatgacagctcctggaggaggcagaggcagaagcagcagaggaagctgcagaagcagcagcagaagacgc

SEQ ID NO: 3868 - DNA, 785 bp, Homo sapiens
ttttttttttaacaccttccttggagctgcctgaagaaaattgcaggaattttttaggcacatctactggaaagtgcttattttaatatttgtcaacgtaattaccagaaaacattaaccctgaagtgtgtctctcaatacaaacttgataatcactaaatatttttaatataggcctttgaggaaaacatcgtaaatatcattagtcttatttttctctatgaattttatttactatgcattagttgtttagaattatcttttttctcctttgtttgatggtagtgagagaagaacactactttttggaagattataaatagtacattaagtgaaaggtcataaatactgtaaaacttcaataaagcactgggcaacaacatgaattcacatatgcattgaatggggaggaagagttaggaagtgaccctcaagaatttgggaccttctttgttcattttacagtcatatatgttcaatgtaagttccactgtccttgttttaatgctttcatgagatgatatagataattgaaatatatggtttttaactaaattcaagataacacaagtctccattttatgtaatttaatttttttagactccacctgtgatcttatgggcgcagctcgatggcagttggaggtgcaagtgattccccaataatgaatcacctttcatatgtctcaatgatgatgtgatagaaaagacagctgcagtagtgtgacttaaaaagaattactgactgcccttttccaaatattggccaatctctgaatcaataa

SEQ ID NO: 3869 - DNA, 710 bp, Homo sapiens
tatgcccagacgcccccatgacggcaagacggtaaaggcccgccggcataatgcccagacaggacttagggactttcctacttggcagtacatctacgtattagtcatcgctattaccatgtgatgcggttttggcagtacatcaatgggcgtggatagcggtttgactcacggggatttccaagtctccaccccattgacgtcaatgggagtttgttttggcaccaaaatcaacgggactttccaaaatgtcgtaacaactccgccccattgacgcaaatgggcggtaggcgtgtacggtgggaggtctatataagcagagctcgtttagtgaaccgtcagatcgcctggagacgccatccacgctgttttgacctccatagaagacaccgggaccgatccagcctccggactctagcctaggccgcgggacggataacaatttcacacaggaaacagctatgaccattaggcctatttaggtgacactatagaacaagtttgtacaaaaaagcaggctggtaccggtccggaattcccgggatgtttctccatgttggtcaggctggtctcgaactcctcacctcacgtgatccgcctgccttggcctcccagagtgctgggattacaggtatgagccaccgcgcctggccagtccagtggttttcaaaccaggtgatacatctgtggaacataaaaaaaaaaaaaaa

SEQ ID NO: 3870 - DNA, 733 bp, Homo sapiens
ttttttttttttttttattttatcataaagtttaattatgattcagaaaaaatcgagcgaataactttctctgaaaaaatatattgactctgtatagaccacagttattgggggagaagggctggtaggttaaattatcctattttttattctgaaaatgatattaatagaaagtcccgtttccagtctgattataaagatacatatgcccaaaatggctgagaataaatacaacaggaaatgcaaaagctgtaaagctaagggcatgcaagagaaaatctcagaatacccaaagtggcaacaaggaacgtttggctggaatttgaagttatttcagtcatctttgtctttggctccatgtttcaggatgcgtgtgaactcgatgtaattgaaattcccctttttatcaataggtgcttctctgtacagctcatccacttcctcatctgtaaaccgatcccccatggttgtcagcagctctctcaagtaatcttcctgtaatggtgcccagttgcttcttcatcaaagcaagcaaaggcatttctgatgacatcttcaggatctgtgccatttaacttctcaccaaacatggtgaggaacatggttgaaattgatggggcctgagcctcattcatcatggcatcctagatactcatcagttggattcttccccatgaagcagcatttatgcaatcttcttgtcgatgaaccactctgtctgatcatctgttga

SEQ ID NO: 3871 - DNA, 733 bp, Homo sapiens; identical to SEQ ID NO: 3870

SEQ ID NO: 3872 - DNA, 695 bp, Homo sapiens
tttttttttttttttctttttttttgagacgaagtcttattctcttgcccaggctggagtgcagtggcttgatctcggctccttccaacctcagcctcccgggttcaagcgactctcccgactcagcctcccaagtagctgggattacaggcgagcgccaccatgctggggtaatttttgtatttttagtagagacagggtttcaccatgttggccaggctggcctggaactcctgacctcgggtgatcttggcctcccaaagtgctgggattacaggcgtgagccaccgtgcctggcctataacagttaacttttaaaagatataagtaggaatatactctaaaataacaatcaatagtatactataataaatacataaaccagtaacatagtcatgtattattattatcaactattatatactgcacattaattgtatgtgctatactcttatataactggcagttcagtaagtttgtttataccagcatgaccacaaacaggtgattaatgcattgttacaatgttatgcagactgtcgcaatgtcattaagcaacaggaatttttcagctccattatgatctcagctcactgctgcctcaacctcttaaactcaggcaaccctctacctcagctgcctgagtacctgggactacagcatatgcccctatgtctgcctaatataactatctg

SEQ ID NO: 3873 - DNA, 751 bp, Homo sapiens
  misc_feature (118)..(119): n is a, c, g, or t
tacgatagtcctcggataagcatggggaacgttggccagaaaacaaagggtggaaacggtttgactcacgggggatttccaagtctccaccccatggacgtcaatggggagtttgttnntggcaccaaaatcaacgggactttccaaaaagtcgtgaacaactccgccccattgacgcaaatgggcggtaggcgtgtacggtgggaggtctatataagcagagctcgtttagtgaaccgtcagatcgcctggaggacgccaacacacgctgttttgacctccatagaagacaccggggccgatccagcctccggactctagcctaggccgcgggacggataacaatgttcacacagggaacagctatgaccattaggcctatttaggtgacactataggacaagtttgtacaaaaaagcaggctggtaccggtccgggattcccgggatcgcgagcggccaaacagttacaccttgttttcaaagtgtggctgagtgcctcgattttttcatgtttttggtgtatttctgaattgtagaagtgtccaaacaggttgtgtgctggagttccttcaagacaaaaacacaacccaggttggtcaaggccattacctgtttcccatctgtagttattcgatgaagtcatgtacatgaccgttttgtagcaataaatgtgccatttttataaaaaaaaaaaaaaaaaaaaaaaaaaaaaaaaaaaaaaaaaaaaaaaaaaaaaaaaaaaaaaaaaa

SEQ ID NO: 3874 - DNA, 779 bp, Homo sapiens
tttttttttttttttttttttttttttttttttttttttttttgtttttttttaatttcactcttaatggaattttatttcagcccagtacagaatttcaggatctttcagccctttgaggagcctattgcattgctttctggcatctgttggtgcccaaagtcttttcattcttaaattcctttgcagacaagcttttaagattttgtttagggaactcatgcttgacaatttcactgtactatatctagatgtgagttgatttttactgagtttgtctaaaatctaagattcataatctcccttaatttttccaaattccaagacatctctctgaaagttgcgttctatctattctgataaatgtcattttagatatacgtcttttagatataatgtctcttaacttttctttcatgtttttgtcagcttttctacttgtgccagaacaagaacctgggcattatcctagatttatcttttcctttatccttgacatccaactggccaacaaattctatcacatttccattcacaccaccctgctcaggctctcaggaattctcacgtggcttcctgaaatagtctccctccctgtattttcaatacattcaacccttcatgcccaaaactttaatgttaccatgttaaatcccatctacttccaaagtttcctatgcttccctgtagagttcagtaaaataaatcgtttaggatttggcacagaaaagtctgtgataactacatacatgaaatactgcccttaagcttaattccga

SEQ ID NO: 3875 - DNA, 731 bp, Homo sapiens
  misc_feature (687)..(687): n is a, c, g, or t
tttttttttttttttcacttggcgaaagattatttattgcacaatttatcagtgggtactaagaataacacagatcctattattctcaacctctaaattcagtacatagtaaaattcattttctcaaactaaggttctatacataatcggagtaaaccctctgttactgagttaggatagggaaaacaaattccttagagttcatgaaaccacttcacaaatcctagaaggcacacattatatttcctatcatagtaagtacatttaagtacttcatatttaaaaaagacaaagctgtacagaatacaaaaagtgtacatttcatccattaaacaaatttacaacttttacgattagttattacagtagaactgacctaacattcacatctaaataattatcacccagttcaatagagcgaacaaagagctgtgctcatttatttatttgataaggctaataacattttatattcacagtagatcagtaagtgtcttggagctcatattgtaaaataaaaaggtttgggccctattgagtcactgggctcattgttaaataactccttgaaaggtgaaggattctgggggataaaatcattggctatccctggaaagatccaaaactctgtaaggtaactctgttcacttttcagaaaccatttacaaattagggtagtctgaattnaactcggcagtctatctacaaggacacttcaaatctagagctgg

SEQ ID NO: 3876 - DNA, 712 bp, Homo sapiens
tttttttttttttttgagatggaatctcaatctgtcgcccaggctggagtgcagtggcacactctcggttcactgcaacctccacctacaggcccctttttacctgtactcttaaaaataaggcaaacaattgaagattctgaaggcaaattatgtattactgaatttgaaggctcaggaacctctaaatcaattaaaccgactacgtatttttgcggattttccaggaaaataactcatgtgtttaaataaaaaacaggggccatttagtagccaatatacaaatggccatgatggaaagacccctgggccatgagttgctgggctcatcctcctctgggtatcttgtctgagctatcccttccctgggctgaagtaggtaggctccctgagaatggagctcaagaacccagtggccaagcccactatcgagaatgctactaagtgcattaatgcattagagatctgaaatgtctggcagaaatgctgacagtaactcggcaattagacagagggagggggaggaagaggttttggttggtggtggttgaaacagctacaggtcgaggcttacacaagtagcctctggttttcagtgccctgttcctcagagacagaggcaattaatgccatttcattttcttccttccttcctttttgtttttttttttgacacccaggctggagtgcaaggtgcgaactcgggtcattg

SEQ ID NO: 3877 - DNA, 721 bp, Homo sapiens
ttttttttttttttttgttttttgtttttttttacactgagtatttgatacatgcttaaagtgggacacaccacgacctaacaatatccctttgaactaggagcagtgattctcaaatttgtctgtgtattagaatcacctgtagaccttgtaaaaattccaacaccccaggccacgttctagaccatttaaatcagattttgagatggcaatgctagagtgtgatcccaacgtgccagaccagtctgagaaccgctgaattaaaagcaagtaacaccaattagctcaaatgtcctaaattgcaacacactgtactctacatgaccatgcccaagccaagactttagaaatctataaagtatttcaatttatccttaaagagttgatcaaaatgtaagaatttcacttctgtcaatttagagcttaccactttgcacatcatgtacagcaaggtttatgttccatgacaaagtgtagggaaacaaatagtcctaagtctgtttttgaaatggtgactcctaaagttctacctgtgttgaaatcaatctcagtaaagtaggctgtgtccagatttctcttccttaatggatatcagatctagacaatttctgagatttttaaaatgtttcacaggttgcacctatacgtgttccaaatataatttggaatcttcatatcgtggttctgctgcattgattcgatgtacaattaatgggttcac

SEQ ID NO: 3878 - DNA, 736 bp, Homo sapiens
ttttttttttttttttttggtgactgacacagtttctattttatccagatcagggcacactgtccactggaccacatccagcccattttgttgcataaatgaagacttattagaactcagcctcccccatcaccacgtactgcgtctggctgctttggggctaggaccacccgctgaatagtagggagagaccatacacctgcaaagcctgaaatagctgcgtccggccctttgtagcaaaggtgtgcgggctccggaggcctgctgggaaggtgcggacgtcacctcttccagagaggcattctttggtgttcacattccaggttacttgtttaaaatacaaatgctcattctcacagggtaagaataaccagcagtaggttttccgtcctataaaaagggaggaggtggggaggccgtgggagaggagagaaaatgaggccacctctgttgctcgtttgccatgacggggagagttgagagtggtcacccacagtctccccaaaacaccctgggaggagacacggccatccccagcagaagcccggcgcctgctcgcctgcagctccagctcctcacgccccagcccacaggcctcggcacttacttcatgggtttgaacagcgcttgcccgtaattctggaaggtcatgatgagcttcagctgcgtgccccccgattcatggccacgctgggtgatcctctgggagctgaggttcgtgcaccagggctcggat

SEQ ID NO: 3879 - DNA, 764 bp, Homo sapiens
cttggcacaaccctggagcgccagtgtcaccttgcgtttgtgaaattatagatgggagacgcgctcaatccgttgaacagtcgtgctctgatcctggggtgccctgaggtccagagcagaacctgaactctgagtatcaggcaagcgcatcttacttcaaaaaatgggaagaacaatttaaaaatgcaacttggatatgtttttataagatattcccgctttctgttttctacacttatttagcattttaacattttcagaatacgtgaaaattagatttagtttcttttttaaatgtgaaatataagaaaattatgattacccgtaacacatttgtgattaaaagtacattttttaggaaaaaagtattgtttccagggaacaattttctattaagttggtgcagtaatgattgcgatttttgccattgaaagtaatgcttaggccgggtgcggtggctcatgcctttaatcccagcactttgggaggccaaggcaggcagatcacctgaggtcaggagttcgagaccagcccggccaacatggtgaaaccccatctctactaaaaatacaaaaattagccaggtgtggtggcaggcacctataatcccagctacctgggaggctgaggcaggagaattgcttgaacctgggaggcggaggttgcagttagccaagaccgagccattgcactccagcctgggcaacaagagtgaaactccatctttaaaaaaaaaaaaaaaaaaaaaaaaaaaaaaaaaaaaa

SEQ ID NO: 3880 - DNA, 720 bp, Homo sapiens
caagtgtatcatatgccaagtacgccccctattgacgtcaatgacggtaaatggcccgcctggcattatgcccagtacatgaccttatgggactttcctacttggcagtacatctacgtattagtcatcgctattaccatggtgatgcggttttggcagtacatcaatgggcgtggatagcggtttgactcacggggatttccaagtctccaccccattgacgtcaatgggagtttgttttggcaccaaaatcaacgggactttccaaaatgtcgtaacaactccgccccattgacgcaaatgggcggtaggcgtgtacggtgggaggtctatataagcagagctcgtttagtgaaccgtcagatcgcctggagacgccatccacgctgttttgacctccatagaagacaccgggaccgatccagcctccggactctagcctaggccgcgggacggataacaatttcacacaggaaacagctatgaccattaggcctatttaggtgacactatagaacaagtttgtacaaaaaagcaggctggtaccggtccggaattcccgggatcccttcccccttttttgtcccccaacttgagatgtatgaaggcttttggtctccctgggagtgggtggaggcagccagggcttacctgtacactgacttgagaccagttgaataaaagtgcacaccttaaaaaaaaaaaaaaaaaaaaaaaaaa

SEQ ID NO: 3881 - DNA, 635 bp, Homo sapiens
ttttattgacccgtcatgtcgcctggatacgccatgccacgctgtgtgtgacctcgcatatgtatgacatcctgggtcctgatccagtcctccggactctagtctaggtccgcggttacggataacaatttcacacaggtaatcagctatgaccattaggcctatttaggtgacactatagtacaagtttgtacttaaaagcaggctggtaccggtccggaattcccggtattatgagtccactttaaatcctttaacgaggatccattggaggttcaagtctggtgccagcatccgcggtaattccagctccaatagcgtatattaaagttgctgcagttaataagctcgtagttggatcttgggagcgggcgggcggtccgccgcgaggcgagccaccgcccgtccccgccccttgcctctcggcgccccctcgatgctcttagctgagtgtcccgcggggcccgaagcgtttactttgaaaaaattagagtgttcaaagcaggcccgagccgcctggataccgcagctaggaataatggaataggaccgcggttctattttgtcggttttcggaactgaggccatgattaaaagggcggccgctcgcgcgcgagcggccgctcgcgggccgc

SEQ ID NO: 3882 - DNA, 583 bp, Homo sapiens
tctgattcgtgacttgagccgtgtcggaccaggacaaggagaatgtgctagaaccatggctcagggtgatggtctcagtgctgatttctatttttatgtcttcactttggaaataaaatcccagttttccaaaataggtgcttagttttccattgttgggcttcttggcaccaacaagctgaccgttgactacaattcctacaggaaagaaaaaaatgatgttctcttctgtgccatttattttgcatgtgtgggtactataattcaaatttataaaaacttggcaatattggcaaaattattataattttgcttcaagatttacattcaaccattttcttctttgtgattctcattttataacatgttaatataacatatataaattttaataaaatcttaatttaataattttatatcagcttcataaaatttacatttgtcagtcttatcaaaatcttacaatcaattgactatcatatagtatctacatttcaagtagaaagtctcgagacggagtcttactctgtcactcaggctggagcgcatggtgtgatcttggctcactgaaaactccaactcc

SEQ ID NO: 3883 - DNA, 583 bp, Homo sapiens; identical to SEQ ID NO: 3882

SEQ ID NO: 3884 - DNA, 575 bp, Homo sapiens
tttttttttttttttatttgtttttgctctgaatttttcttctgctgcttttctggactctgccagtgttttaaaatctgctttaaatgctctgaaatcaactttatttttcgtaatgtccttagagctggtcccatctcgcacaaatagtgagaattttttactttgttcccatattttgttgttgtaattttgcattttaatctggaaataatcatattggcattcagagaactgtggaataatgtccacttcaataacaaatctgtcagatagagtactatttggcagtaaaacttccacaaatcttggctctcgaatgcacttctttgcttgttggacttgatggtcttcaaaatacttgtttatcatcagattgaaatggttaatgagggcttccttggtatcattggtgactttgatgccaacaattttcccatggggtttgtctttgactccaaaatgaatagtgccattggtacgtgaattcatacaagctgaagcaaatcggaaaacctcattgctaaatttcatcttgacatcctcttctgtggctgttgctgtatttgtgaagg

SEQ ID NO: 3885 - DNA, 719 bp, Homo sapiens
ttttttttttttttttaactttagtcactatttaatgatcaactctactgtgctgtagatggaatactaggcctgggggagcttagaggaaaagacagtgggggatgggagttcaaataattataagcagtaataaagtaaattaacaaaaccataaaaattaaactccacagagtagcatttgaacttgatgagtttacggataggtaaaactatactgcttttaaaatgtgtgtggactccaaagtatcctcaccatcacaaagtgtattcggtgaacgatgttcagtccccaaatttggaagttagggcggcaacttctgcttgaaataagacaaaagtaaaaatccacctcagtgcaacgcagaagacacgaagagtcaggttttctacccaccccgtcctaacatcctctgagcgctttaacgctctcgctcaaggaggcgcgggctgctgcgatggagatgggcgtccggcgccggcacgtgccgtcggtctttccggccctggtgagggagctggcggactcgcgcgaacgttcgcgggagaacgccaggaagggcagatggttcctcgactctgagcccctccctgctgcgctcgccgggtcgaggccgctcgccgggctgaagccgtccgagcgtcgggcccgcgcctggcctcctgggtgtagtccggtcctgctctgcggggccgagccgccacgcgccgttggcagt

SEQ ID NO: 3886 - DNA, 711 bp, Homo sapiens
ttttttttttttttttttttttttttttttttttttcattcaatttcctttaatgagtacttgttacagtaaaagaggtataaagtcctgtcccaagtccaaaccactttttaacttaaatcttgagtttttctgaattactcaatttgaagtaattctctttatatctgaaaaatggttttattgaaacgtttgagattaaaaaatatgcattgcaagaagcatatgacaaacattctgagagtacaaaattagttgtaaaaaataacataatttaccagtaaacccactcatatagaaatgtgcaaagccttttgatataaaaagttttgtacaccaagcacctatttttataacttagcttcccatggagagataatggcttgcgtgcattttatgtatccataacatacatacaaggctcggtcttttcaatgggataacagttcacaactcttcgatttgaattgtaatgaatctggtgacaaggattttctctctaatggattccaaagttagccagaacttttaatgtcacagatgaacacagggtgtaaggtgttcatattttcttcaattcctttacccacaggaggctaactccacaatttccctcatgtttctcattcagaaacaacttttaatttgttgttccagaattatttgatgattgcttctttggtgctgatgtttccgtcccttgaagtcaaa

SEQ ID NO: 3887 - DNA, 155 bp, Homo sapiens
tttttttttttttttttttttttttttttttttttttttttttttttttttttttttttcaatttgagagcaggtactgtttattaaccaaccagcttaaaaaaataatcatggtagacaccttagttcattcttctaattaagccgtgtttgac

SEQ ID NO: 3888 - DNA, 706 bp, Homo sapiens
gtaattagtcatcggtatgaccatggtgatgcggttttggcagtacatcaatgggcgtggatagcggtttgactcacggggatttccaagtctccaccccattgacgtcaatgggagtttgttttggcaccaaaatcaacgggactttccaaaatgtcgtaacaactccgccccattgacgcaaatgggcggtaggcgtgtacggtgggaggtctatataagcagagctcgtttagtgaaccgtcagatcgcctggagacgccatccacgctgttttgacctccatagaagacaccgggaccgatccagcctccggactctagcctaggccgcgggacggataacaatttcacacaggaaacagctatgaccattaggcctatttaggtgacactatagaacaagtttgtacaaaaaagcaggctggtaccggtccggaattcccgggatctccagcactttgtgtttgtgctgcaaatgtcacaagattgacagcttctgctgtgggtgacaggagttacaggttctaagccagggacagcaggaccagatctgctatctcagaaagaatggtagtgtggttgctcacgcaagtaatcccagcactttgagaggccgaggcaggaggatcgcttgagcctaaaagagttcgagaccagcctgggcaacatggtgatgcctcgtctctacaaaaaaaaaaaaaaaa

SEQ ID NO: 3889 - DNA, 683 bp, Homo sapiens
ttttttttttttttttttttttttttttttttttgctctgttaatcccaaacctagttggtagatcatggaaaaagagatgaagtatttaaataaagagtagatccaggtattcagggtagtaaggaatgataatactcagaatttcaattaaggtcactggctctggggacaaacatttctatggtaaaaagtatggctctgccattaaccagctgagtagtctagtgattgttgctaaacctctgggagcctttattcacctgtagacaaaagctgatggtggcacctatgcaaaaatgtttaactagtgtagatgtgttgaaagggtcactctcataaactgctggtagtactgtggagtgattcaatcttcacgaaaatcaagttgtatcaaagattaaatatgcacgaccaccaaatcaatcatgtaccttcaacaatttattccagaggacataaatggacatgtgtacaaacatgcaagtaaaagattattcactcatgaatcttcattggcatgaaaaaaatcttaagtgtacattaaatcttatcttaaagttcattaactttctctgggatgcattttctgactacatttaaatacaagctattttcctttcttcccaggaaggtatgtggccccttcctgaggtgtgttctaaagtggtctccttaggtcct

SEQ ID NO: 3890 - DNA, 731 bp, Homo sapiens
tttttttttttttttgaggagctaatgcatgctctggtttattgaacaacagtccaactttacagcattaaataaggggcaaccgttcaggaggggaacgatggcttaaaaataaaaatgaagacagagccgggacagttcacatttccacgtgagtgaggaaaagcgaaggattgttagagacgtgaagagaacgctggcaatgctacagaatggagcccacggaggcgtgggctgccctgcgtccccggcctcggggcagaacagggagcaaccccaaagcctgccccactgtgtcccttccagctgcccttctgccgagaacacccggagctgagggttccaagttcacggcggaaccgcttcccttaaaaagaaagcaaaggttacgtggatttctcccgtgcttccttttccacagacttaaaccggctcaggacgtaaggataacattctgtgctgcttgcagccctgagaagtcagcagccgtgaaaggcaggtagttcctttgccctctgacaccccgagttcttggggtctcggcagaacactgcctggagctgagtggggtcatccctcctagacaccgtcctccccagcccagcttgtcttcacggaggcagagaacccgctgcacgtagaatccaagcaatatgctaagcctcctgaagtatttttccctccagttaaaaagcagttctacctgtggaaaacgtctttcggttccctga

SEQ ID NO: 3891 - DNA, 573 bp, Homo sapiens
ttttttttttttttttattctcccgtcgatggacagtccggctgtcttctggtcttctgctattgcaaacagtgctgtgtggctgttcctgcgcgtaaatcctaaagctctgcaaaatgcagtctgggcatcctcagcccgggcatcacctggaaacttgttagaaatgcagagtctggggccctgccctagccccgccagaactgaatctgcattttaacaagacccctgggggattcactggcttattcacgtttgagaagcactggccgagtgtacctctgcatgggtttctcttgggcatacacatcaggagtggaagtgctgggtcgcagtgggtggcccagatcaccctctcggccgcagcttcggagctgccactgagctagagcttccccagctcttggtattgtcccacgttctcattgttgccagtcgactgggcgtgcagtggcatctcatcatggtcttgacttacatttcccccatgactaccgaggtcaggccacctcctccgtatgtccactggccactactgttccccttctgtgccccgcctgtcccttgttaata

SEQ ID NO: 3892 - DNA, 704 bp, Homo sapiens
ttttttttttttttttttcttttttaaaaaatcatttaattacaagaaaattagccagaaaattacatagtttcaaacaaatattgtctataaaaacaagtgttcatttaccatctttttaaatttatcttttaaataatgtctcatctactgaacctagcctttcctggcaaacattagaatatacaagttttcttcatgtttaatatttcataaaacagaactggcttttgttcctgaagttagaatgatgcctatcattttgcttcagagaaactttaaaattgactatttcaattaaccactccccaaatccaatgcaaaaacaacaaaaaacactgctattttactaaaagattcctgtcttccatttcattttaccagagcaagtacaaattcggagaaaagcttcttaagtcctgcagtttcaaattccttttgtaattcatccaacgctgaatactctttgacttcaaatgccagaaaccttgaggttgtttctgtctccctgtagtaaaatcagtattattttacccatgaacatcagtcttcctgtcagccttaaatctgaagcccacttctccacaattttgacatatttagtctttgctctcatgtgatctaaatgcaaacagagttatccacaatccatcatccatggtcgtgcttgttgaaaaagtacactttccactggccactgccag

SEQ ID NO: 3893 - DNA, 704 bp, Homo sapiens; identical to SEQ ID NO: 3892

SEQ ID NO: 3894 - DNA, 689 bp, Homo sapiens
tttttttttttttttttttttttttggagacagagtcttgctctgttgccctggctggagggcagtggcataatctctggtcaatgcaacctccacctcctgggttgaagtgcttctcctgcctcagcctcctaagtagcttggactacaggtgcgtgccaccatgcctggctaattttttttgtatttttagtagagacagggtttcaccatgtttgtcaggctggtcacgaactcctgacctcaggtgatccacccgcctcagcctcccaaagtgctgggattacaggcgtgaaccactgcacccagcccgtaaggggtgctagctttggtctgggaaacagtgaaatgaaaaccacaagtcacaaaccacaaccaggcaaagttctgtggggccctccgatgcatccagagcacactgtgggtttgttatagtgaaacctgaaaggtcccatggagatgttgatcttcacagtcccaaagattctgttatatccatgagggatgcctccctttccccatattcctggaattgagtcctctgtgccatccagatttcaggggcacagtacaaggcacagccctataactgacacatgatgtacatcatatatggaagcatgttctgatgtccatgagggtacaagatcgtctaaaaatttgtactgattgaatttcacaagtgtgga

SEQ ID NO: 3895 - DNA, 735 bp, Homo sapiens
  misc_feature (603)..(603): n is a, c, g, or t
  misc_feature (646)..(646): n is a, c, g, or t
ttttttttttttttttttttaacaaaggagctgcttaatcgctttctggagtgtatacccccgtccccatgttgcttttgagatgggtctctcttctgtttccattcgactcacaatctgtgtttagagtaaatcaagaatgaaaagaaaatttaccttcacaatgaaactgcaatttatttcttgagagctttgccggcttcacagactttcaatctgtttaaccacagcttcgtctcgctcctcggcataatacatctttccacctaagcacccagtatatagcaagcatttcgctcagcatcgagagggaatattcattttcaactgcagaacgtcagcttctaatggatttggaaccacagcagcatgaggattcaaaagtctctgcttaagttctgggctgagcagagagctcagttgaagattgagcacaacaggcttactgtgggccgcgaaggttgtggcagtgtgcacgatggccgtggtctacacgcttcccaacaagaggtgtgcagccatggtcggcatatctgaaaagtcagtccttggacggactaggggaggaaccaagacattatgtgtatgataaaagcaatgtgnttgcccaaacaaaagcactgtttcttcactctgacagtgtatntcttctcataatatacacgatgcatggtagagtgatgtcatactctgaaatcttctgactctccggcaatccagtggccctgaatggtc

SEQ ID NO: 3896 - DNA, 756 bp, Homo sapiens
tttttttttttttttttcctaatagacttttagtctcatatcctgtaagttcaattaactttcgaaggtgccataactatgtcttactgtgttttgtttaggggtgtgtgtgtgtcattttgtcatctagcttaagatgattacacaatagcctcacagactcttagaagacctatgtgaagaaaaataacttttgcctttcacaacattgagaatgtccaaggggatttgctcacagatgttcatatgtgaagtttaatctcagtaagtaactgccatgaagattcataaccaagcttatgtttcagcattgtcataaatcaaaaggaaaaaattctctctagtgtcaaattttccccagacttgttcaacaattcttaactggagcaatagaatcttgatactatattttctaggtaacgatacaaatatgcatccagtcagtagagaagtcgaaaagacaagcatatagatgataaatagttggaagttagctatagcatgcttccttttaacaagaatagtgcttaagtttaacacttatttctaaggtaacaaggtcataaaagactacagtaaaggacaaaattgctgaaacgttagcgtagtagaaaatttgcctaaatattttacttattattatcagttgtagatagtctctgtggtgtgaatcacattctccttacttagaggccatcaagtaacgtgtctttccaatggtgtacttatgttcccatgctttgttataccattcca

SEQ ID NO: 3897 - DNA, 763 bp, Homo sapiens
tttttttttttttttttttttttattttttaatttttattttttatttatttatttttttggagactgagtctctctctgtcacccaggccagagtgcagtggtgctatcttggctcactgcaacctctgcctccagggttcaagtgattctcctgcctcagcctctcaagtaactgggattacaggtgcctatcaccatgcctggctaaaattttttttttttttttttgtactttttagtagaggcagggttttgccacgttgcccaggctggtcttgaactcctgagctcaggcaaactgcccacctcagcctcccaaagtgctgggataacaggtgtgagccaccatgcccggcctgacctgttttagtgcaaaccaggctccagtcctttttcattttgtgaatgtggggaaattattcctcctcaatttgtctcagtcttcttatctataaaatggtatcgatgcaaaagattaaatgtgtgcggacaggatcagtggtagaacatgacctggcatagccttggagcaccatctgtccactgtggacttgaatgaacaggcacctaccaactgtgagacacctttgtgcagattgcttatacgaatagggagtgttcacctgcttgtgccacgaactgcatgttgggagtcctagcacggggcacagcacgtcagcttaccccttctgtcacgtggcggtcccttgttaccttttagcccaacaacaaagccaaaaatgatgtctattaatgactac

SEQ ID NO: 3898 - DNA, 755 bp, Homo sapiens
ttttttttttttttattgaaaagaggggctgagaggaaggaaggcatgaactgctatttcacaaattagcataattacatccactgtatatgctattatggaaattaaatttaagaaattatagctaaaacacctagcacggcgtctggcacctgttaagggatcaataagactcaggtgtcacagtttttattattattgctgttattatcattgtgattattatagagggggatctatgagttacaaggagattgctggtagttggataactgacccaaatcattccaaattctcatgttgtatttcatggaccatgtacagaaaatagaatgacagttccatttttgtgtgaaattgtaattagttaacgccatgccctcaaaagaaaccttgatttttatattattatccaaaatgaatttcattcccaaactcttgaatgtgaatatctttgacctgtaggagatgaaaatatgcctgtttggcataaggattattttgagctattttgagaaattgcagacacaggagaagctctgaaaacagagtaaaagttacccttttgtaagaaaaatgtatatctgtaaaggaaatctccatttgtaagtgtcttcctctctgtaccaggatgagaaggatgactaatcattagagactcagtggagaaagcaccaactttagatctgcataacaaacttgaacctttgcttactgtgtttctgggcgtttaccataatggcttccctcacctc

SEQ ID NO: 3899 - DNA, 725 bp, Homo sapiens
ttttttttttttttttttttttttttttttttttttttttttttttttttggtagagatggggtttcaccatgatggccaggctttgagtactttgagtactcttgaactcctgacctcaggtgatccgcctgcctcggcctcccaaagtgctaggattataggcgtgacccgctgcacctggtctccattaagatttttattgtttgacttatgtggtgcattttgaacagggagttgaggacaagccacattataagaaagtgacagcaaaacaattccttttgcccgacaaattctaacagtgctttcacaacagatgggactgtatactcttctacgcaccctagatggatgagctactaataccagagtaaattgaacacaactggtccttcaagagtctcataccaagactgtttccacaatcagtaaactcacattgcaagggagatttttattttatttaattttttctgagatggcgtttcattcttgttgctcagactggagtgcagtggtgccatcttggctcacttcaacctctgcctcctggttcaagcaattctcctgcctcaacctcccaagtagctgggattacaggcatgtaccatcatgcccagactaacttcggtatcttcacgtagagatgggggttctgccacgttggctcaggtggacttcaaacctccttgacttcaggtgatgcactgcctcaactcccaa

SEQ ID NO: 3900 - DNA, 668 bp, Homo sapiens
agaaggcctcctgcatctcgggaatcagctgggatgtcctgatcaccatgccgctgatggtgatgagctggtcaatgtcttctggattcaggtttctcatattcttagtcttcaatgcgttgaatggtcttacttgaatctgatgttctaagattgagtcagggtaacggtcaaagaagatttcattgacagccatgtcaaaagttggaataacttcctgtgggtaagagatgagttgtctgtacaaatttttgtcaaatgatttgatgtgttcacagttcacatttaaaaatggctcaccaataacattaatctccccaagtcgttgcatgtatagaggttcagtaatatctatgccaacattttcttcttctttagccagagggtcaataaaacgctgaagaaatctctgaaagttttctttgcatgctgccacatttacatctgttccccagatcacaagtttttggcctagagactgctcacttgccactatatcttctgctgctgccccgtcagactgcagatccacttgcaggcccttctgtgcagagcccaggtcaggcctctgtctcacaggtgtgccccctaacaccacttcttgtgggttccctctacccgagagctgggagtgccgtatgtcagtggtgaactagactcagagtcac

SEQ ID NO: 3901 - DNA, 735 bp, Homo sapiens
tatccacgtccacctccccgtgaagaccgcagttgtgagtttgctatttaaagacctttctgaacaggggcagtttcccagtgataagggagggttaacagctcagatccttgcacaccgctttattaagaacagaagggaagcctgcgggcttcggaaagttccagggtaatttggagttgagggtgcacagacacacacacagtgcgcagaaaggcaggagttgaaatgcctagaaacacacaaaaatgaactccgccagctgctcccgggaggcggagagagggcgccccgcgagctatttctgtgcttgacagaaaatgggagtaggcacttcctgaatccctgcctaaaattaactgctttacaaaaggggggaaggggaaacccatggtgaaacaagttttattttacaattcaaaatctggaggtggggatttgaatgcttcgttatgggttttggccccgctgataaaaatgtggctgaaaaaaagaagaaatgggggcttcactaggaaacctacccttcagaagtagccccacaaaaataaagccagcggtttgattagaaacgttcttctccccggcgcctgtagtcccagctactcgggaggctgaggcaggagaatagcgtgaacccgggaggcggagcttgcagtgagccgagattgcgccactgcaccccagcctgggcgacagagccagactccgtctcaaaaaaaaaaaaaaaaaaaa

SEQ ID NO: 3902 - DNA, 710 bp, Homo sapiens
tttttttttttttttgtttggaagaggcactcctgggccttttattaagacgggtgtcagctcggaaccagcagccctgcagaagtgcccaggattttctttgtttaaaagcaagtcttcagggtctgctgagggtgtacgggtggtgggtctgggtggttccttttgccgtggtcccgggagtggctgggtgggccacggtcaggtggaggccgggctgtccatggtagacagcaggtgaacgacctgcgcccgctcagctgggctgatgtgctggctcaggtatatcacacagtccacggccacctcggggttttcttcaaccaggcctcggatggtcttgaggacagagtcgtgcttcaggtacgtgatgttctcacggatggtggagcgcgggccatcccctgcctgccagtgctgttccagccactgcacaaccacctggttgttgtcccacaagtaggccttgacagccccctccgtctccacgaaccagcgacgcagcatggactggatatgcacgtgactcagctccccgctggcctgcaggatctcctgcttgacctggtcctccaggaggaggcggcgcagacgccaatacaggaaggtgcgtgcggtcttccactccaggatgtcagatatgacgcccttctccagcatccggccgggtgtgtcatggaaggtcggcgaactgcaccggccacctggtt

SEQ ID NO: 3903 - DNA, 658 bp, Homo sapiens
cttctttgatgaatgcatgctgagaaagggggtggggtggggaagggggatacagaaggagagagaaagagagagagagatagagggagaggaggagaaaaagagagagagaaagggagaaggggagagagagagacagagagagagcgctcatctacttctcttttataagggtgttaatcccatcatgaggattccaccctcagaatctaatcaaatttttattacatttcaaaggccctaccaccaaataggattacactggggtttggagtttcaagatataaatgtaggggttggggcacaaacatttggtccacagcagcctccacaaccccataagccaattcctatcagaatggttgtttttttctttaccagtcaattgttttttatgaaatcccctatgaggccattggatatggactgaagaagaggtggaaattcaggcaaaatagatctcatgagagtctgaaatatttgatcataaaactatttgtggtatcagaatctataacagcccaactgtagggctttatggatcggataatagctaattgtaatcatgttggagagctcagaccgtatggttactaggtaagatagcccatcaaatctctactgtgggtttcatagcaaagttgatgttaaaaaaaag

SEQ ID NO: 3904 - DNA, 692 bp, Homo sapiens
catccttctgcagaaaagagcatacctgtttccccctctcttgcccttttccctgagcatcacttggacccatagagttttatttattcaggcttataataatttatggcctttttgatgctcaaattgtctcaaacttgtccaagaggaattccttcaagctggcctctatgtccttctaaaactctttgagtgatttttaactttctggttcagtgaaatatttcaggctcactcccataatctctctgcctcatgtttgtaattagccagttatcaaaagaaccttgttttctctaagagagaaatggtatgtagacactaaatctgagcattaggtatgttcactgccactgaatgtcactgccttcagaccccttcaatggacagagccagaaaatttttccaaaactaatgagtttattttgagatttttactttcattataccaatggataacccaaaacaaagctggatttgcagctgtctgtgccttctgcactgtgcccattatgaggtctcttctctatgtctctattggccattagaacaatattgctatctgcaattttacctctgtcttttccagacatcttttctgacatctttggtttccgacaacatttccatgactattttccaaggctggcttttctgctgctctcttttgcccccccatttcctacgtaggc

SEQ ID NO: 3905 - DNA, 741 bp, Homo sapiens
tttttttttttattcattgttctttatcttctagagcaataatttgcaaaatgactatttattgaataaactaggacggaggtgaaaaggaaagaacagctcatccttccaaggggaagagagcagtatcccaaatccaaattgaagaaaataaacatatatctattcaccagaagagatagaagggagacggcagaatttctgtggttcttactatctctgtcacctctacaggccaaaccagtgaggaccttggagactactaatatcactggatttgtgaatgagttcatcctcttgggcttcccctgccgctgggagatccagatcctcctttttgtggtcttctctctcatctaccttctgaccctcctaggtaacacatccatcatctgtgctgtgtggtcaagccagaaactccacacacctatgtacatcctactggccaatttctccttcctggagatctgctgtgtcagttctgacgtgcccataatggcagccaatctcatctcccagacacagagcatctcctgtgctggctgcctgctccggttctacttcttctccatgtgtgctgcagagtgcttatttctgtcagtgatgtcttttgataggtttcctgccatttgtagacctttgcactatcccaccttaatgacccatcacgtctgtgctcatttgtgatcttctgctggtggtggctgtctctgggtattgaccctttgacctaattctcag

SEQ ID NO: 3906 - DNA, 796 bp, Homo sapiens
  misc_feature (673)..(673): n is a, c, g, or t
ttttttttttttttttattgaaaaatgtaagttttatttacagatcaggccacaggttacaaaattaaaaccaacagcagttttgaattatctgtaccagctagctgaactagccatatcagttcttctttccagtcattcagcattgtagtaagaaaacacttggtaaggcagatggagacatatttatagtctatagtctgtctgggaagctgactgccagacagggcagtttgtcatctttacctagctgacacatctttttccatggcttgctaccgataggcattgaagcctagcaactgttacttcccacgcatgctatcttccaggacttcctgagaaatgcttgcttacagttcaaattctgtttcactttatgtttgagatctcggtatatcttcggattaggttgaatttgcctgttgggtctggaatataccatttttcccaaacatcagtatatgaagcagtccttccccatggcttcaaatgtccattccaatggagtaacttggcagcctttacaaactgaggtgaatatcgttttccagcactggaaccaaggtggcggacattccacataggatcgatggtagagtgctgttgataaaatacgataagcagaggaggtgttgtgatgctaccagccagagttctgctatacagttcnctctgtctacattgagtttcactccattttcgcagcttggttagtaatattcctgtcgtctcccagtcccgtcaaggtttgcaaacaaagactcccaggattaatgagcagtgcctgcttcat

SEQ ID NO: 3907 - DNA, 647 bp, Homo sapiens
tttttttttttttttgttttgttttgttttttgagacagagtctcactctgtcaccagggtggagtgcaatggcgcgatctcggctcactgcaacctccacctaccgggttcaagcgattctcctgcctcagcctcctgagtagctgggactacaggcatgggccaccacacccagctaatttttgtatttttagtagagacagggtttctccatgttggccaggatggtcttgatctcctaagcttgtgatctgcctgcctcggcctcccaaagtgttgggattacaggcgtgagccactgcacccggcctctgccaggactttttaaactacaaattctccggtctctcctttgtgtgcatggttgtttttttttttttcttttggagaccgagtcttattccgtcacccaggctggagtgcagtggtgcaatctcggctcactgcaacttccgcctcccaggctcaagcaattctccggcctcagcctctggagtagctgggattacaggcatgtgccaccatgcccggctaatttttgtattttgtaaagactgggtttcaccaggttgcccaggctggtatcgaactcctgacctcaggtgatccgcctgccttggcctcccaaagtgctgggattacaggt

SEQ ID NO: 3908 - DNA, 727 bp, Homo sapiens
ttttttttttttttttttttttttttttttttttttttttttttttttttttttttaaggttggaattgcttttattgggggcggataccgcaaggccccgcccacggtcaggttagtgttctgcccttgcagaggcgccagcagcctgacacctccacctgccacccgcccggggttagtggaacatgcaaagctcagagggtggaggcaggggtggtcgctgctgagaccagggctgggtgcaacaggagggtcagcacagagcctggctggtgtccctgggcccaaagggggctggggctccatgggaagagaagacgggcaggcggcaccccagtgtggggctccacaagctggaggggcccctggacccaccaggaggacaggtctgcagttcccagccatgccggctggaacgtccgcctccccactgggtctgggtcctcggggcctggggttagaggccgacatggaaggcacttactaggggaacagaggctggaggctgacgccggaggccaggggtctcaggagtgagtgtgggggtgtgagctggaaagcacagatcagacagcactgtgggggctgggcccgagggcctcgtcttcccatggggcaaggggcttctctgggtagactgggagagaggctgactggggcccccgtccccagcaaggcccaccgtgcaggccagtgctagaaacacagtggcctctacagacaggc

SEQ ID NO: 3909 - DNA, 774 bp, Homo sapiens
tttttttttttttttaaaacttggatctgtattaatcattaagtctaggagagagataaagtagtaatgtttgtgggtaaagaataactcttagcaaataggaagacgatattctgtttgcaactctagttctttttttttttttttacttcaaatgttaaggctatgccttgactactacatttttctctgttttctatcttccaagacagtctgtaatatttatgaataaatctatggctgaaaattgtgcattcctcttcagaatggaagaggtctaatagattttaaactagccagtttaataagagacaaactggtatgctgaacactgaaaagcagcttcatacatgaatgaaatctttattgccaaaagataaaataatttgatgttaatattgtgaaatgctgaataaaaaactaaagaataacaatatattatttatttatcttttgtttgatttcattttggagagggcttaatgtgacccttgagtatgtacatcaagaaattacataaatgcaaatccaaggctctgaaatattctgtttgcattgttaacctctaattggttatgccattaaattagttgtaaagcattatagtacatgactggtcacgccatactgtatatagttgagtcctcctctaaatttatattgttatatattgcatagtcaactttagccatttattaaaggttatgtaactcttatgattgatgactgtatgacttccgggtgtatttatatccccatggctatcaaattttt

SEQ ID NO: 3910 - DNA, 704 bp, Homo sapiens
ttttttttttttttttttttgtgttaagaaccaaaggaattgcttgagtagttgagcactacggacctctttgagctaatatgaatgttacctgattcttgattcttctttgtcaagaccgcaggatggcaatcccaccatgacaggaggaaaagtaattcccattttatgttacccaacatcagggattgtgaataacagggccccctgttctcccaggagcacagtttgttattccatcttcttggtgtacatccttccaggcagacacctcccacagcattctcatagactgacttggaaaatgaaaagccatccaagattgcatttaaaaagcccatcacatggcatttattttttttaattagtaaaagagtttaagagttcaatagaaaaaaaaaaagagttaaattattttgctgcattaaacagaaaaaaaaaagatctacactagatgaactaccttgtatttcagaatgggaaattcgttggcacgagtcatcaattttgctctatctgagatttccctgtgtactttcctaagggtctgaatttggaaatccaaatacatctggggactaaattatttcagaaattaccctgaataccagattagtgagattatctaaaaataacacggtaatgtaatgcagaaggtaactaatgacctgtaaatgcaggttcctctaaaatctccctttagg

SEQ ID NO: 3911 - DNA, 720 bp, Homo sapiens
tttttttttttttttttttttaagttccttagaatattatttttcctactgaaagttaccacatgcgtcgttgtttatacagtaataggaacaagaaaaaagtcacctaagctcaccctcatcaattgtggagttcctttatatcccatcttctctccaaacacatacgcagcagtgttacagctcttttagaatttgtctagtaggctttctggctttttaccggaaagcccctcttatgatgtttgttgccaatgatagattgttttcactgtgcaaaaattatgggtagttttggtggtcttgatgcagttgtaagcttggggtatgaaggtttgggccacgcctgggcgcttccggctgcgccggatgctgtttcctttccgctcccaggggcgttgggaacggttgtaggacgtggctctttattcgtgagttttccatttacctccgctgaacctagagcttcagacgccctatggcgtccgcctcgacccaaccggcggccttgagcgctgagcaagcaaagggtgagaatcgtcctagtcaaggcatgggctgctggcctggggtagtcaaggcatgggctgctggtctggggaggatgcgggcggaggatgtggggcgacaaacctggctacgtcccgccgggaaaatgcggtagggacgccggtaccgtccttctaagtgggcgcttgccccaagactgggatctttggg

SEQ ID NO: 3912 - DNA, 679 bp, Homo sapiens
tttttttttttttttaccaatatgtagagctggactccaagctccatgaaagtagtgtccctacctgtttgatttaccattttatccttggtgtccagcaaaatgcctgctatatagtagccattcagtgtaactttcttcaaggaaataatagacatgaattcaactcctgcctacattattaactggagaacctgtacaccttgtttcttatttctgtaagaagactaaataaaatagtttttaagatttgtttcagttctaaaatcctgattttagagtgcctgtgttctatacccagcaagccaacatcccagatttctgcatctatcctgtgatttgggattagtaaatgtatccactggtaacttagaaagtgaaacgttttgatgtggcttctgatatatcatttttcctctaggctaccagtgtcctcttctctaaagtgagggattttgactgcagcgcccctacagcccctcatagcttaaaaattctgcattccattgtaggggaggctaaaaatcgcactaccttagttcttatgtgagatctttggctgtgtctaggaactagattgatgcaacacagactgaccagagaaaagcatacaggctttatcaatttcacatgtacatggggatctttacaagagagcaacatctgaaggaatagccaa

SEQ ID NO: 3913 - DNA, 692 bp, Homo sapiens
cccaaggtcccgggccgcactcaccgaagtccaggaactgcttcatggagagcggggacggcgagaagcgcgcgtagaagtccacctggcccggaacgccgcgctcggacgccgggctggagcccgagtccgagctgaagctgcggctgaagccggcggcgcgcagccccgggcccgggccggccaaggcggctccgcgaagcagccgcgccagcctcatgccgagtcccgctagagaagccacagccagtacgccaggtttccccgcgcctctgccgagtgtcattctccagctgggattgagaacaaggggaagctggccatagagccaggtgaccaaagatggaagacaaagggtgggctgtgattcccagagctccaagccttgttctgtcttgtcacaccaactgttactgatgaacaggtttacaatctttgaggcctggctgactcatggaacaactaggacaagaaacaaagacaaagaacacacacctgactggacagagataaaccaagagctgagagttttggaaacaaggctggagctgaggaacaggactgggaacaacgaacctgtacaaaacaacaaattcttacaaacagaaaaaccagccactcctggccatcaaggaaaccaaaaatctcagaagcaaaagcatcaccaaatgaacatacaaaccaaatagtct

SEQ ID NO: 3914 - DNA, 675 bp, Homo sapiens
gaagcggctggtcacctgcagtgtgctcacattccacaccagcaccatgccgtccatgctgcacgagtacacgttgctgggtgcctcctgtccgtcctgcacaatcaaatccgtgacactggagcagtgggctgtgagctgcttgttgcaggacatgctgtggacgttgatgatgtagatgacggagtcttccgagccaacccacacctggttctggtcggccatcaccatgcagttcacttttgcagtgcccactttaaaggagtgctggtggatggtccatgaagaagcattgaacacggtcaccttgccttcgctcagagcacaccataacttggggtgagcatcttcaactttttcggctgggtcaagatgccctggagtgtagagcagcacgtccaccgcttgtgggaacgcctcccccgccgaggggttgattttatgcttcagtgtttccagggttgtctccggaagcgtcatgggcattatcgttactcatcttatcaaagtaggataacttggaggcagcgtagatggcgcctggtgactgcagtgtgcccacgacggcgtcatcagcaagacgttggccagcgcctgctggacgtagtgagggtccttgtggtcatcggcccagcttctacccaggccacatctccttccacaatcaggtgcaag

SEQ ID NO: 3915 - DNA, 727 bp, Homo sapiens
caatgggatctttttggccaccaaatcatcgggacttttccacaatgtggttaacaactccggccccattgacgcaatggtcggtaggcgtgtacggtgggaggtctatataagcagagctcgtttagtgaaccgtcagatcgcctggagacgccatccacgctgttttgacctccatagaagacaccgggaccgatccagcctccggactctagcctaggccgcgggacggataacaatttcacacaggaaacagctatgaccattaggcctatttaggtgacactatagaacaagtttgtacaaaaaagcaggctggtaccggtccggaattcccgggatagcaagtgaaaaagtggtaggtaccctataattgttctataagataactaggtatttagtaagcaggtaaatgaatgaagcaaaatcaaaaggaggaaagaataattatttttaagcatatggaagggaaaattagaaggtgactagctatactccaactttactaaacgggcaattcaaaactggctgatgaggaaatgacattaaatacaaagttgaactgtctggcaagtttcttaaatgctggaaaggaaaaacaggctaaggaacttattttcagagatgatagaaccggacctagcatgattgtaagggtgattataaccagcaaagaaataaaaaaaaaaaaaaaaaaaaaaaaaaaaaaaaaaaaaaaaaaaaaaaa

SEQ ID NO: 3916 - DNA, 665 bp, Homo sapiens
ttttttttttttttttttttaagctgttgctactttgcagctgtgttgtagtgacttacaggtataattttacaagtaaacatttgaaatcctagcttatgcaataagacaagaaaaaatatatactgattggaaagtaagacataaagctgtgttattcacagatgatgtgattgtttatgtagatatttgaaagaattaacaaagaaaaaaactcctggaattgatacatgattgtagcaagcttgtagaatacaaggttaatatataaacatcaatagctattctatataccagcaacaaacaaatggaattggaaattaataacgtaataccatttactttagcatcccccaaaactaaatacttgtttataaatctaacaaaatatgtacaagctctatatgagtaaaactacaaaattctgatgaaggaaatcaaagacaaactaatgaagaggtattccatgttcatgggtaggaagactcaacactgttaggatgtcagttctttgcaagttggtctatagattcaactcactccaaatcaaattaggaagactgacactaccaaactcccatacttaatacaaagctgcagtaatcagacagtgttgtactggtgaaaggaatagacgatatggaacagaacagagagcccaaaat

SEQ ID NO: 3917 - DNA, 686 bp, Homo sapiens
ttttttttttttttttttttttagctgttgtgaaggggattgagttcttgattcgattctcggcttggtcattgttggtgtgtgcagtgctactgatttgtgtgcactgattttgtgtcctgaagctctgctgaattcatttatcagatctgggatctttttggatgagtcttgggggttttctgggtatatgatcgtatcatcgatgaagagtgacagtttgcctttctctttactgatttggataccctttatttttttctcttgtctgattgctctggatcacaacagacagcaacttttaaactgtgatatttgacaaagttttgacatttgtaaacacaaataaacacaataatcacaataaaataatgaacatacttatcacaccaaaaggattttatatcattttgtcatatttgttttgctattgtctaagaaattgagtaatttttaaagtaaaaaatccaagagaaaaggacaatatggaacacggtggctgaaatagaaagtactagtaaaatggtagatttaaagccaaatactttagtaatctcataagtgtaagttaaccacatggtttaattaaaagacatattactaattaattaatgggagtgaaggaataaatcgtccctgccgaagaatttcaaataattttacaatgtaaaaagaatgacggaagt

SEQ ID NO: 3918 - DNA, 686 bp, Homo sapiens
ttttttttttttttttgcgtgtaaaatatgttttattgttctttaaaagggttcaggggtttggttttaaatcaggctgcacacctttcaaatcaatctgacatctctctatgtcaaactggcttcagctagcaatacttcattaaatcgaaaagaaaaaaattgctttaaggaaaaaaaatccagttttaagaacaattaacattagtctttaaaataaaaggagggctaatgtttcatgttgctttatacatccttctcctcaatacagaaccaggaatgtaattttcctaactcaggcaggcactgatactgatggacactgcgcgtgcacacacacacacacacatacacacacacacacacacacacacacacaccccctccccccaaacaacaaaattcagagtatgtcaaaggaaaaaggtttgttattgtattgatcaaaacccagtggaatcaacaccatctatcttagcttagcaggtatgctgtttgatcttgagtctatattaatggaatctattgttgcattctgaaataaagaattttggatataccattatgtttaaagtcctaaaacaatttcgaaaagcatcatctgtcgtatctgggatgggagaggagagaatctacagattgcgtttagttaaaaatcagaactccagcttaggacatacgcagtt

SEQ ID NO: 3919 - DNA, 603 bp, Homo sapiens
tttttttttttttttgagggggacatgtatgtggggacggaggattttctaagatgaattctctaaagcagggttgtatgctcacaggaaatgctctagtaaagagggaaaaattagtaatgatggcttggactagagtaaattatatgaatagttttttaggttgcagatgaaatcccatcagtgggttgcaaaattaattcagtggttcaattttttttttttttttttaagacagagccttacactgtcactctggcaggagtgtagtggctctatctcagctcattgcagcctcctgggatcaagtgatcctcccatctcagcctcgtaagtagctgagactacaggcatgaaccaccaacacccagctaacttcttaattttttgcagagacagggtctccctatgttgcccaggctggtctccacctcccaggttcaagtgatccttctgcctaagcttcccaaagtgctgggattgctggtgtgagccaccacagttggccccattcatattaataaacaatagacaatatgagagtgtacgccacacatcatgttcatgagcctatcatttcagttacaccagacatattgtgta

SEQ ID NO: 3920 - DNA, 746 bp, Homo sapiens
tataataataatggctattttcgcaatatgtgaggatgaagtaagacatagattattgaatgactttctgtgttcaatacaacagtttcacttatagattcaggtaatatatagccaattaaaatgaactactctaagttatgagtaatcacatatgcacagtatctattggaaccaaaagtatcaaaccacttgtgtggtcttttttagggatttaaaacataattcttagttcattttttaataatgtatctgaaacctcatcttggagaaatttaattttccaagaattaagcataaatattaatgattgctaagaaagaaacttcaacactgccagatgtgttcagtaaggtcgagagctgctgagaaatggaaattaggtcaattcttccactgataaaggtttagtctcactgccgttaagattcagagagattggctgggtgcggtggctcacgcctgtaatcccagcactttaggaggctgaggcagttggatcacgaggtcaggagatggagaccatcctggctaacacggtgaaaccccgtctctatttaaaaatacaaaaaaattagccgggcgtggtggcgggcgcctgtagtcccagctactcgggaggctgaggcagagaattgcttgaatccgggaggcagagcttgcagtgagccgagatcgcgccactgaactccagcctgggcgacagagcgagactcggtctcaaaaaaaaaaaaaaaaaaaaaaaa

SEQ ID NO: 3921 - DNA, 739 bp, Homo sapiens
ttttttttttttttttttttttttttttttgaagaaaacgtttttatggaaaacactactatgccagaaggcaccatctctgaaaacacaaactacaatcatcttcctgaggcagattcccactaggactgcattcaacttagagccaactgttaaacaaactgagacaaaatgggaatacaacaacgtgggcactgacctgtcccccgagcccaaaagcttcagttacccattgctctcatccccaggtgatcagtttgaaattccgctaacccatcaactacagtccgtcatccccaacaacgatgtgagaagcttcatttctcatgttatctggaccttgaagacggactgctccgagacctatgtgcaagtgacctgtgccaagctcatctccaggacaggcctcctgatgaggcttctcagtgagcagcaggaagtaaaaggcgtccaaggcagaatgggatacagaccagtggaaaactaagaactatattaatgaaagcacagaagcccaagagtgaacaggaaagagcagaagtcgagtgacggtgaggaccacacagaaacatgagacccagactttcccatcatttagcatatgccaggaaagtgcccacacaggagaacctgggactcccaggccatagtttgtccttggccatgtaactttagccagtgacagtgatctcccaactttggtcatttagagagtgacaccagattagtgccacgtgca

SEQ ID NO: 3922 - DNA, 712 bp, Homo sapiens
gggagccgaggtttcccggcctcccccgaccccgggcgccaagagcagtcggtccccccggcctcccgccggcaaaggggccctggggcccaggcgcgcggcccctgcgtggcggcaggcggcccaggccagcgccggcggctagagaaggcctccagtccaggcctcatggaagggcctgcctcgagcggcccctcaacgccccgcagtgtggcactggaagggacctaaaaaccacctggctttcttcttttccctttcccaacggcctttcccaagggccccaattgcccggattctcagtttcgctttccggcagggtcaggggtgagagggaggaattctcaggtgtcacctcctcacccgcctggaggcggaggctagaaagacgccggggcactctggaggggaggaagaggtgtgcctagaattctctctcttaaacgctcgcgttatcacggaggagactttataaacactttaaacacaacaccaaccattttatcagcaaaagcgaggggaggggggcgtacagtaaatgctgagagatgttcgagaagccccaagacgttccttgcggaaggagaacggaagaaagaaaattacgggcggaaaaagagtaatattagctccacacctaagcacttccccagccaaactaggagagaatctgctaagattcagcttcatattatatagtctatgtgatgtt

SEQ ID NO: 3923 - DNA, 198 bp, Homo sapiens
tttttttttttttttgtagagatgggattttcccatgttgcccaggctggtctgaaacccctgggctcaagcaattctcctgcttccgcctcctaagttgctgggattacaggtatgacccactgcacctggctaacataactcttatatgcagtgagaaaccaaaagattcttttaactcaccttgttgggattatt

SEQ ID NO: 3924 - DNA, 695 bp, Homo sapiens
acccaggtcagctgacgtgtgagagaagggtgggtggaggaagggagaaggcccagaagcctcgcaggtagctggtagggaggtgtttggggtttggacagctgctccctcctttagggctgactgtcccatcaggagggggttgtttctgttgctcagtggggaatctgcaggcctcgacaggctctgagctgggaaacaggagtggccctgcctgtcctatgacacactgtgagtggagggggctgtggccggcagggacgtaggggagtcacacctgctgaagcccagctcagagtcaggactgggaccaaaggggcagagcccaggctggccatggaggtccgaagtgagggattaaactccagcgtggcagcctctgccactgacagccccagctcttcccgtggccccaaaggctggtgtgtccctgtcccaccggttgcctcatctccctccctcccatgctcctgcctgctcacctcactcccactggcctccctgaacctcctgaaaaccaaccaagttctctccccaacaaggcctttgctgttggtgttgccccatgctgtaaacagactttccccaggctccttcacactcatcaaatcctagcttcagatgtcacatcccttaaaaagccttccttggctgggcatggtggtcatgatattatctcacacacatttgggaag

SEQ ID NO: 3925 - DNA, 741 bp, Homo sapiens
ttttttttttttttttttttttttttcgtgtcatttgtactttattacttttatatacaatgtagcatttaaagtatcctgaaggttaactgaagctatattaaaattttatctttcatcaaatcagattactattttagagagttcctttccctgggaaaagctttgagcgtctctgtaccaaacagtgtgaaagatgttctatccccacctccacccccatcaatatcctccaaagggacctaagaacttgaagcagaaaaaaaaacattaaatgctaaattgtcacctctgaaaaaatctgcacatgtgggtacaaaggagaaaaaggagggaggtgtacaggagaggtgataacagttaatcctgacttatctcaagtcataaatacttcttgataacagaaatcattaagtcatcagattaaacagaagtgtatatattaggtatgttcttgctgaggtatctttatcattatcttaatatatcctatgtgatttctcataaagacttttctgtccttcaccattattatttcagaagaccttggcctttaaggaattaggcacccccagcatcatatgaccaggaggcttcacctcttcgctagccctttccccaggtaacactcatcagggggtggccatgagggttacagtaggctctcttgcagccactggcagcttctcaatctttggtgtcccagacacatgcaggcttatcacctttctggataattac

SEQ ID NO: 3926 - DNA, 779 bp, Homo sapiens
tttttttttttttttaacaaaaaatttattaccaaaatacaatattaaagtcaatacatgacaaactcctgtaaagcaaaataaattattctaacattgtacagtatttccaaaggtagttaaagaagcactacagaccttgcctcactgttctgaacagatgaactgctctcccatgaacacagtcctagagtttccgctttaaggcatgcagcttgatgtgcaggataattttacaaaatgcaaatcatcctattttaataagatacagtgtcagaattaactgtagtctttacatgtcagtattccagaaatttttatactttggctatagaagcaatgccatagtgttacacaatacttatttcttaaaaaaatacatgtattcatgttcatgaatatcaaacgcaaatttctattaaatatattttatcgaatattacttagagcaccttgctgtacaatttaaaaagattaaataagtgtctatgaaaactaaaaacacaataagtctcaacagagaagcctgcttgtctttgtcaagccaattacagcacgggaaggtgcaatgtaaacatggatgcccaccatttactttgtgagaaaaaaaacagaaaattatgaagccaccagcagccactttcaataggaagaaagatcccagaacaaaggcttcggtcggtgtcacaacattgcactatctggcaagaactgggactaccgattcaatggatattagcatgatactgttgacactggacccgcatatctgatgattg

SEQ ID NO: 3927 - DNA, 736 bp, Homo sapiens
  misc_feature (210)..(210): n is a, c, g, or t
ctagggcgcgggccccgggtggaaccgccgcaggtgcaagatctggtgtagtacaaatattcaaacgagaactttgaagccgaagtggagaagggttccatgtgaacagcagttgaacatgggtcagtcggtcctgagagatgggcgagcgccgcccaccgtgggcagtgccacccgcagatgacacgcgctctccaccacccaacccanaccatgagaatttgcaacaggggaggaaaaaagaaccaaacttccaaggccctgctttttttcttaaaagtactttaaaaaggaaatttgtttgtattttttatttacattttatatttttgtacatattgttagggtcagccatttttaatgatctcggatgaccaaaccagccttcggagcgttctctgtcctacttctgactttacttgtggtgtgaccatgttcattataatctcaaaggagaaaaaaaaccttgtaaaaaaagcaaaaatgacaacagaaaaacaatcttattccgagcattccagtaacttttttgtgtatgtacttagctgtactataagtagttggtttgtatgagatggttaaaaaggccaaagataaaaggtttctttttttttccttttttgtctatgaagttgctgtttattttttttggcctgtttgatgtatgtgtgaaacatgttgtccaacaataaacaggaattttattttgctgagttgttctaaaaaaaaaaaaaaa

SEQ ID NO: 3928 - DNA, 661 bp, Homo sapiens
tttttttttttttttaattgtggaagtctgttaaaatagcaaaagaaaagaaaagaaaggagatcaatgaaactggattttcagctcatggaaatgcaagaaaaacctgattatctgacttttttctcttttatttttcaacctgtcgagctcacagttgagcttgagaagactgtattttttatgatgatcaggttatctttgagtgctttacagataccagtgtgtgaatccaggagttcccttttggataaaagtgcctcctgctttctttcaatacatgtatccatcacacttagagggtgggaacccaggcaccgagagatacgggctcaggctctcatcttgcactcacggggcacggaagcagttcacattcacttccttctgtgcctgtgaccatcccacttttccatcctgagaattcccttggtcactcaaaatcactctgagcttgcaagcccggggtagtttggaacagtatgctctgtctctacatgggaaagctttttgctttcaacttggatatcttgtcataggcatttcttaatccaattgcctcagtgttatcacccatcaaatgaggcactcgtgtatcccttaagagaataaacgtgaatatgaacgaacttggaggttgtcgagtcaccctcatttcaat

SEQ ID NO: 3929 - DNA, 665 bp, Homo sapiens
gacgcggagaaaaaaagttctcgccaccaaagtccttggcactgtcaaatggttcaacgtcagaaatggatatggatttataaatcgaaatgacaccaaagaagatgtatttgtacatcagactgccatcaagaagaataacccacggaaatatctgcgcagtgtaggagatggagaaactgtagagtttgatgtggttgaaggagagaagggtgcagaagctgccaatgtgactggcccggatggagttcctgtggaagggagtcgttacgctgcagatcggcgccgttacagacgtggctactatggaaggcgccgtggccctccccggaatgctggtgagattggagagatgaaggatggagtcccagagggagcacaacttcagggaccggttcatcgaaatccaacttaccgcccaaggtaccgtagcaggggacctcctcgcccacgacctgccccagcagttggagaggctgaagataaagaaaatcagcaagccaccagtggtccaaaccagccgtctgttcgccgtggataccggcgtccctacaattaccggcgtcgcccgcgtctcctaacgctccttcacaagatggcaaagaggccaggcaggtgaagcaccaactgagaaccctgggtcagccaacccagcagagacatgc

SEQ ID NO: 3930 - DNA, 755 bp, Homo sapiens
tttttttttttttttgatttctgaggccattatcattctctactacattattatgtacactgctttccttctggattattgttcttttccattgatctatctcacaaatgttatatcaccatactatgtgctgataaaaatttataatgtatttttatttctgagcccctaagttcctttcattattctttatttccccatagatattctcacatgtttgcttatacaaaagaactttagaatcaatttcttgagtttcagaaaaaaagtagatttttatgggaattatatttgctataaatcaatttggaaataacaatagaaaatctgtatttttatgtagtctttccacttaggattaagtaccttccaaagaaatgtgcctgcctggaatttgtaaggtagacgtgagatggaggctcttctttctgtgatggtaacagttgatggacaggctctcacagatgccagtttttcagaggccagaccaggctgcatgtgctactctctggtggaatgggtagctgtggtaacagtgctagtttccagatatttcctaacctcagactgtttcaaaagtaatgaagagctaaacagttttctatttggatagcacttgcatggcatgggcttgccgcctggtggcagtcccatgacattcactctttctttaattccagtaaaattttaagtacccaatcatttttttttcgggtgaaatacctagggtgatttctagtcttgcctggaactta

SEQ ID NO: 3931 - DNA, 746 bp, Homo sapiens
  misc_feature (657)..(657): n is a, c, g, or t
ttttttttttttttttagttgtgttacgagcttttatttaaaaagcacatttaatacaagtatagtttcgcagatacaagttttcactttgtatgctacaaaagtctttgaatattattctctttacaaaatggaaccttacaaaaatactgacaatttaatgtttttatacagttttctctagttgcagttatttcattataaaacaatgtctaccacagaactatgatattttagttgatatttaaaaaaattaactcaatgcttttttaagcagctaatgtaaataacacaggtcgagacacagtttataatcatagtggatatagctaaattgtttcagaaataatatcttacatagttaacttttaatgttttatacattatttatataatatttatatataaaaatcatagcttgctataagttgaaatgaaaggacggattctgtagtaaggatgtgcattgtggtttgatccatatggttacatttaaccctttgaaaggtctgcatccaagatctaaacgcatttcttccttcctcctttcctcaaaggttcagtaaaaggggtccctgtctatcacctaagtgggaccttgcatggaaggacacttcacggatagaggatgaggaaaactctctaccgagatttaancccatatgtttctgcccaagagaactaccaagaattggcctaggtcaacccagacatagtgctttacccagaagagcaactctaaaaga

SEQ ID NO: 3932 - DNA, 705 bp, Homo sapiens
  misc_feature (681)..(681): n is a, c, g, or t
catgacctaagggggactttcctactgggcagaaaatctacgtattaattcatcgctattaccatggtgatgcggttttgcagttacatcaatgggcgtggatacggtttgactcacggggatttccaagtctccaccccattgacgtcaatgggagtttgttttggcaccaaaatcaacgggactttccaaaatgtcgtaacaactccgccccattgacgcaaatgggcggtaggcgtgtacggtgggaggtctatataagcagagctcgtttagtgaaccgtcagatcgcctggagacgccatccacgctgttttgacctccatagaagacaccgggaccgatccagcctccggactctagcctaggccgcgggacggataacaatttcacacaggaaacagctatgaccattaggcctatttaggtgacactatagaacaagtttgtacaaaaaagcaggctggtaccggtccggaattcccgggatgcagaataaatctgaaaaagctactccacatcactctacttgatctcagagaaggtcaataaaaaaggggatgaagctctctttcacacaatacttcagacacacaacaaggacataaaaatttttatgcttttaatgggtacagaaaaagcatgacaaaatccagcatccattcctaataaaaattcccntgcaaaaaaaaaaaaaaaaaaaaa

SEQ ID NO: 3933 - DNA, 697 bp, Homo sapiens
tttttttttttttttttttttttttttagatggagtctccctctgtcacccaggctggagaacagtggcaaaatcttgtctcactgcaatctctacctcctggattcaagcgattctcctgcctcagcctcttgagtagctgggattataggcacatgccaccacccctggctaatttttttctatttttagtagtgatggggtttcaccattttggccaggctggtctcgaactcccgacctcaagttatttgcttgcctcagcctcccagattgccgtgattacaggcatgagacactgtgcctggctgcatgttgtcctttaagtaagccccagtgccatttttgttctactgtgtttattgaatgtctgcattgtatcaggtgttctaagaataaaggctgtgagttctgttttgttagagaccctaacagtctcttcaaccctgatattttggctctgaaaagttaacttcccaggttaatgatattctatttgtctctaacttgcacacagtagtaattcagcaaatattcagggatgagctagcttcatgctcatttatactttggagaacaggctatgacagtagcagtggtttggaattgttctctgccaatcataatccatgtggctttcagcgagatcttaacttatctaggtataatttatttacctgtattattatcctacgta

SEQ ID NO: 3934 - DNA, 721 bp, Homo sapiens
gatgttattttttctcatatgttgggaagacccattctttctgcatttcttctaagggacctctttctccttaagcacgtggacttcactggcaaacaaaggatgtatttaacctgatgaggaaagtcaattctgaaaaaaaaaagaacattttaataaggaaagtgctggtagtgacctcatattgagtgtaatgaagcatggttggatatacatcataaattatgcatctttgggccttagtctattccaaactgcaactttgttgaacctcatggactataattctgatgtgtcagtgggatatactcattgtcatgcagtttactttttttttttttttggcaacttcaaatacttaccttactccagatctaactttctgctgagggtagcttgccacccaccttggattccattactttctcactgccatgagggactcctttccaagcacttgaattttcattttttttcttttaaattactccttacaatgactgataagagataggattcattagcacactttgctagtactttgtgctaatattacactgaagtcaggtcctatgaactcacaagtgttcttctacttgtccttttgccattcaacatgttgcttggcccttcaggatctggtccttgataatgtcttcttactattttcaaggcatttttcactcctgatttgatgccttaatacccgtaaagtagtaat

SEQ ID NO: 3935 - DNA, 727 bp, Homo sapiens
cttggatgcaggacaagagctcaggaaccactgaacacaggtacaagctataacagaggcaggctggggcatgcccagcccagctacaggctgagccagcgcacaagccaaacttagcccaggtcaggcaagtgggcagggtgcctcctgcagcaggtagcgggtctgagtgagtcccagtgaggggcgtcaccagccagaggtccctggctggcaaattgactgagaaaaatcctacatcaaaacctctgcctgttacccagttccaaagtcacttccacattttcaggtatcctgatagcagcagtccactaccttggtaccaatttactgtattagtctgttcttatgctgctataaagaactgcccaagactgggtaatttataaagaaaagaggtttaattgattcacagttctgcatggctagggaggcctcaggaaacttacagtcatggtggaaggtgaagcgggaaccttcttcacaagtcggcaggaggtagggagtgccaagcaaagggggaagagccccttataaaaccatcagatctcatgagaactcactcactatcatgagaacagcatggaggaaactgccccatgatccaatcactttccactgggtcctctcacaacatgtaggattatgggaactacaattcagatgagactgggtgggacacagcaagctatcattgtcactaaaataagggattaacgcgcttaag

SEQ ID NO: 3936 - DNA, 523 bp, Homo sapiens
ataagcagacggcgagaaccctgagggcctgcgtgtcagtgaggagcccgccattcaagacgtttggagcagaggcctgatggactcggaactgccctataggaataccccgggctgctgggcagggaggagtgaggccacagtagcagactagaatctacataaaggaagttaaagtccctaatcaggacataatggtggtgaggatagggtgggggaacagagaaaaggcattccagaaatcaactcaaaaggacttcgcaactggtgtgtgttttggggctgaactgggaggtatagagaaagagtgattaaagataaccctagggttttaaaccagaggaaactggaaagtgttaatacctggatcaacaattagaataatcagaaagagcaatggatttggaacacgagacattgtgaagcgaagaattagactttaggtaagtcggtagtattggtgggattctgatgatgagtggcaggtggttagaacaaactgaaaggccaggccattttggtg

SEQ ID NO: 3937 - DNA, 704 bp, Homo sapiens
  misc_feature (376)..(376): n is a, c, g, or t
gggtaaatggcccgcctggcattatgcccagtacatgacttatgggactttcctacttggcagtacatctacgtattagtcatcgctattaccatggtgatgcggttttggcagtacatcaatgggcgtggatagcggtttgactcacggggatttccaagtctccaccccattgacgtcaatgggagtttgttttggcaccaaaatcaacgggactttccaaaatgtcgtaacaactccgccccattgacgcaaatgggcggtaggcgtgtacggtgggaggtctatataagcagagctcgtttagtgaaccgtcagatcgcctggagacgccatccacgctgttttgacctccatagaagacacctgggaccgnatccagcctccggactctagcctaggccgcgggacggataacaatttcacacaggaaacagctatgaccattaggcctatttaggtgacactatagaacaagtttgtacaaaaaagcaggctggtaccggtccggaattcccgggattgtaattctattttaatctctttcctaatggaggaagaaagatgactgatgtggtagggtaatcttgtttgaaaaattgacaactctggcatacggcccagatctcttttcagattttgtgtgaaaaagaaaaatggcagcctcttagtgctattcattggtggtaaaaaaaaaaaaaaaa

SEQ ID NO: 3938 - DNA, 708 bp, Homo sapiens
  misc_feature (613)..(613): n is a, c, g, or t
tttttttttttttttaacggtttcccccattgaatcttcccgtcctctgaggggctgggagctctctacacctgggacccttgtcttccttcagcggtgcaagtgggacccatctcctggacctccaatgtcctattaactaatgatgggcacgggagagctcttagggggatctgaattcattcatcatcactctgttttgaggttacagcattcatagtggattattcgttacattctcccacaatattgtccaaatcagtgttaaaattatgtgataacttataaactgtataagttctctgtaaccaaatggcaaatacaattttgacctaccatcccaatgtactccctaaattggtcataaattacattattatatagataatatggatgggaagtcctaaagactgcacagattggctcaacacttgggaatttgggttcaaggtccagctttgtcacttgctagctgtgtgaccttgacaagtgtgctgatccctctaggaatcctttcctcactgtgggatagggtgataatatgactgcctgctccatggtgttcttgtggaaattgagacaatgcaaataaagtattaactaaaatctctgngcacatgttaagtgcctcaaatgtattaaggtagttcttctctgctttctcttcctctttctcctcctcttattttcccttctcttctacatcat

SEQ ID NO: 3939 - DNA, 674 bp, Homo sapiens
tttttttttttttttttttttttttttttcttctaagaaacaggtcgaaatagccacagttagcacgaccaggaatttttatttaccaaaacaatatttccaaaaggttcactttgacctatttaaggtacagataaacagatcttgattcccagctgcacctagtgccacttggcctctgtggcatttccgaagactgaagaatgaaaaggcagagaatgggacctacctattgctgtagttctgaccctttggccattctgcgctttacctatgcaattttgaacaacgtattatttaaccttcaacagattggacaatggtgttcaaaaaacccaaggtttcagggagccttaagacttctggggcaacctttcacaatgtctctcgtatcatcctttttcctgtggcaaaaggatctcctgcctcagccctcaaaccacagcttctgggtgatgtgacagaggcactgtcaatgttgtccaggcttgaaagtgctgtcgagatatcaatcatttctctttgtatatcctgcccaaataagttagcatatcctttcccccaaaatcccgggaattccggaccggtaccagactgcttatatgtacaaacttgtctatcatgtcacctaaataggcctaatggtcatagctgttcctgtgtgacattgttat

SEQ ID NO: 3940 - DNA, 658 bp, Homo sapiens
ttgagtttgacgaggagaaaacggctgtcattgaccatcacaactatgacatctcagaccttggccagcatacgctcatcgtggctgacactgagaacctgctgaaggccccaaccatcgttgggaaatcatctctaaatcccatcctctttcgaggtgttgggatggtggccgatcctgataaccctttggtgctggacatcctgacgggctcttccacctcttactccttcttcccggacaagcctatcacccagtatccacatgcggtggggaagaacaccctcctcattgctgggctccaggccaggaacaatgcccgcgtcatcttcagcggctccctcgacttcttcagcgactccttcttcaactcagcagtgcagaaggcggcgcccggctcccagaggtattcccagacaggcaactatgaactagctgtggccctctcccgctgggtgttcaaggaggagggtgtcctccgtgtggggcctgtgtcccatcatcgggtgggcgagacagccccacccaatgcctacactgtcactgacctagtggagtatagcatcgtgatccagcagctctcaaatggcaaatgggttccctttgatggcgatgacattcaagctggagttgtccgagttgatcctttgtgagacct

SEQ ID NO: 3941 - DNA, 745 bp, Homo sapiens
ttttttttttttttttttttttcctacttccaattttctttctcagtgattcttttgagattactggtaatggtactgcaactcagagggttgctttgacaggactagagacttcatcctggatttcactttcttcttagccatggatatgtcatcctttttaattttttgcctattctctttgctaaagctaaaaataggattggactagacctgttttctctctcttacagcttaacttcacccagtgggcctattgcttcttgcctcttcagcctctcaacatccctataattttctcgttagttttcctttgcattgtttacaaacttctgcatatgctgagctttcactttctatgcctgttcctatagacttctgtcatttgctttttgctttcgtttgagctctattatgtgccttctcgccatcccctatatgcctgcccattagaaacttgagtttattgggccatatttgtttactgagatgctttcagcattggttcttccacagactcatttgtgatggagttgacagaattgtttcggaagaacatattccagacatgtagccgcacactgggcttgtttgcgtcaattctttcacagtgttatctgctctatacttcttccgtatctcccttttgattgaccagtttaaatcttcactaaataaaacacatagtcatccaactctacaaattctacaatattcaaggcactagaatcatcagctctcagaa

SEQ ID NO: 3942 - DNA, 693 bp, Homo sapiens
  misc_feature (271)..(271): n is a, c, g, or t
  misc_feature (661)..(661): n is a, c, g, or t
tttttttttttttttttttttttttttttactgcagcaaacacgtttaataagaatacaaaattcacactagaggcacattctggggaatgtaaatgaactatcacaagtagtaattctgctggaagaataaaataaggctctctgagtacaaatatacaggaaggaatgatttaaaataggtatgatttacaatcacattacattgtattaagcactcaaaacaggcatattaattaaaaagccagctaaaaggcatttgaacatatatnacaaatcttacagtccacaaagttcatgtataacggtaattttaagtacttcatttcaacacagaagaaatgaacaggtgagggatgcctctcaaaatattaatttatgtctatgacaaaaactaaaagagctttacattgaaaatggattacactactgatagaaccatgtagtggacagggcaaccacattaaaacaaaaccaacagtgccgagcaactaaaacagtactggcctttccaatcctctttcttcctggtaccaccacactgtcccaaattacctcttcattacccaaatcaaagaatctttctgttttcccaatcctcaaaaggaatgaagaaaaaccaaagagcaaactcaaaagatgatttttaccataaacctcanatgtggcttaacaagtacaaagaaacccaaca

SEQ ID NO: 3943 - DNA, 736 bp, Homo sapiens
ttttttttttttttttcacgcttaattcactttatttttcttgtataaaaaccctatgttgtagccacagctggagcctgagtccgctgcacggagactctggtgtgggtcttgacgaggtggtcagtgaactcctgatagggagacttggtgaatacagtctccttccagaggtcgggggtcaggtagctgtaggtcttagaaatggcatcaaaggtggccttggcgaagttgcccagggtggcagtgcagccccgggctgaggtgtagcagtcatcgataccagccatcatgagcagcttcttaggcacaggtgcggagacgatgccagtgcccctgggtgcagggatgaggcgtaccagcacagagccgcagcggcctgtcaccttgcaagggacagtgtggggcttgccgatcttgttcccccagtagcctctgcgcacggggacgatggagagcttggccaggatgatggccccacggatggcggtggccacctccttggagcacttaacacccagaccgacgtggccattgtagtccccgatagcaacaaatgccttgaacctggtgcgctggccggcacgggtctgcttctgcactggcataatcttcaaaacctcatccttgagagaggcccccaggaagaaatcaatgatctctgattccttaatggggcagggagaagagatagatctcctccaggacctgatcttcatgttcttgaccaagcggc

SEQ ID NO: 3944 - DNA, 736 bp, Homo sapiens; identical to SEQ ID NO: 3943

SEQ ID NO: 3945 - DNA, 691 bp, Homo sapiens
ttttttttttttttagagatctgaagtgattttacctttatttccttcactttaagccaatcatgaaatttcacagtgatttctggggtgggagcagaaggaaggctgtgttaagaatcatcggggctgtggcccagtcagcccgcggaggtgcaggcagggtgggccctcactggggcagctggaggagcacggactgccccgctggcaggtaggtgatgttccgagagcgtgagagctggtacgcgatgtcctctgcagcttccagcttgcgcagctcgatcaggccatcccctgcagtggccagtgagttggcaatcagctcagctgccttggagtcgccctcagcagagatgatggccgcctttttctgttgctcagccttttccaccacaaatctggccctctctgcttcctgctgagccacctgtttggcttccaccgcttctgtgaactccttcccgaaggtcagatgtgtcaaggacacgtcatccaggatgagcccaaaggtggcggctcgctctgtaaggtcgtcgctcacctgcctggagaccagctctctctgggtgattagttctccagcatcaaagcgagccaccactgacttgaggatctcagttgtgatggacggcagcacacgctcatcatagtcctctcccgatgctgggtgaaaaatcgaggaaacttggct

SEQ ID NO: 3946 - DNA, 691 bp, Homo sapiens; identical to SEQ ID NO: 3945

SEQ ID NO: 3947 - DNA, 722 bp, Homo sapiens
ttttttttttttttttttttttttatacaacaggttttattgaggatgtgtcaatacagttaacatggttgcttgtcttttcaaaaagaagttccattttctttgattcccaagtgcatttttcctgaatcttctgtgatacagggcacatgataggtatgtagagagctaagcttcctataccaagttagaagtgaaatgactagtggaaaacatttaaactttaatcttaaaaaaaaaataggaatcaatataaaaatgcacaaggtaatgtcgttttcatagttaaaatctgacattgtttatcaaagctagtcagttaagtggacacctgcaactcaaatcccataaacattttagaaacgccaaccacccctcctgaaaggtttgaggaatgaaatttggcagaagctcagctctgtgaaatagctcccgttttttttcttgggaccctacttagttccgtgggctcccattgggagctgattaatttctgccaatcagaacccatccctaacacatcagatgatagtggctttgacctagggaagaagaggttgagcgaagaacccccaccaggtatggtttgagagtccttagttggtcttcttgggcgtaggtagtaagaaatccaccaggaacccagccaaaacttctcaagtgtcacttggggcagattgggttatcattcctccttttgaagacgtgagcaaacaaggctg

SEQ ID NO: 3948 - DNA, 707 bp, Homo sapiens
  misc_feature (653)..(653): n is a, c, g, or t
tttttttttttttttttttttttttttttgagacggagtttcactcttgttgcccaggctggagtgcaatggcacgatctcagctcacagcaacctccacctcctgggttcaagccattctgcctcagcctccggagtagctgggattataggcatgcaccaccatgcctggctaattttgtattttcagtagaggcggagtttctccatgttggtcaggctggtctcaaactcctcaccttaggcgatccgcccgcctcggcctcccaaagcgccgggattacaggcgtgagccaccacgcccagcccaatgctgacatttccttaaagagttctttcataacaagcgtcagttattatttggttccaggctttgcagaaatgagtgtttactttcagctgcacaagtgatgactagagggaaaaaaaactgctattaagggaaatgttgactgttgctggttgaatatgaaaattgtaccagctttcagcttgttgcacttcagtaccttctgccagttcaggtaaaaactctgttgtagcccaggaaatactgtaaacatggaatattgacttacagagtgtgattagcctaccaatcagcttcagtagatgtgacttttggtggttgctctctctcctaagtataaatntaaaagctgatgagaatgaataaagcctgctattgaatataagcagattcaggc

SEQ ID NO: 3949 - DNA, 88 bp, Homo sapiens
agtggggaattgggtggggggctgcggaccccttaacgtggattacttggtgtgtatcagctgggctcagaagacccacgacctcatt

SEQ ID NO: 3950 - DNA, 784 bp, Homo sapiens
ttttttttttttttttttttttactagtaagacatttattaatgatattattacaattgtttctaaaatccattattatttcagcagcgaagagataaataccagagtaacctcagtcagatggtaacagttaggtctaaagaaaattatatgaaatactgactgtaatactgctatagagtatacagtatgttaaaacatgatggagaggctgcacacattggtaacgttttatgtcattaaaaaaatcactgaaaatttaaaaatgatgtttgcatttaagtgtatattagaaaagttttatttttaaagttaattctgtatcattcttctaaaaaaattatcatctgtaagatgcagatttgtattgtttatatcaagtgatatttgcatttatgtaaatataatttaagacagttaaatataaattcatgtttatcttcatataaaaatatatataaaaatagagtatttaaaggaggtggatattcatacaaaagaactgatcaatcaaaataggtgtttttttcttgtatggtagtgaaaatgaggtatttatacatttggtaatttcagccatgtattgaattaaccctctcagcttcccaccccacccaaaaaagacaaacctctaaaatccattgtaacagtgtgcatgttatctcacaacaaagcattcatactataagaattcaccattttgaaccttaagaagattaaagaaatagttctcactactataataggtatgtattatatgtttccccagttaataaaataaaat

SEQ ID NO: 3951 - DNA, 744 bp, Homo sapiens
tttttttttttttttgcgagtaacagtgagctttattttcatgtcaccgctctaggttcattcacctgttgccaacaacatgagggagtttctccacagcccttgattcctgaattgttcaacaaatcaacagtcaccaatacattcgacttaaggagtaaacaagcagcttttctctacacaccaccgggcaccccaggaaggcgcagctccctgctccacccccgcctcttggtgcctgtatccagcagaaggacccagcaggaggctgaatccaagcactgctctcaggccactctatcctcatccctggatcctccagggaacaagataaaaaaaaaaaaatcctgttttcctgctttccaaaatggagggccttaacatcaaccaaagttacaaaacaaaaacaaaacacaggagctagctgggcgcggtggctcacacccgtggtcccaacattttgggagaccaaggtgggaggaatgcttgagttgtaggagttcaaaccagcctggcaaatatggcaagaccccatctctctaaaaagtaaacaaaaatcagccgagcatcatatcacatgcctgtagtcccagctactctggaggctgagatgaagactgcttgagccagggcaggggcaggctgccgtgagccaagatcacacaacaacacccttagccagggagacagaggcagaatctctctcaaaacaaacacccaaaaaaaaaaaaccccatcttctgc

SEQ ID NO: 3952 - DNA, 744 bp, Homo sapiens; identical to SEQ ID NO: 3951

SEQ ID NO: 3953 - DNA, 708 bp, Homo sapiens
tttttttttttttctctgaaaatgccttgattttcccttcatctctgaaggatatttttgctgggtatagcatttatggttacttgttattttctttcagcacttgaaaaatgctgtgccaattctttccagaggaatcagagtaccaactattctgttctctttccatcttggagtaggggatgaagctcaactcctcattgtgcctggctgactctgctgaaaaagagtatagtgcaaattatctccatcttatgctaccttgttccctttcattgatactaggtgagaatgaaggctccagcttggccccttggaacccttcttggtggaaaattaaccctgggcaaagggatttaaagcaaccacctggtttccccttggattaaaccttggggctatcctcctggtctcctctgggctctggcctaagtctggcctttatggtataatatttggctggcaatattaagtcactattggacctggaagagtaattaagaaagaaggtgaacacatatactttacgagacctaattgagggaagacgtgaactaatatagataaaacgagcaacaaattaacttccctgtgtttctctctcttttagagctagatttaggcaaagtgactaagtaagtgaaatttgactgtaacgtgtcttccctatttactgccttttactgttttctcacgtgccacaggaca

SEQ ID NO: 3954 - DNA, 705 bp, Homo sapiens
gcatggaggcgcacaacatcctcagcaaacggggattcagcgtccgatcctttggaacagggactcacgtgaagcttccaggaccagctcccgacaagcccaatgtttatgatttcaaaaccacatatgaccagatgtacaatgatcttcttaggaaagacaaagaactctatacacagaatgggattttacatatgctggacagaaataagagaatcaagccccggccagaaagattccagaactgcaaagacctgtttgatctgatcctcacttgcgaagagagagtgtatgaccaggtggtggaagatctgaattccagagaacaggagacctgccagcctgtgcacgtggtcaatgtggacatccaggacaaaccacgaggaggccaccctgggggcgtttctcatctgtgagctctgccagtgtatccagcacacggaagacatggagaacgagatcgacgagctgctgcaggagttcgaggagaagagtggccgcacctttctgcacaccgtctgcttctactgagcccagcgcccgcatggagccgctctggagcttcctgttgtccatactttttccttcctgacatttgtttatacttacaggtgttctgctggtgacggtagcattaccaataactgtgctattacatgggagcagagatgccaaacgcagatgaagcacaagttcttctatcca

SEQ ID NO: 3955 - DNA, 745 bp, Homo sapiens
tttttttttttttttgttttgttttttcagagttctgaggttgctgactgagccacagcacagctgtgtaccacaggtcgaaattcgaccttaaatattacaatctagcagtatctggctggccagagtgggccggcccctgccagcatgtgggcacttcttcattaagtctattctttggcagctgacacgcgtgctgacagagaaaaatccagtgacttgttgctagggatttcacgactaatgtttttgcaagcatgtgtatttacaactctgtgtttttatttcctttaggagattttactctgaaatacagtttctttcttcccccactatttgaaatctgggctaaatgaatgtgtaatgtaattgatgaataaaattatgtcagatatagttaaaaaatccaacaatttcagtattcgtgtttacgtaaatgcattttttttaaaaggattaagcaatgttctaacctagtactatacaaaattcaaaatggtaactggtgatatcaactattagatatgtaatgaaagttaaagtcttggcttttctgttacagataattcatttgggatattatttatcttccatttgaaatcaaaattaatgaaatgctatcagaatgcatggatgcagtggcattgcatataaatctacccaggctatggatatatatctatatatgtatacacaatattttggctcctgaactctgaaatctgacccacaaggataaaacgtt

SEQ ID NO: 3956 - DNA, 356 bp, Homo sapiens
tttttttttttttttggggggtttttattgagataggatctggctctgtcaccaggctggagtgcagtggtgcgatcctggctcactgcaacctccgcctccagagttcaagcgattctcttgcctcagcttcccaagtagctgggactaccggcgtgcaagccaccacaccccgctactcttgtatttttagtagagacagggtttagctatgttggccgggctggtctcgaatttctgacctcaagtgatccgcctgcgtcagcctcccaaagtgctgggattacaggcatgagccactgcacccggacactccgttctgcaggtggaaaacacgaaaaacaacacacacacac

SEQ ID NO: 3957 - DNA, 671 bp, Homo sapiens
tttttttttttttttggataccgggtctcaatctgttgcccaggctggagtgcagtcactcggtcacggttcactgcaggcttaaactcctaggctcgagcaatcctcctgcctcagctaagtagctaagagtagctaagactacaggcatgcaccaccatgtctggctttttaaattttttctagagaagggatccaaaacatctttcaaattcagttaatcatatatatgccattatttgaagtctctacctaaggaatggtgctcatcacttctcttctatatataatagttttggtttatatatttcaaggtgatttcatttagcatgtagatattattgatgaataaaatattctattttatttagcacacagacagagacatgaaaaaaagtatcaacgtgaaagagtacagagggtctgcaacttacaatggttcacctagattttttgactttgtgatggtgtgaaactgttgcaatttgaatgtacttcaaattttgaattttgatcttctcctgggcttgcaatatgcagtatatgagatatccaacactttcttagtaaacaggtttcgtgttagctgattttgcccagtaggctaaatgtgttttcagcacatttacggtaggctaggctaagctcagactgttcagtaggtaggtata

SEQ ID NO: 3958 - DNA, 692 bp, Homo sapiens
ttttttttttttttttttttttttttgtaataattccatcatggaaaagtggatattcgtcccctcaagcatttatcctttgtgttacaaactatccaattataatcttttatctttaaatatacagttaaattattgactatagtcattctgttgtgctatcaaatattaggccttattcattcattcaaaccactttttatacccattaaccatcctcagctcccttccactacctttcccatctctctgataaccgtccttcttctctctatgtacatgggttcaattgttttgatttttagatcccacaaataagtgaggatataccatgtttgttgttctgtgcctggcttatttcacttaacgtaatgacctccagttccacccatgttgttgcaaatgactgaatctcattcttcatggctgaatagtgctttatcatgtatataagtaccagattttctttatcaatggatatctgttgataggcacttaggttgcttccaatctcttaagatgtgcaaatgtgactttaacaatcaagagcaattccaaacagttgtactgttttcctccagccaggtccagctgctctactttgggcctagagttggtacacagttggtttcatagagtatgaaatcttacaggactatagaatagagatgagcaaggaattcacgattgtc

SEQ ID NO: 3959 - DNA, 649 bp, Homo sapiens
agtatatctttatcagcagcatgaaaacggactaatacaaggtgctaaagagttggtttgaaagataaaatttggtggttgttgagatgcatggaattaaaattttgaagaactgtagttataggtaatgagaagttctatagtatgaacatagggaggaatagctgagaaagggtgcagggtaagataagataaaaaaaggaattgaggaggtaaggtgtggaaggggtgatctatgggtttattttaatcacaaagaaataagatagagtgtcaggagcttaagtaattgagaaatgacagtaggttcacagatcttggccactatgtgggaaagttggaacataagatttggagctgagagtttttagggagatggaaaggaaactaaataaagaacaagttgtatggaggatgtagaaggaaaaacaaaagcctccgtggctcaagagaaaagcggaaaaagcagtgtctggggaggagcaaatttctatttcagcaaaaaggtgaaaggaacgaatggtaatgagttagaccaaatgtactggttccacctacacaaccaaaacaaaatattttttaaagtatctgtataatcagaaatctcttccctataagcttataaggagcaatttaacgaatatgttta

SEQ ID NO: 3960 - DNA, 775 bp, Homo sapiens
tttttttttttttttagctcatcactgccaaaaggtatattgcaaaataaaatagtataacgattcaataaatgacaaaaacactgaaatgagagcattcagacaattctttaaaagatctgtagcagatctgtttcctgcgaatatttcatgtatgcctaacctataactttctgtgttctccattaacccttctgactgctgttccgtgcatctcaggctgcaacacaggtcacagtgcaatggtcagcacatctagtgtctggtgaggcagtggcctggaatacttttcctactgccaatcaagaccggaaggagttagctgcccttagctgctcatgtccaagtactctttgttttatggtgagcatactgcgtgttgtccttgaaagggaggtgttgcttacaccacgattggaaagggacaggaaacagaaatggattgtcattggtcatctttcagctttaatcacatgttaacatgaacgttcccttcactgtataagtcgtctcacacaccggtagacaaggtatgggagaagctgcaagtgcaaactggaggttacaaaacccatcctggtgtatttaatattaaccagtaaataacaccttggtttatgaaggtgaaaacattctgaacaagtgcttaccctgactgtctgctgcgacaacaggcataacccagcactttgcagacaacggggcacgacctgttcaacctgggtagcaaatcacattctctatctgttcacaacctcctttgtctggatctgcc

SEQ ID NO: 3961 - DNA, 678 bp, Homo sapiens
ttttttttttttttcttccttcgacccctcctcccccatttttaggacctccaataaagaaaccaggatgatctataaaagccaaagccaaacatagatcatagctttggaaatgttacaattctaatgaagggagcctccataggaaaaaagcaatgtaacatttcaagctcatcaagagcacgtataatccaggaattatataaaccagaattgcttgcctttgatgtgtagtgggaaaaaaggttttttatacacttttctaaagtccatatagtgattctcaaatgttattgtggatcaaaatcacctaaagggctaaatacagattactgagtccactgacagagtctctgattcagtaggtcttggatggggcctaaatatttgcatttctgacaaattccctggtaatgctgctgctgcttattctgggaccacatttgacaatcacagactcggtgacatctatggtaaaccatgtctgctgctgtcttccctgaagggccttgctttcttgcctctgtaccaccctttgcctcaaattaccttttcttctatcatctgtcagaatctatccaatttccaaggcttgaactcaaaatgctacttcttacaaaaaacgtcaggggtactctgcctgtgtattccattactgtgtgtgcacaactctttata

SEQ ID NO: 3962 - DNA, 736 bp, Homo sapiens
tttttttttttttttttttttttttgagacaaagtctcactctgtcacctaggctggagtgcagtggcacggtcttggctcactgcaacctttgcctcctgggttcaagtgattttcctgcctcagcctcttgagtagctgggactacaggtacgtaccaccatgcctggctaattttttgtatttttagtagagacaggttttcaccatgtttgccaggatagtcttgatctcctgaccttgtgatctgcccacatcagcctcccaaagttaaatgtcttcttttgagaagcgtctgttcatatccttcacccactttttgatgggttttttttttcttgtaaatttgtttaagtgctttgtagattctgaatatcagccctttgtcaggtggataggttgcaaaaattttctcccattctgtaggtttcctgttcactctgatgatagtttcttttgcgtgcagaagttctttagctttaattcagatcccatttgtcaattttggcttttgttgccattgctttggtgtactagtcataaagtctttgcccatgcctatgtcctgaatggtattgcctaggttttcttctagggtataatggtacagatcttacatttaagtatttatcccatcttgcagttcataatcactattaggtgttaacggacgggtcccaatcccagcttctgccatattgggtagccagtttttcccaaacaccatttattaact

SEQ ID NO: 3963 - DNA, 634 bp, Homo sapiens
tttttttttttttgtttttttgcagctgctgatattttatataaaaaagaaaagcaaagcaaaagagaagctgatagtcttgaatattttatttttttaatgaaaagaaaaaacaagaaagttatgtttcataatttcttacaacatgagccagtaaccctttaggaactctctatggagaacaggcctggtgggaaaggctttgggggctgcccccttaggaggaggctagtgctaagagggaaggcccaggtttgagagagcccagaggggcagagcccagagccttgtttggccctgatctctgacttctagagccccagctgctggcggctgctggaatatcctacctgataggattaaaaggcctagtggagctgggggctctcagtggttaaacaatgcccaacaaccaaccagctggccttggtctcctctctttcctcctttggttaaagagcatctcagccagcttttcccaccagtggtgctgttgagatattttaaaatattgcctccgttttatcgaggagagaaataataactaaaaaatataccctttaaaaaaacctatatttctctgtctaaaaatatgggagctgaagaattccgttccgtgggaaaaaagaccaag

SEQ ID NO: 3964 - DNA, 531 bp, Homo sapiens
ttttttttttcttaaaactttgactcttgctataaattgtgcataggcctttttgtctacaagaaatcatttttttattcaacacaaaagattatatttagtttccacatgtttactaaatcaatatttcatggtattccatgaaaagactcatgacttctagcaactaaaccacttgaaatattttgagaaccactaatataactctttcattaattaatatcaagcattttggccaggcgtggtggctcacatctgtgatcccagctctctgggaggctgaggtggaaggatcgcttgaggccaggagtttgagaacaccctgggcaacatggtgagacccttgtctctatgaaaaaaaaaaaaaaattggtcaagtgtgatggctcacacctgtggtcccagctacattgggggactgaggctggagcccaggaggtcaaggctgcaatgagctggttcatgccaacatgcatgccagccatgggtgacagagtgagactgtctcaaagaaaacaaaaaacatacggg

SEQ ID NO: 3965 - DNA, 761 bp, Homo sapiens
tttttttttttttttttttgatgaaaggattactttattcattatcgtatattttaacaatgtttattattcatttatccctctatagaaccaccacccacaccgaggagattatttggagtgggtcccaacctagggcctggactctgaaatctaactccccacttccctcattttgtgacttaggtgggggcatggttcagtcagaactggtgtctcctattggatcgtgcagaaggaggacctaggcacacacatatggtggccacacccaggagggttgattggcaggctggaagacaaaagtctcccaataaaggcacttttacctcaaagagggggtgggagttggtctgctgggaatgttgttgttggggtggggaggagttatttcaatggaggagttatttgcagattgcagagagaaatgagggaagttcgcctacaccgggccatctgcggggtcagtgggggctgctgtatgtcttggctgccgaacggggaaggtgacataggcatcatagccaaagaggcacgtagcgattaggcccagtacccctgcgacgattttggagtggtttcctctctcaacaaggacaacaatggaggtgatcaggtagaggattgccgctatgagggttcggaagaaatcactccagcggccagttgatgaatggtatcttggtgtgccatgtcacacatttttgacacaaagaaaatagcagcaggatctctcaatcaccgacaggaggagtagccgc

SEQ ID NO: 3966 - DNA, 761 bp, Homo sapiens; identical to SEQ ID NO: 3965

SEQ ID NO: 3967 - DNA, 792 bp, Homo sapiens
ccaatctcggttttcaagtggtacactcgcccctgactctatggcgttagcgtttccggttggagagttaattagcagagctctttatgtgacctgtcagatcgcctgtggacgcattccacctgtttggacctccatatgagacaccgggccggatccagcctccggactctagctagtccgcgggttcggatacaatgtcacacaggaaacaagctatgaccattaggcctatttaggtgacactatagtacaagtttgtacaaataagcaggctggtaccggtccggaattcccgggatagctggttgtttttcaggggcctgaggctcctaccctgcagaattaggtaggaagagagaggccctctctgagcactgcacagaatgtcaccttctcatgggcatattttgtttttgaggttccagtaatgatggtttgcttggtaataatagaaatgttcatttaggcctggcgcagtggctcatgcctgtaatcccagcactttgggaggccgaggcgggtggatcacaaggtcaggagattgagaccatcctggctaatatggtgaaaccccgtctctactaaaaatacaaaaaaattagccgggcgtggtggcacacgcctgtaatcccagctacttaggaggctgaggcaggagaatggtgtgaacccgggaggcggagcttgcagtgagccgagttcgggccactgcaccccggcctgggcaacagagcgagactccgtctcaaaaaaaaaaaaaaaaaaaaaaaaaaaaaaaaaaaaaaaaaa

SEQ ID NO: 3968 - DNA, 743 bp, Homo sapiens
ttttttttttttttgagatggagtctcactatgttgtccaggctggtcttgaactcctgtgctcaagtgcgccacccacttcagcctcccaaagcgctgggattacaggcatgagccactgcgccagactgctggaattatttctgaagaactgtgcttcactcccgatgcacataataaaaattaaatttgactcctgaggaaagcaaagcgctttcacgtacactgttttttattgattgtttttaaagacgcatttggattgtaagggagaataaaaagaaaaaataacacacagtttgtccactgcatctctgaatttcaggtgcatctcacacttcaagttagcttaactggcagcatttcttctttttaatggtacaaaactaagggtgtgacttatcatcaacctcatctgacatttgataaaatacagcattatttcatttggctgtcacaatacctctgaggtaatacgaccagctccacgtcacagatgaagaaactgatatgcccatgaacccaggtgggacagtggcaggccagactgagtttaggtgtgctgggtgcaagctccctcgctttccttgaaaccccactgctctgcctctatgtggttaacctttaacacttaaaaacagcccaactgtcctttgaacccaagtctgtcattcattagggtacgttatacttcctcaaactccacatagctatcttgacttactttcctcttttgccccaga

SEQ ID NO: 3969 - DNA, 663 bp, Homo sapiens
  misc_feature (601)..(601): n is a, c, g, or t
  misc_feature (652)..(652): n is a, c, g, or t
ggccaggctggtctcgaactccttactgcaagcgatccccctgccttggcctccaaagtgctgggattacaggcatgagccacaactcctggactttgttggccatttctacatcttcttttgagaaatgcctactcatgtcatttgcccattgtttaatgggattatttgtctttttcttgctgattttaaatttctacaacttttgattgtagcagaagatttattaaaagcatcaagtttccacccagtcccaactggccatagtccctcccagccacattaactgttgattctgggatttacctccttattactgaattataggtttatacctcaatgttttacttgcttaattttagacatgatagtgaagattttgggggtggggttgttgacacttttgaaagccagttgtgttcagggggtctctccacttattctgttttcagacttttaatttgtctccctattttttgttcctgtacttagttcctgtctttttgcagcacctggttccctgcaacacatctctgggaccaatttctccaggctgtgaaactccagtctccagcagagatggggagcaagcgtctcctgnctacagcggccaggctggggagctaccattcttcacatagcttccttcagnctcctgttgtg

SEQ ID NO: 3970 - DNA, 689 bp, Homo sapiens
tttttttttttttttcattaaaaatgttttatttcttcaataaattaaccttggctcacaatgaacatttggtttataaactttaatttcttaaaactttttgactctttggtaataatgcttagcttattgtacagctgtacaaaatatttctttatattcttattctataagcttttttatatattttttttaacattggaaaaacctttttgtgaaaaactaagatataaacacacacattagcctaagcctacacagggtcagaatcctcagtatcactgtcttcctcctccacatcttgtaccactggaaggtcttcaggggcaataacacacatgaagctgtcaccttctatgataacaatgccttcttctggagtacttcctgaaggacctgtcagaagctgttttacagttaacattttaagtagtataccctaaaataatgataaaaagcatagcaaagacacaaaccagtaacatattatcaagtattatgtatgcactgtacataattatatgtaccatacttttatatgactgtcaccacaaacgtgggtaatgtgttgtgctacagctttacaatgaccacatcactagcaataggaatttttcaggtccattataatcttatggggccacatatcgtatatggtatatggtccctcttgatgattaaatgtttgt

SEQ ID NO: 3971 - DNA, 503 bp, Homo sapiens
ggtactagtccatggcctgttaagaactgggctggcacagcaggaggtgagtggcgggggagtgagcaaagcctcctctgtatttacagctgctccccattgctcacattactgcctgaactctgcctcctgtcagatcagtgtggcattagatctaataggagcgggaaccctgttgtcaactgtgtgtgtgatgcatctacgttgcgtgctccttatgagaatctaatgcttgatgatctgtcactgtctcccgtcaccccaaaatgggaccatactagttgtaggaaaacaagctcagggctcccattgattctacattatggtgagtttataattatttcaccatcacctgaggtcaggagttcaagacagcctgacacaatatagtgaaaccaccatctctactaaaaatacaaaaaataagcctggcgcactggatgcgggcctgtaatcccagctactcgggaggctgaggcaggagaattgttgaaacacgaaga

SEQ ID NO: 3972 - DNA, 591 bp, Homo sapiens
tttttttttttttatctgccacgttatggtatcatgttcattctgaagttgtaatatgtgggctcaattattttgtcaatgtataaaaatgattggtttctatatttcctcatttgagctttggtaagtgtgtttctctttcccaaatatttatatatatttcacctaagttcgcaaatttattcctacaaagttttatatgttaccatcttataatagttagatctggaggatctgtagtgtaatatgtgttgctagttttgatttctcttcttgatctgattattcaatgtttgttaattctcttcaaaagttatatgccaactttagacttactcagatttttttctttaacgtatgcttaatattttatttatgctttgatattattatgtctttcctattgggttaaactcattatatctacaatcacaggtacagattatcattattatgctgatatctttcactattaactttaaaacctaacacttgtaactcatgaaacactgctttcagctgccagacccaaaattgatacatcttgtagcaataatcttcactccaaaatatattaatatcccattgcat

SEQ ID NO: 3973 - DNA, 637 bp, Homo sapiens
tttttttttttttttttttttgatacggagtctcgctctgtcccccaggctggagtaagtggcgcgatctcggctcactgcaaacactgtctcccaggttcaagcgattctcccgtctcagcctccacagagtagctgggattacaggcacccgccatcatgcccggctaatttttgtattttagtagagacggggtttcaccatgttggctaggctgatcttaaacttctgacctcaggtgatccgcccgccctggcctcccaaagtgctaggattacaggcctgagccacggaacccgaccagtaattctttatactaaactttccctttcaaattagtatgtggtttttgtctactgactggaccctgaccgatacagataagtaagtcacaataggccgggcgcagtggcttatgcctgtaatcccagcactttgggatggatggtgggtggattgcttgaggtcagaagttcgagaccagcctgaccaacgtgaaacctcctctctactaaaaatacaaaaattagctgggcgtggtcgtgggtgccaataaagccagctattccagaggctgaggcaggagactcacttgaacccaggaggaaaaggttgcagttagccgagatggacact

SEQ ID NO: 3974 - DNA, 636 bp, Homo sapiens
  misc_feature (128)..(128): n is a, c, g, or t
gaaggtctataaaaagcaggagttcgtttagtggaaccgtcagatcgcctggagacgccatccacgctgttttgacctccatagaagacaccgggaccgatccagcctccggactctagcctagccgncgggacggataacaatttcacacaggaaacagctatgaccattaggcctatttaggtgacactatagaacaagtttgtacaaaaaagcaggctggtaccggtccggaattcccgggatctgggatcattggcagccacatgtagaatgaaactggatcctcctctctcaccttatacaaaaatcaactaagatggatcaaggacttaaatctaagccctgaaaccataaaaaatctaaaagatatcattggggaaacccttttagacattgacttaggcgaggatttcctgaccaagagcccaaaagcaaatgcaataaaaacaaagataaatagctgggtcttaatcaaactaaagagcttttgcacggtagaaggaacagtcagcagggtaaaccgatcaaccacagagtgggagaaaatcttcacaatcacacatctgacaaaggactaatatcaatatccagaaactacaacaaactcaaattagcaagaaaaaaaaaaaaaaa

SEQ ID NO: 3975 - DNA, 745 bp, Homo sapiens
tttttttttttttttgcacctaaatagctcatttatttaaaaggactcttttggaggggccctaggtaatggggagtaatgactccccttctcacccccagccctggcaggggttctaggcaactcaaccaaccctcacacacacacacacacccactggggtgcacccaaaggtggcctcacgtgggagtcagagctgttatggccgttggagctcaggggccaccccagctcctgctgagggtggctcaggtgccctgaagtgagggtacagaggtggccccagtttgggttcggcctctgcgtctccacgtggcagggagggtggcctgagcccctacagcttatctggcaggacctgcaggcagaggggaagccaagctaagcagggagtccaggagagggccgcaccacagagccactgaaggaggcttcattcgtgtcctgtccccaccgcttctggctgtgtgactttgggcagggtcctgcccctctccgggccttggcgaggctatctgagctgcaggtaaagcacttggcgcggagccagtatgcagtaggcgcccatgcgtgctaactagggtgagtatgttcattcatttcggaggagattccacttcggacattttcagggcattgaatgttcttaggctctcgccgtgccccgtctgcccagggcaggatcctctcgtcctgtgctggtgcgggtcttgtgcgactctgcctccggctccgcccctggtcg

SEQ ID NO: 3976 - DNA, 682 bp, Homo sapiens
tttttttttttttttagggccagatcacgtgtatttgagagggaaagggagacaggcaaatggcatgacacacagggtttcctagctgggagagcctctagctgcttactgataaccttcacattctacttggccttcacagaaagttggctaaagctggtattacctgaggtacgtgggccatgtggggtgggttggtatacgccggctgaacgtgagaaggatggatcgtaaagacagtctgttgtgctgctgggaaactattctgtggcgactgcgtgttggaggcaggtgtcatggagggtggagttggcgcaagccccgcgtggtaaatggctgactgctgctgtggactggccagatggagagcctgggcggcctggtgctgatggtgctgaacaggactgggtgcaggatgacttccaccatgttggctttgctgctgtccagtgggggtagctgaaggctgagggtgtggagtatgtgggtgcagggtagcgttagggtgcgcatactgctgagcaagggagcccgtggaaacatacatcgcatgcgtctgctcatgagccccgtactgagttgctgaagaagatactaaaccaggctgggcgtgtgttggtggtgccatcattctagcattaccctgtattacaggactatagacatgaggatgctgagactt

SEQ ID NO: 3977 - DNA, 739 bp, Homo sapiens
  misc_feature (237)..(237): n is a, c, g, or t
tttttttttttttttcttttagattttttaaaaattttatacaaatagactaactttgatttaaagtaaacatataaaaattgagaagaatattgcttgcaacaatggacttggaaggagaggaatggattaggcaggggtacaaagaaatggctcctactcggtagttccaggcacatgcccagcactctgcagaactctcacagggacaccctctgctgcaccgtgtccttcagncccacaaagtctgactgattttggtaacaacaacttcaggtcaggaaaaaaacaaatgcaagaaaatcggaaggcacaagcacccatgtgatctagaatgttcttggggtgaggaataaggagggaaagggatacttttggcttcagcactacagtcaatttcgccattgttgaagaaaaacggtataaaataacgggtgtacagaaatggaacaagcacagcccactggtgaggaagaaagctcagaagacagcgcgcagaaatagtgcagagagaaatgaccagtactatttatttggaagtctgcgccatggtgggtacaaactacatcccctgctctgtgggaccaaaatcaaaacaggtcaaaaacaaatgaacaaaataccccatcccaaaaaagcagcagaaggactgcaagaagtcttacaggacacactggccagccctgagtgcaagcagtctgatccacggtggctcgccaattcagataacgcccaggga

SEQ ID NO: 3978 - DNA, 757 bp, Homo sapiens
tttttttttttttttttttttgaagccttgcccaagctttaatgtcatgctaaccagttaccttgttagagctgggaagccaccttttgctcaaaatgcagacttctgcctttgaaaacacaccacacctgattttaagtgcttaaaggacagaaaatgtcgttgctttaaattgttgctttgttcagagacatctggatttgctgtatccatacaagcaaaagcttttccaattccagaatcaacccacactaatttgttattgcctcgtactgtattggcccagctgtaatcaactcagcaggcttttggttgtaaattcaagtggaaattgagttggtcttatttgtgcccgttgatatctgagggctgtgaggaagatgggcagtagggtccaaggggaattaggtggttggaaaaggctggaaccaagtactggggccgggtgggcccggctggttcccttcagaggccaccaacacggcccgaagcccagcggttagggggccttgaagccactttggcggaattatagccgaaagttccttccagaaccctccgtaattcgccccagaaggcttcccagggcacacaagtgtcaagggcctactcaggtgctgggcagagctctctgtgtgttattaacagaagaggctacggcttaacagtggaaaggagcatgtgatggctacggtgggcagcctgtgtactctgcccagtttgggtggtccagtcccccgattctgtgtggaggttt

SEQ ID NO: 3979 - DNA, 750 bp, Homo sapiens
ttttttttttttttttaagtagagatggggtttcactatgttggccagactggcttgaacgcctgatctcaagtgatccacctgcctcccaaagtgctgggattacaggcgtgagccaccacgcctagactttatttttattttttgagactaggtcttgctatgttgcccaggctagagtgcagtgtctattcacaagcacaaatgtagcacactgcagcctcaaactcctgggctcaagcaatcctcctgccttagcctcccaagtagccaggactacaggagcacaatactgtacccaattcagttttatttaatttggaaatattaatccattgagttatacaactgggttgtataactgggtctcagactgagagtaatagatagcccaagactaaatagctacatacctccactgttataagcaaggctctgtactggtataaaataagccttgctgtagtttgctatgtccccatttctgccttcattggagtactaacagcaaaatccagagcctatcttgattggatttattatactccaattggagagtagggaagaattttaatgaaatctcacgaagtttttctacattaagcttaacttgaatgacttgaaaaaggaagtagctatagtggctattttacttcctggcaatcctaatcaaaccaagacaatgcaggagcctgcagaatggatggttagagaactctttggactcccgttattctaccaaatctgtga

SEQ ID NO: 3980 - DNA, 725 bp, Homo sapiens
ataccgtcacatttaatgatcctactgtgaattcaagaattcacgatgaaagttggattgagcggtattttggtgttcattctttgctgatactcattaatgaagttagttggagaatttattgcttcagtacagtaaaaaccagtgtgcctttttttttgttactactcccccctccccgcattgttttatttttcgaagaagcactttattcagtttttctaagccacgggattgcccagatgaggaccaacggtgcagttcttgaaaggtcattattggcaagtttgtgagggagctaagatgagttgagataaaccagtgttactgttcttgtattctgtcgtggactcttggggatttgcaggctgcattaagtacaagtctggtccagttttgggtgcacgtattccactgaatttggttcgtctggcttattatatgaacatgattctgtttcacttccccagatggaactagcttaaatgtctatcatttatagtgacaaatgatcaaaatggctagagtgtcatttattaacttcagttgtagtcctttaccttaccttctgctaaatgaaaaagaaaaatttgacaaatactgtgtgcgtccagttgctctgagtgatttctcgtgctaagtgagtcctgtggagaagcgtccctgggctttctcgattggtgggccctgtgtttttaaaacccattttcttcacctgatgagct

SEQ ID NO: 3981 - DNA, 131 bp, Homo sapiens
cttacctccctctctcctactcctgctcgcatctgctatagtggaggccggagcaggaacaggttgaaccaaaaaaaaaaaaaaaaaaaaaaaaaaaaaaaaaaaaaaaaaaaaaaaaaaaaaaaaaaaaa

SEQ ID NO: 3982 - DNA, 254 bp, Homo sapiens
ttttttttttttttttttttttttttttttttgacttgttgcccaggctggagtgcaatggcgcgatctcggctcactgcaacctccgcctcctgggttcaagcaattctcctgcttcagcctcccaagtagctggggcaggggaatcgtccgaacccgggaagcagaggctgcagtgagcatgagatcgcgccgctgcactccaacctggacaacagagtgagactcgatgtctcaaaaacaaaacaaaacag

SEQ ID NO: 3983 - DNA, 735 bp, Homo sapiens
ttttttttttttttttttttttttttttgcattaacagtaaccccaagaaaggcatcagggttctggagtggttgtttgagtgacacagcacaaggccttgatttcatcatgcttttgctgtggatgtagtgtagcttgctgaacaggtatggaagctgtctttgctgttaagtacttctcccgtttgtttatcaacctgcagctaacaggatgtctgcttttttacaggtttatttcacagagcagtgtacattcttgtcttccaggggaacttcaacatggagttacttttgatccctcagttttaattcagtgtctaaaggtttacaagttcaacttactctattttattcagctctttcacttactctgccatcacttcctacttgaatctgagttttagctactgtagaggtctcagacctttcctttttagtactattagccaggtaaaacttgggttcttgtgagtggtagggatgagtttttaggacagtattcaaagcctttttaaaggaaccaactactcaaatgctctacaatgccaaaaatacaatactcctgcaggttttcccaagcaaggccaaaacaatcaaaatctgacagaaaaacacagctgtcagctctggaatctgatgataggctactttttaatgtccggacatccttctaaactgccacttacaggtcactgtagctgaaggtggtcgttggtgacccatgcttgttaggag

SEQ ID NO: 3984 - DNA, 723 bp, Homo sapiens
  misc_feature (628)..(628): n is a, c, g, or t
ttttttttttttttttgatgttgttctagagatttcagtatatgtacttcatttttcaaagtctacttagaattaattttttttttttttgagacggagttttgctcttattgcccaggctggagtgcagtggtgccatctcggctcattgcaacctctgcctcccaggttcaaccgattctcctgagtagctgggatttcaggcacacgccaccacgactacctaattttgtatttttagtagagagggaggtctctccatgttggtgaggctgttctcaaactcctgacctcaggtgatccccctgcctcagcctcccaaaatgctgggtttacaggcgtgagccaccgcacccagctagaattaaaattttatcacttcatgggtaacttataaaccttacagacatttggttctctttaaagtcttctccttcatattattagttgtttccgacctatacacattggaaaccccaacagacaatattgttaactttttatttctaccattatacatatcttaatgaacttaagaggagaaaaaacaatttattatatttatccagatatttattattttcgttgctttcctttccttcatggaagttcccaagtttctctctgngtatcacttatttctgtttaaataactttccttagcatttcttttaaagcagcattgctgttgatgaattatccctttggggttccaggaattgg

SEQ ID NO: 3985 - DNA, 807 bp, Homo sapiens
  misc_feature (466)..(466): n is a, c, g, or t
  misc_feature (531)..(531): n is a, c, g, or t
ttttttttttttttttttaacagattatgtaatgtttatttatattcctttggctcaaataagatgaaaaaatgaatcttagctgaatttcaaagatgatgagcattttatacactagggattgtgattccctataagatgaaaagaggttattttgatctcaattttcgttttgtaatcacccattgtcaaatttacttttcaaagtttttttttttaactattcttaagtttgaaaactttctagaccttagccagtatgtagaatgcccaatgcatatggttgactggtggacaagcttcagaacccattggttaccttaaaaattaggaaaaataggtcctattattcggtaaatgtaacagagtggttttgggaaggaaatggctttcccttttcccgaggacacttaaccaatctttacattcctagtgaactctagagatagtgatattatgtgcgtgntcacgagagagcccaccacgagctcgtggaatatttcgagttacaccctatgtgcgccacttaanaacaccctattttttttataagagtttgagcttatttcggaaaacacgagggtattatttctcgagggcccacgtgcacttccctatattaaacacgagttgtggaagagaaaaactatttatttgtggtagccaaaatattatagaatacgtggatatttggtgatccatcactggatttgtcaccttataccagttacaaaatgtgtttaagtgggcttctggtgagtcccagcttactcgagaggctgaggcgggacaatgggttgaacccag

SEQ ID NO: 3986 - DNA, 678 bp, Homo sapiens
  misc_feature (190)..(190): n is a, c, g, or t
tacgagtgaatggaatttgggctttaatgaatatggcatttcaggctgaacaaaaaaataaaagcagatattttacgaagcttgagtactgaacagctattccggttattatcagattcagatttgaatgtgctgatgaagacattgggacttcttagaaatctcctctccactcgtcctcatatagatnaaataatgagtactcatggaaagcaaattatgcaagccgtcactcttattctagaaggggaacataacattgaggtcaaagagcagacactgtgcatcttagccaacatagcggatgggacaacagcaaaagatcttattatgaccaatgatgatatcctacagaaaatcaagtattacatgggccattcacatgttaaactgcagcttgcagccatgttttgtatatcaaacctcatatggaatgaagaggaaggttcacaagaacgccaggataaattacgagacatgggcatcgtagatattctacacaaactgagtcagtcaccagattcaaacctttgtgacaaggcaaagatggcactgcagcagtacctgggcatgatgggagtgcccctgggcacctgcgagcatccaactccttgttaagcgagtacaggaacagctcatttgatcctctatttgccagtccctgtgactgaaggagct

SEQ ID NO: 3987 - DNA, 589 bp, Homo sapiens
tttttttttttttttttttgtatttttaatttttgtaggtacatagtagttgtatatatttatggagcacattagatgttttgatatgggcatgcagtgtgaaatacgctgcatcgtggagaatggaatatccatcttctcaagcatccatcctttgagttacaaacaacgcaattagactttttattttaaattgttcaattaagttattattgatgacagttaccctgttgtgctttcaaatagtaggtcttatttattctttctaactactattttgtacccatgagagcgactttagtactgggtttgccagatgtaaggaataaggttgttttggccggatgttagggagaaagaggcacagccttcgtggtggaggaaatgaggtgagcagagacacagaggcaggagagggcaggaggccagggatggtctgggttggagtaaacactgggtgaggagggaagtggtaagccagccttgcttactttgcttgggagtttggattttcttctatgagcacttcaaagtcttcattgcctgtacttcattgcaaaggctttcttgtttatctgcctatttgtag

SEQ ID NO: 3988 - DNA, 586 bp, Homo sapiens
tggagccatcagtgtgtatcagccccactttactaagtagtcatccttttccctttgatctgtaatgcaccactgtcgtttaccacagtttccatttatggagggctctctttctgggctctcttctgtcccattgatcagtttgtctagccctgctctagtaatgtctgactatcactccagaggaagccttgatatctgataaggcccatcctccaaccaatacccaaaaatgtataaccttgcgaggtacagtggctcatgcctataattccagcactttgggaggctgagatgggaggattgcttgaggccaggagttcaaaaccagcctgggcaacaaagtgagaccctgtctgtaccaaaactggaaaaaaaaaattgcagggtgtggtggcatactcctgcagtcccagctatctcagcaggctaaggcaagaggatttcttgagcccaggagttcgaggctgcagtgagctatgatcacacccctgcactccagcctgggccacagagtgaaacccatctccaaaaaaaaaaaaaaaaaaaaaaaaaaaaaaaaaaaaaaaaaaaaaaaaaaaaaaaa

SEQ ID NO: 3989 - DNA, 591 bp, Homo sapiens
tttttttttttttttttatggactataaagtgtgtacaaaagattgacctaaaataaaatcacttcattgaaacactaacacggccaccggctcatatcccaggcaaagtgattttagaagttcatttgagcctggtgcggtggctcatgcctgtaatcccagcagtttgagaggccaaggcaggtggatcacttaggcccaggagttcaagactagcctgggcaacgtggcaaaaccccatttgtacaaaaagtaaaaaaattagctggccgtggtggtgcatgcctgtgatcccagctacatgagaggctgaggtgggaggatagcttgagtccaagaggtcgaggctgcggtgagccatgtttgtgccactgtagtctagcctgggtaacacagtgagactctatctcgaaaaagttttttcaaattcagaaataatttttctgaaatcctaccattaatattttttactgaagatcctctggagacctatctctattgacgtgtgaattttaagaaaagaattttacctaagcgagattgatatctgctgttttatatctcggtttctgaaatcaatcatatattgg

SEQ ID NO: 3990 - DNA, 570 bp, Homo sapiens
ctccaggagcacagcggcatctttggcttcagcgtgtcccataccacgaggaacccgaggcccggcgaggagaacggcaaagattactactttgtaaccagggaggtgatgcagcgtgacatagcagccggcgacttcatcgagcatgccgagttctcggggaacctgtatggcacgagcaaggtggcggtgcaggccgtgcaggccatgaaccgcatctgtgtgctggacgtggacctgcagggtgtgcggaacatcaaggccaccgatctgcggcccatctacatctctgtgcagccgccttcactgcacgtgctggagcagcggctgcggcagcgcaacactgaaaccgaggagagcctggtgaagcggctggctgctgcccaggccgacatggagagcagcaaggagcccggcctgtttgatgtggtcatcattaacgacagcctggaccaggcctacgcagagctgaaggaggcgctctctgaggaaatcaagaaagctcaaaggacccggcgcctgaggcttgctgtctgttctcgggcacccgggcccatacaggacaggcag

SEQ ID NO: 3991 - DNA, 662 bp, Homo sapiens
  misc_feature (660)..(660): n is a, c, g, or t
tttttttttttttccttttagttgcagattcctttccccaagcatcaaaagacaagtaattggtggtatatatttaatattgcaggtgaggagacaaggattgagaatgggaagcttattgtagtaacagactcttgtggaagagtagagtcatctgggaaaatatctgaacccatggaggctcataatgagggctctaacttggaaaggcatcaggccaagcccaaagagaagattgagtataaatgctcagaacgtgagcagagattcatccagcacttggacctgattgaacatgcgagtacacacacgggaaagaaactctgcgagtctgatgtgtgtcagagttccagtcttacaggacataagaaagtcctctctagagagaaaggtcatcagtgtcatgagtgtgggaaagcctttcagaggagttcacacctcgtcagacatcagaaaatccatcttggtgagaagccttatcagtgcaatgagtgtggcaaagtctttagccagaatgcaggccttttggaacatctcagaattcatactggagagaaaccttatctatgtatccatcgtggaaaaaattttaggcgcagctctcaccttaatcgacatcagagaattcacagtcaggaggagcccctggtgagtggcaangg

SEQ ID NO: 3992 - DNA, 722 bp, Homo sapiens
tttttttttttttgataagctgaaaggtttcaggttattatttaaagatgtaatctgaaacataaatatcgaaacaacttttaatataatagtgcttggtatgtggttttaataagtatttctttatagtgttgtttgctttataacatacttatcaccttctagaaggaatagctaaaacagtttcatgaagttataaatgattcatgtttccctaagtaactcaaatccaaaagatagactatatagagattatcattttaccctatcatctgagcaggtaaatgtagaactagtataaaagtgatatgtgatgtgtatcctcacatactctttaaatacgaagtaatttacacaataaattttttattaagaaaaggggaggggcatgaataatggtcggaaaacatgatgattaatatgatgattcatataagaaaggcggactaattacgaagaatgaatctacctactagtcaagtgcgagtcgaacaaatacagtcagtcatcaactgcttgcctcctcagcatatgacgtacggtatgcgatcacagcaacaaccacacaacaacaaaaaacaacaatcaagatgtgactacgggaagacaacaggttcggatacacgacacaacacacaacaaacacaacagcaaacgcaaactgggatcgggaaccagtactcagctacagctaccaggagatccatagaagaaagctatgt

SEQ ID NO: 3993 - DNA, 744 bp, Homo sapiens
  misc_feature (430)..(430): n is a, c, g, or t
tttttttttttttttagaattagcaagttcttagctccctcatacctagataaagacttcctggaaccagtgccctgtgtgtcgagccctatgccaaggcactttcttccttgtatctcttgtaatccttcagcagccttgtcagggaaagcaggcttatcatcatttccatcatcattacattatcatcagtttattttatacatgaggaaactgaagagcagctaggacttgcccaaggccgcacagccaggtctgtgtgactccaaagccctttttttcgatcatcctctctccccttcagacaagttggtcctgaggttcttcccttcccctgtcccggatccgtgtctcagactgaaaggaggactttggtgtcctttaatttcccagctgcgattccattcatgtgtggctgagtgtggccagngtcctgactagctccagggctggggccgaggggcccagccacgtgctcccctcaagggaggctgccctgtctgcgaggtcagtgcgccccaggatccccgcccgcctgctgacacctgcaatgctttcctttcagttccccccgaggagccccagctctcctgcttccggaagagccccctcagcaatgttgttgtgagtggggtccctcggagcaccccatccctgacgacaaagctgtgctcttggtgagggaagtcgtaagtatctgggctgagctatgtgcatgtggttccttcttccgagggccccaga

SEQ ID NO: 3994 - DNA, 751 bp, Homo sapiens
  misc_feature (56)..(56): n is a, c, g, or t
  misc_feature (105)..(105): n is a, c, g, or t
ctttcctactggcccgaacattctacgtattagtcatcgctattaccatggtgatnggtttgccagaacaccatggggcttggataccggttttgacttcccggngaattcccaggtcctcccaccccattgaagtccaaggggattttgttttggccaccaaaatccacggggacttccgaaaatggttcggtaccaattccgccccatggaggccaaatggccgttaggcgtgtacgttgggagttcaaaataaccagagttcgtttagtgaaccgtcagatcgcctggagacgccatccacgctgttttgacctccatagaagacaccgggaccgatccagcctccggactctagcctaggccgcgggacggataacaatttcacacaggaaacagctatgaccattaggcctatttaggtgacactatagaacaagtttgtacaaaaaagcaggctggtaccggtccggaattcccgggatatcagtttagtttaaccctacattttgaggtatctaaaaatagttgtaaaaatctgatgatagttaaaatgttttcaaagtttaaaatgttttacatgtcttacatcttttgattcctgtgttgagataaattattattttgacagcaaaaaaaatcaatccatattgttagggaaaaaaaagaagaaaggaggtggatagcaaatgaactgtgttggttgtttgagttgcccatgctgaagacgcatattaaaaaaaaaaaaaaa

SEQ ID NO: 3995 - DNA, 335 bp, Homo sapiens
ttttttttttttttttgttttgtttttttttttgttttttgagggtgttggggtttgagagatcagttggacacgattggcagggagagcacgtgtgtttttatgagaattatgccgagataggtaacagatgaggaagaaatttgggcttgattgaagtaatgggggctgtctgtgaagctttgtggcagtacagcctaggtaatttgctgagcttgatgggtgtcaggctcagtccaagtgaaagcgaagagaggctgggattaaaggtgcaaaggaatacgtaaagaaagcatgtctgagatctagaacaggaattcatggggttggtagag

SEQ ID NO: 3996 - DNA, 684 bp, Homo sapiens
ttttttttttttttgttgtttggttggttggtttttttttttttttagacggaatctcactctgttacccaggctggagtacaatgacgggatcccgactcaccacaacctctttctcctgggttgaagcaattatcctacctcagcttcctgagtagctggcatacaggtgcccaccaccatgcccagctaatttttgtatttgtagtagagtcaaggtttcactatgttggccaggctggtctcaaactccggacctcaagtgattctccctcctcggtctcccaaagtgctggggtcacaggcgtgagccaccgcgcccggcccaggttctcttttgaattcgttcccactggcctttgtgtttttagtaaatttggccctctctgtctttgtgatgtcatcagcctttgcggacctgcaatgtcccactcctctgccagtgtggagcccaaatacacatcatgtcctctttctctttgcaagcctggagggcatccttagactaggctaacttgagctcagctcttgtctggacattgctgactgtgtggagtctattattctgaggtggacagggaggagcaggcagggaggggctgagagctgaggtttctgtcggggtgggtggtctaaacacctgctgcttgcattcaggcatctgttagttctgctaggtcctgc

SEQ ID NO: 3997 - DNA, 500 bp, Homo sapiens
  misc_feature (380)..(380): n is a, c, g, or t
aaaataataaataaataaaataataattttctagaaaccctaccttttatcttaccagaataaaggaaattatataaaagaataaatccatatagtcattcacgtaaaagaggaagatgtactaagtattgaatttcatatagaaagttaaaaatgaagtcaatttaggaaaattaacttagtactatgctaggactataagtacttttaaaaataatttattttgctaaacatttatagaattccttttttaaaaaaaaacaggcttatggagacaaagtagatttgtggtttcccagggttagggagatggagcgatcgagggagagcagcggctcagaggggtaaggtttcttctcagggtaatgaccatgttctanaattggtgtggtcatcgttacccatgtagattactaaaagccattcaatagcacacttatatactgaattgtgcatatatgattgatttcataagctgttataaggacgattcaaaacca

SEQ ID NO: 3998 - DNA, 677 bp, Homo sapiens
tttttttttttttttttttttttttttggctaaaagtggactaaatatcttgaaatactcctgccgccaagcacctggaaatgctgcataaaatataaccaacaattttttaaatgtataaactctcaggaatgaaaagtgaaaccctcaaagtcccaacaaaaagagaaatctggaaaacaaggactcaaacttttgtaactctaaatgtcactgccaatctaagtaacaaagggtcttgtgtgtaaatgacacatggagtggccacaaggtagggtgataaaactgagattcttatgatgaaccaggaccctagaggtctatatcctctgaaaacaggtggactggaaaaaaaaaaaatccacccacagaagtaagcaacaaggaacctcctctatctcaggctgagctctgggtgaagggaaaaaaatttcccctgagaatttataaccacagacctgccctcatgtgggtttgagatacagatttacactactacaagggcaggtaaaccccaagcagataaattaacatgaaaatggattcccagatgtcattgctgaggtcctggtagaagaaaagaagaagcctcttggtaagaacacatcctcaaataaggtcccacaggattctcacagataacgaaagcttgcaaccttaactcacaaaacaccttg

SEQ ID NO: 3999 - DNA, 693 bp, Homo sapiens
ttaaagaatggtactgtcttctagaatatttcattctttcttctatattagcaactaggcttgaaatattgatttctctttctccttaggtctcatgactcgtctccgatatccagttgggctgatgggcagttgtttaccagccacagctgggtttagctacggtaaagtgtgcacacatgctgaagtaaaatagcaaatccagtagtaaagaatctacctggctgggtgcggtggctcacagctgtaatcctagcactttgggaggcaaaggtgggtggatcaccttaggtcaggcgttcaagaccaccctggccaaaatggtgataccccgtctctactaaaaatacaaaaaattagccgggtttggtggtggatgcctgtaatcccagctacttgggaggctgaggcaggagaatcgcttgaacccaggaggcagaggttacagtgagctgaggtcatgccactgcactccagcctgggcagcagagtgagactctgtctcaaaaaaaaaggaaaaaaaaaaaagaatctagttccctattgattctttgaactctcagcacttccgaaaatgtctatctagaaacatttcttctcaaagttacatcacccttctgagatgttacatatgtgcatctcatagggcatttaacttggggaaacgcttccgttgactccgattcctggtac

SEQ ID NO: 4000 - DNA, 779 bp, Homo sapiens
ttatccgggggttccagtcccccctggagtcagggattgtttggcaccaaatcacggacttccaaaatgtcgtacaactccgccccatggacgcaaatggcggtaggcgtgtacgtgggaggtctatataagcagagctcgtttagtgaaccgtcagatcgcctggagacgccatccacgctgttttgacctccatagaagacaccgggaccgatccagcctccggactctagcctaggccgcgggacggataacaatttcacacaggaaacagctatgaccattaggcctatttaggtgacactatagaacaagtttgtacaaaaaagcaggctggtaccggtccggaattcccgggatattggttatggttcattgtccggagagtatattgttgaagaggatagctattagaaggattatggatgcggttgcttgcgtgaggaaatacttgatggcagcttctgtggaacgagggtttatttttttggttagaactggaataaaagctagcatgtttatttctaggcctactcaggtaaaaaatcagtgcgagcttagcgctgtgatgagtgtgcctgcaaagatggtagagtagatgacgggttgggccaggggattaattagtacgggaagggtataaccaacattttcggggtatgggcccgatagcttatttagctgaccttactttaggatggggtgtgataggtggcacggagaattttggattctcagggatgggttcgattctaaaaaaaaaaaaaaaaaaaaaaaaa

SEQ ID NO: 4001 - DNA, 715 bp, Homo sapiens
ttttttttttttttccgttgattattcttttctggatgaaagctactgacctccagccaaaaaaattctaaaatgttttccttcataccaaagacaagccagtgtctaaagcagttatttatacaggtcattttaggacaaattcacagagattatggcagcctcttgaggatctgggaaccaggaagctaggaaaataccaaactaatttcactggtaactcgatcctcttgcctcccattccagaaatggctacacgttattaaacgcctgcaatgatgagtagacaattccctgggcactctggagttcccatctttaacaactttgcaaagtaggagtactgtccatattgcacagaggtggaacaggagttctgagaaggaaagtaacttgctcgggtcatacagataggaagtggttatcccaggtttcaaaactaggtcacgtctgcttccagagtcagtgttcctctcctacatctttccagatagaaacttgctaccaatgaagcttgccctaactgtcagcgaagctattttcagcaatggtacaatttctccacctgaaagcaggctcatcaaatgagagaatgcatagaaaagctctgaagcgctgttactgtcattaatagaagatctagggaaatttgcatcaccaaagtatcaaatcttgctactggtcaatctgggactcacaacattgcaaggccgac

SEQ ID NO: 4002 - DNA, 681 bp, Homo sapiens
ttttttttttttttttttttttagagacagagtctcgctctgtcacccaggctggaggctcactgcaacctccgcctcccgggttcaagcaattctcctgcctcagcctcccgattagctgggactacagcacatgccaccatgcctggctaatttttgtatttttagtagagatgggacttcaccatgttggccaggctggtctccaactcctgagctcaggtgacccgcctgcctcggcctcccttttgctaagattacaggcatgagccacagtgcctggccaaccactgagatttagaaagcagtcgagtccactataccgcacctcacctggtttcttcctctgttggggcccctcgtggccactgttctcctggtacttttcagtcctgtttatttaaattgatggtgagctgtttgtcctcccggctccaacacttccaccttcagcttgtattaccacaacaataccagcccttcaagcaattctgggtgaccccaaaactcatttgaactcagcagcccaagagtttcattcctctaactttaggggactcagtgcctctggtcagcatgaagtagatacagaagcatgacctccatccctaatccctcaagaatgaggagtggaacgtgtcggccggagggtggggacccggtttgtaatctggaactgcg

SEQ ID NO: 4003 - DNA, 798 bp, Homo sapiens
ttttttttttttttttcccattttctagtacagactaatttcctgtttccccattaagtgaacaaaagtctatctgtgaaaatctgatgcaaagaggcctatgaagtgatatagttactgaatttggagagtaaacaattctgtttcatatggatagaaaatcagccctttctcaaactttgctggaaacacactcccttgagaatgttagattaaaaagatattctatacctgcaaaacaaagactggaaggtgagatttcagaagtctataattaagcagattatttaccatacatagtatctaaaatgtcgagtaaaatagataagtagaaggtgagttttaagttgtcttagtgatgataaagatcacatcaattggaggttggttgtaagttaatctgctgtctgactgatcaatcaattaattctatcttgtttgttaggcagtgaactatcttttgttaatgtcagataacattaggcaacggagcttgcccttgcactgccgagtagagtacaggtaaggtagcaaagatgaaggacatgttcccttaccagtcaatgttcacctgtcagtgggaaatggacttgaactaggagacggatcagggcctagatttatgacattctagctagacaactttgcaatgttgaataagctaagtgtccttattgtaaaatggagatcataatatctatatcatatatgggtgactagaactaatgaccttatgcacctgatgcgctgatgggatattgagctatcagcaattttcccagaacaagatttctctga

SEQ ID NO: 4004 - DNA, 699 bp, Homo sapiens
ttttttttttttttttttggagaaaaatgaaacaatttatttcaacttgaataccaactcttcagagaagcaggtaccatatcttacttctcttcccattatcaaagtaacctctccacaggcgaactcattttgaggagataaggaaggccagttgagtatatggcccaggtgcagcttggagggccagccttctcaaatgtcctggtgtactggtggggaggctgccccctaatagagcgagcgctgagaagcagccagaccacattctataatctttgaacatgctggcagatggaggcttttaggagaatagttttttaaacattctgacaaggtccagccaggaatttctaaggacttagaaatcccagcgtcatggagttgcttggggtcaacacaagtcacctcttagcttcatgccttagaattctcaactggctgttttcttaccacctgagaaactaaatttctcaattataaaaatctcatgtattattactgttagaagtatttgcacctcatatatatctcatttacagtttgaccttgggatatcgagttgtctcatatttaggtatgaatacaggtttctattttaaacattgattctcacatgcttcttaattattcatggatgacaagccattatagtagtccccttcttatccacggctttgggttctgggggtttcaagt

SEQ ID NO: 4005 - DNA, 676 bp, Homo sapiens
gtaggcagattaagcctgtactcaagcagtggtaccaaaaatattttggaaataatttgatatatgaaaaaacttatcaaaatggtcattctgagaaaaattacctttattaatttctttataccgattttatgtgttaacattgtatatatgggaagtagtagtcttgtaaccttttagtttttagggcttctataggtatttatttatttatttatttaattaatttcaatagttttttttggggaacaggtggtgtttggttgcatggaaaagttcttcagtggtgattctgagattttggtacacctgagcagtgtacactgcaccctatttgtagtcttttatcccttacccccctcccacgcttcaccctgagtccccagaatccattattttattcttaggtgtttgggtcctcatagcttagcttccacttataaatgaaaacatgtgacttttggttttccatttccgagttacttcatttagaataatggtctccaactccatccaggttgctacaaatgccattatttcattcctttttatggctcagtagtattccatggtgtgtgtgtgtgtgtgtgtgtgtgtgtgtgtgtgtgtatgtatctcacatttctttatccactgttggtgcttctgtttttgcatgacattgtctgtataacgt

SEQ ID NO: 4006 - DNA, 315 bp, Homo sapiens
gaggttgggaagtgggaggtgcttgcccagccccgccccctccggacgcctgaaatcgcggcttctgattgggcctttgtgtatgtttcctcctctgaaaagattaagggttcatttgttaacgaccatccgcctgattcggtccgcggtgttagctcctcctagggggcgggacctcacttggtctactcaatgcgcggtaattaaagtaactcggttggaaaactgagtttcacttactcggagaacaccgtgtctctgtgatagagagagatgataatatagtggtgctgcgagagggtgctcacaggagag

SEQ ID NO: 4007 - DNA, 321 bp, Homo sapiens
tttttttttttttttttttttcacgggaaacaggaggatttatttagatgtacaccggctcagtggatttgtatctgaaaagctgaccattgaacaaagactgagtgtggtttttataggcaaacttacagaagcaaaacaaaagcagttaatgatacagtcacaggtcatgtaatctatagcataactgctgacttagcataacttgtggctttgcacagctgttggccttgcagctggtggtcaaaagaaaaaccagagtctacaaatcttactaaatacaacccttggcgaaacagtgcactatttaatggtgtccgc

SEQ ID NO: 4008 - DNA, 667 bp, Homo sapiens
gttcagctctccagtcattcaactaacatttttaaaagatctgttatgtgccaggtgcttcagcaggcattagggatcaagacttagactagggagagagttaaatccatcaggtgatatgatccaggtacaagggttttgtaggggcacagaggcctcaagtgggcatttttgtcatctgtccagtgtagaatacctttacattgagtcttgaaaaagaggaaagtatcatgaacgagggtatgggcatgtctgaagatctacaagcagtttagtgttaggagagtctgggcctggctagagtcagtgcttagagaggtagcaggggtcagagtcttgaatcatctacacatgtatttgtactggagtggggtgggatggaagcctgagttgagtgaaaaggatgtagaaaaaacagtcatcagcttagcagcttggcagtttaatgaggaagagatgttgctacagggaatataaagttaaagtaactctttgtgagataaagaatacttaaatagaggtcgaaaatatagtgcaaatgattggaatgtggaatgtaagggggtaaacaatactaatcttgaagaaacacttggcttggaatagtagcaaagcacatataagaatggttgagtgtgtaagctttaagatcagtcttcggattata

SEQ ID NO: 4009 - DNA, 711 bp, Homo sapiens
ggaaatcttaagatcaacatgtcagtgaggaaatcacctagaatttagacattttctttggaactttggctggtctgtatcattattttgaaaatctccttgatgtttacaagctacctgactactttatcttttattctttaatgattagggtgacctagttccacatggcctgaaggtaacattggcagtaatgtgactaggtacatgtagacttgaaattaaagctcagcataaataagagttctctctctccctccttttatacctcttattgtttcaaattctctatcctttctaagttaaaagtactaaaattgcattcttttactgttaaacaggctgcttccttgggattactacagtttcctatccttaacgcttctgtggatgaaaactgccagaatataacatataaggttggctatgcagagtaaaaatgttcttattattaatagaagatggggcaaatgtgcttgtagattagagacttctattgtacctcaaatagtgatcttttaagactagaattaaaggtatggggtaaaacattaaacttaagtctaattcattgtagtagtaaagtgtataataatactgtttagagattcttaaaacctatttacaagcttttatatttcctgcttaacataatgggaatacctagctgtatggccagattatgttacccatctattaacctctcaaaaa

SEQ ID NO: 4010 - DNA, 689 bp, Homo sapiens
ttttttttttatttttttgagatggtgtctcgatctgtcgtccaggctggagtgcaacagagtgagactccatctcaaaacaaaacaaaacaaaatatggtaaagggtcaagaccggggatatgtaggctgggcacagtggctcacacctgcaatcccagcaatttgggaggctgaagcaggaggattctttgagccaggagaaatccccctgcacacacacactgggaaagcactggggattggccatgggcgagtgtgtaccagcaaaatggtgcaggagaagttgcctttgggagagggtgcaggtaggttagtgtgcatggcaggggccactctgctgtagctctccaatggtcaggcatggtctactggtgaaggagctatgatgagggctcctaggaaagcacgctggttcagcatctgaggctgtactgcaagttggcatggtcaagctgggaccctagaagaggccaacagagaggggtgtgctcagattagaggctgccctcatctcacaggcaagatcaccttgctctgcccaagtccaacagtaacgccaaggctaaagtctcctagaagagcatggtgagccttgggaggtaggcactccttgactgtgctccactgcagacattcctgcatcaataactctgggctctggacaggctggagtctggccctaattcc

SEQ ID NO: 4011 - DNA, 673 bp, Homo sapiens
ttttttttttttctgtgtgtgtttgcatctcacttttcatgcactatttttccccaagtctcccaaacagagatggctattgatgggccatgcatgcactcacacttccgaaagaattgctatttgaacctttcatgacatgacatgaatgctgctgttgagaatggttgagaaacaaacagaaagtagccgtctagacagcctgcgtacgatgggccggtcaaaagaaagatgcatttgcagaccaaggtgtcattcatagaaaatgttcattgggcatgtctggacatctccagacattcttaggtggtcattccagtgttagatggtatctagaaatgtttataagcccttaaacacaagacagcactttcagattgggttccagaagtttccttggttaaacttcccaagagataacaggatttgtaatgattagctgagtagtccttgagtacacttagcatagaaggaaaattcctaccatctattccctgttggtaaataacagtttgatctcatttgttacctgcagggcgaagaaaccaaaagtctgactcttgtcctgcatcgggactccggctccctgggattcatattattggtggccggccgagtgtggtatgttaattactaaaatggtggttttcctttttcctggtgtagctcggaa

SEQ ID NO: 4012 - DNA, 687 bp, Homo sapiens
acagtgtggtcctgagtgtggactatccatgtaggcgagaagatctgtgttgataatttctggtttaaatgatcccggggatatccaaagggctcaggatatccaaagccctttacagtgaccaaggtctaggggtagggaggtgaccagaactggtttatttcaagtcagactctaggttgaaatggattcactagtaatataatctcattgcattattgtgttttcaatttaataaagcaaattataaccacaaagagctcctatagaaaacgaaatcagctagttcataaaaacccatacacggactcttgttatttagttttcaaccacaggtagttatacttctaaagtcattatttatatgttgtcaggagtactcaccaaatttattgacttgtacattattcttggcaaataattttctggctgctctccgcatattataattaaaacgacagggactttaatcattttatgaaattttaaactacatactgaatataaatgtatcattcacatgtgatagaatgaattaaattcatcactgtcaaataactgtatcaaagatgaaatatctctcatctcacatcattaacttattaaaaaaaagaccagatctgaaagcatggtatagtacttatggtatttagaccttgaaactagacttgcttcagaacagcttga

SEQ ID NO: 4013 - DNA, 688 bp, Homo sapiens
cactacaggaagagcttgcaccattcggtctggtcattctgggctttccctgcaaccaatttggaaaacaggaaccaggagagaactcagagatccttcctaccctcaagtatgtccgaccaggtggaggctttgtccctaatttccagctctttggagaaaagggggatgtcaagggagagaaagacgcagaatattctacactttcctaaagaactcctgtcctcccacctcggagctcctgggtacatctgaccgcctcttctgggaacccatgaaggttcacgacatccgctggaactttgagaagttcctggtggggccagatggtatacccatcatgcgctggcaccaccggaccacggtcagcaacgtcaagatggacatcctgtcctacatgaggcggcaggcagccctgggggtcaagaggaagtaactgaaggccgtctcatcccatgtccaccatgtaggggagggacttgttcaggaagaaatccgtgtctccaacacactatctacccatcacagacccctttcctatcactcaagggccccagcctggcacaaatggatgcatacagttctgtgtactgcaggcatgtgggtgtgggtgccatgtggggtgttacacacatggctacaggtatgcgtgatgtgtgtgtgtgctgggtgtacagcacgtgtctaa

SEQ ID NO: 4014 - DNA, 86 bp, Homo sapiens
ccagacaaacctagatagcactactaggagggagtcaacgacctatgtatcaaatagatcccagccggacaagggcatgactatgc

SEQ ID NO: 4015 - DNA, 665 bp, Homo sapiens
  misc_feature (88)..(88): n is a, c, g, or t
  misc_feature (186)..(186): n is a, c, g, or t
ttttttttttttttgtagagagaaaaatttattgcaaggcagccaagcaaggacacaggagtctggcccaaatctgtctctccaagtnggaggccgccctttttttttttttttctttgtttccatgcacatgcaatgattagctcccacgtataaatgagaacatgttgatattttcctgttctngtgttaatttgcctaaagtaatggtcttcttctgcattcatgctgctgcaaaaaacattatttcattcttttctgtggctgcatattattgcacagtgtgtaagtacctcattttttaaaaatccaatttaagatgtatggatatctaatttaattttgtttggccaggtgtggaggctcatgcctgtaatcccagcgctttgggatgccgaggtggggggatcacgaggtcaagagtttgagaccagtctggccgacatggcaaaaccccatctctactgaaaatacaaaaattagccaggtgtgttggtgggtgcctgtaatgccagctacttgggaggctgaggcaggagaatcacttgaacctgggaggtggaggttgcagtgagtcgagaccgtgccatgctgagcaacaagagcagactctgtctcaaaaaaaaatatgtcttgctatgtgaatatgcgtattaacagatgac

SEQ ID NO: 4016 - DNA, 574 bp, Homo sapiens
catctacgtagtagtcatcgctattaccatgtgatgcgttttgcagtacatcaatgggctggatagcgtttactcacggggatttccaagtctccaccccattgaacgtcaatggagtttttttggcaccaaatcacgggactttccagatgtcgtacaactccgcccccattgacgcaaatgggcgtacggcgttgtacggtggatgtctatataagcagagctcgtttagtggaaccgtcagatcgcctggagacgccatccacgctgttttgacctccatagaagacaccgggaccgatccagcctccggactctagcctagccgcgggacggataacaatttcacacaggaaacagctatgaccattaggcctatttaggtgacactatagaacaagtttgtacaaaaagcaggctggtaccggtccggaattcccgggatcttaacatcaggaattctcccttcacaagaggccgcagagaagactatgttggtgggcaagtcatagaagtcgaaacataggtagcaactatccagaaaagctttcagcaagagatggtcacatcagaa

SEQ ID NO: 4017 - DNA, 720 bp, Homo sapiens
  misc_feature (373)..(373): n is a, c, g, or t
gccacatctgttcgcagtactggtcgaggctgaagtttgggctgctaaggatttggatgtagtctttgtatctcaaccgtgactcagccaatagatccttgaccttcccctcctcatgctctgccctctgggtattttccatctgttcattcctccaaatggaacattccaaggtctcggttctcatatagtgggtggtggagtgaaaggtgtgctccgtgggtctgtgcagataatacatcccagaatccttcttctgcaaacttcgaatcagtagcccatattgccgttttgatgattctttcatcgggcttcaactcctctcgatgctcatcccctgacctctggatataccatttaatagttgcttgtngggatttaggtatacattccagaaaggttgagttaaattcaatgccaaaaatcaccttttcatcagcagtttcatgactaatgctgtcttcgatgtcccagcactgggtgattgggtcgccatattttacatcttggcgtctagctctccttttagaagtaggagcatatcgagagcatgcatttccatcccaggcacagtaggggtctctggcaagacaacagtctgcgcaagctttcccataagtgtcgcatctgtgcaaggagagctgaaccaatccatctcgggaaaccaatgttacaatgttgctgcttcagagacaattccctgttcccgatgattggtga

SEQ ID NO: 4018 - DNA, 94 bp, Homo sapiens
ttcagctacccaggagctcctagaaccctgtcctttcaggtttttatggaggttccattaaataggcatgattgatgaaaccactggccattag

SEQ ID NO: 4019 - DNA, 635 bp, Homo sapiens
ttttttttttttttttttttttttttttttttttttttttttttttttttttttttttttagctctttatcagagaataacatttattttattggggaaagtttccctaaatatgagactatctggctatttctcagactaagtgaaaaatttaataaaatagctgcctggataggaggaaaacaaagttcttactttatagggaataaggtatgaatcataaaagaagaatgagcgatcaggggaaacatttagcttttcaaagttttgggaacatgtaccttaaaggctttggggatccagtaagggccaggaagggcaaagagttgaaagttctctgggattaatcctcgtacttacatcattagtaataggaataaggcatctcaaatgggggcatttatataaaaacttgattttaaagggtagtctagtataacactaggatttggtaaggcggtaaaatatctgcatataacttggtttcgaaggtagactttcagtctaactttaacttattataggtcagatttggaacatcctgggcttacaatattaaattccttcaaaaggagatccggggctaatattaaaccaatacttaagttcctttacacattggtggagacagacct

SEQ ID NO: 4020 - DNA, 741 bp, Homo sapiens
ttttttttttttttttctgattttctagaccactgagaaaatctttatttacaataaatttcaataaaatttgcataaatatattcccaatgtacaattttcacctctgatttcttcatatcatttaaaaagttagtctgtcctgttctccttattcctttcagacaccagtgtggcgctgacattggcaggtggaggggagctgccagggagctggggggtggctgagggctcaggctgcttggggtggacctctctctgggccgccaggctttcagctccatccctgccctccagtttcctctccatggtcgccaccaggatcttgagccacgtgttctcggtaaggaggttttctgaggcatcggccagctcctgcagcttgcgggccagctcctgcagctcacgtgtcttctgctcatagagggcctgcagctgctcactgtgtgcgtggagcaggctgtgctgctcttccagggcccgctgctgctgccgcagccggtgctcatctctgcgggcactggagagctgggactccacctgcacttgtgctcgctggaggctgttatttctgctctcagtttctggatctctctctccaagtgggagatgtgcccccgctgtaagacgctcgctctgaagacactcctggtagagagttaccacattctggggctggaacaggtcgagtgatgcaaatgactcaccggtcggagtgatgggacgtctcgggtatccctc

SEQ ID NO: 4021 - DNA, 741 bp, Homo sapiens; identical to SEQ ID NO: 4020

SEQ ID NO: 4022 - DNA, 759 bp, Homo sapiens
ttttttttttttttttaaataaatctaagttattttatttagtttaagcaaaatatgtatccatatgaaaatgccagttctttcatttttggttaattcctttacacatattatttgctaagttcagaaatgctatatatacaaaaatttcaaaaataaataagtatcccaagatcacataacaatactttaagtacattcatgtgtaagaaggcaaaaaaagaaggttctatcttatattttaaaactttgacaggtattttaaatgtattattttatactttattttctttaaaaatgaaataatacagccatgatttaagtcatgtaaaaacaactgtttggatcatttaggtgtcaagcaaaactatcctctttatttcactatcatagtaaccatagttgatagaccatgtggcaatatgatcatttgttcagtggtcattaagatatctatagaataaacaagacaactacattttatttttttcacttaaaaatcacaaaaatacagcctaaaatataatttatattttaaaaataattctaaacattaacccctaaatctaatcccttaaaaaattcttgcaaaagttagctggatgtggctgttgccaaggaatgtcttttattagcaacaagtgactatctataacttttattccaacaatcttattctaaatattggtttcactttaatgctgggattagaaaaactttttggtccaagtatgtaagtgtcagtaaacatttcaaatc

SEQ ID NO: 4023 - DNA, 761 bp, Homo sapiens
tttttttttttttttaatcaagaacaaaaccagactacttcttaaaatgcactattaggaatgtaactgttcctaaatgtgccagatatatttccatccatgcgatattaaaactaacaagcgtcttttcaatttcttttaatgatggggtatgcaataaaaatacagcagtgcttcatttagccaaaggagctggagcaaaaaagacctaaataaataaataataaacgtgcatgggccacttaccaaaactaaaatcatttcattcaaccttttacaggaggtgcatgcagtatttgaaagcaaaaattctcataacacaaacctccacttaaaaatcactgccaagggctggaaccatggcaggatgttatttctttcttcaatttattttttaatgtctgggtatctaatggcatcaactgccatgtagtataataaggcagcacaggtaaataaaaggagttagaaaactagctcccagacttgctcctagcacttaaatcggtatgtggaccagggtacattaaaatatatcaggttgtcagatgcttcctctaacagaggcagatcagtaaaattggccctcttacttcatagggtatgtgaggggttaaccataatagcatatgacagagagctttataaactgtggcatttatgaaagctaggtctatcactacctgatatctgtgtgatatgcacacgggtggcagatattgacctgggcagcttgattcagactggtgtcagtgatatct

SEQ ID NO: 4024 - DNA, 687 bp, Homo sapiens
cgggacttcccaaaatgtcgtacactccgccccttgacgcaatggcgtaggcgtgtacggtgggaggtctatataagcagagctcgtttagtgaaccgtcagatcgcctggagacgccatccacgctgttttgacctccatagaagacaccgggaccgatccagcctccggactctagcctaggccgcgggacggataacaatttcacacaggaaacagctatgaccattaggcctatttaggtgacactatagaacaagtttgtacaaaaaagcaggctggtaccggtccggaattcccgggatcgcgtgcaacctgtcccgactctagccgcctcttcagctcgccatggatcccaactgctcctgcgccgccggtgactcctgcacctgcgccggctcctgcaaatgcaaagagtgcaaatgcacctcctgcagaaaagctgctgctcctgctgccctgtgggctgtgccagtgtgcccagggctgcatctgcaaggggcgtcggacagtgcagctgctgcgcctgatgctgggacagccccgctcccagatgtaaagaacgcgacttccacaacctggattttttatgtacaaccctgaccctgaccgtttgctatattcctttttctatgaaataatgtgaatgataataaaacagctttgacttgaaaaaaaaaaaaaaaa

SEQ ID NO: 4025 - DNA, 428 bp, Homo sapiens
  misc_feature (324)..(324): n is a, c, g, or t
actctgtaccccaggccagtttccccctcctgactccctgcagttttacctttttactggcccttaaagacaccacagatgctaaggaagggatgaatgttggtcataagcacgcagtgaaacctggctggggagggtcaccgagtgtgtattactaattcgatctccgccgcacccttggtctcatgcccagcacctttgtgtggtggttactcaaggatgtgggaagccgctggagcgaggctgatgacgcacccatttcagaactgacaagcgggctccttggcaaccagagctcaccatctgccccagggcaaccagggnagggcacagaggggcagtgaggcctctgacaggaatgggacaagtacctcagcattggagaaactagctggggggttctggccagtaccgggggagccaatggt

SEQ ID NO: 4026 - DNA, 83 bp, Homo sapiens
gcccaccagtgggccagtgggggtgaggggcttctaggaaaaccggtgtcatctgcgcgggatgctgggcctccacctcccaa

SEQ ID NO: 4027 - DNA, 104 bp, Homo sapiens
cgggcagcctcgtaggcacggcggaactcctggaatcgtggggcacagcccagccgggcctccccaaagcggctccagcccatgaagaggaaggtgccatgggc

SEQ ID NO: 4028 - DNA, 660 bp, Homo sapiens
tttttttttttttattttttttttttttttccacaaatggatatatttacttcatgggccagcggagtacactcgcatacatagatatctctgagtcactttaagtcacataactgcaaggatacaaacaaacactagttcatcccgggggctgagtgccctgggggaatactcagatcccagtggggcttctctctgcatcttctggccactctggccgttctccctgagcccacccaccttctccccctcccttccattcttccacgatggtagcaaagcagggaagtgccagtggaaagagactgcaggtgcacagaggcttggacaggccagagtccatggcagactgctagggcgtctctcctgggttcatgtggtgggcacttcaccacttcaaggacactgtcaactccctgaaggcaaggcccagggcttagacttccctaggcatggagagacagtagtcaggaacaagcagctcctgggcagactgctgggtgtgtgacaacatgtgagggctcaggagctacaagcagggacagggcaagctcgcaaacaaaaaaactgagacccgatgcggctgcatgcgggggacgccagagctgtgcagggcagctgcaggagcagaggagggggcggggcaaggacggcttccta

SEQ ID NO: 4029 - DNA, 90 bp, Homo sapiens
taggcagccatgggccatctgggtccagtctgctattttctttttttaaataacaactttattgaaatgtagttcacataccagtgcaag

SEQ ID NO: 4030 - DNA, 326 bp, Homo sapiens
ccgccgggaagcccgggcaggacggcatgacggagaagctggtcctccaggtctgcctgggcccccgggaccaaagggggccccaggaaagccggggaaaccaggagaggctgggctgcgggactgccgggtgtggatggtctgactggacgagatggaccccctggacccaagggtgcccctggggaacggggaagtctgggacccccggggccgccgggctggggggcaaaggccatccctggaccccccggagaggcaggagtgagcggaccccacaggtgggatcggacatccgcggacacacccgggagctcaggacatca

SEQ ID NO: 4031 - DNA, 84 bp, Homo sapiens
ttgtctacaaagcgaagcatgcctgctggtgagccacacagatactgctccttcagattgaggttgtacatgcccccaaaggct

SEQ ID NO: 4032 - DNA, 741 bp, Homo sapiens
cccttggacgcaatgggccgttagcgttacgttggaggtctatataagcgagctctttagtgaaccgtcagatcgcctggagacgccatccacctgttttgacctccatagaagacaccgggaccgatccagcctccggactctagcctagccgcgggacggataacaatttcacacaggaaacagctatgaccattaggcctatttaggtgacactatagaacaagtttgtacaaaaagcaggctggtaccggtccggaattcccgggatgtccgcccttttaatcatggcctcagttccttttcttcagctggtggagatgggattgggctgtgaaaaggcagtgaggcacccgtgcctggctcctgttgtgaccaaggtcatgtgcttagaagtcaaggttagtgggcctcgggtgactctgtcagagctttgtttctgggctactgtctgcctctgagccgcaggaaatgtccagaaaacccagaagatggaaatggcccatgataagtgttctgttgacctttactcagacagatgctctgggaagagaaaaggagaactttgctatcaaaacggaaaatagggcctgaggacaggtcacagcagcccttggctttcttttctcatgggggtgggactggtaggaggcgctgctttgtggttgatattggcatgatggttggaaaaatgggcctgggactttttgtgagttcattaaaaaaaaaaaaaaaaaaaaa

SEQ ID NO: 4033 - DNA, 630 bp, Homo sapiens
cttccatgtaaaacaatttcactaaaatgtcttctcctgcagatatagaaatgtcacctgagaaattcatccttttttttttgactctagaaaccccattgttctcccactcaaatcaagcaatgagccacaaaaactcaaaagaccacagacaacaatcaccatctaaaatataaaatggggaaatgacatctgagggcactcacccactggattctgcagaagtgatagcaatcagcggcagaatcttcagggggaggctggttggtcgttgaatgttctctgattcacttttcaagtcagcttgttccaactgtctgaaggcgagagggggaagctgaatattgcgacatgaaagtctccggacaagatagggttccattccgcggaaagggtcttcctcttcattactggaatgtagtgtttcctcagaggctcatctccatttcttcaacttggtatccatgggggattggttcaacctttcccaccctctgcagaaaccaaaatcttcagatgctcaagtcactttgctccgagaaagcaaatcacaggtatttcttttcatcgtggtgttttaagtaattaaaatgggaactagtgtgtccagtgtccaatgatctcactgca

SEQ ID NO: 4034 - DNA, 602 bp, Homo sapiens
tgataggatttagctatgtttgatgtcctcgactcggcatgaggaattgtcatgggttttatcaaatctcaggaagtgagagtcatcacatttccgttcactgatgtccaggcagaatgggaagggtcagggatcactgagtagcttctctccaaatctgtgcttattctccatgttgcatagtttctgtgggtccaatttattgatcttttacacttctctagtgcttgttctaggtggtgcattaccagactagttcctgagaaagctgatagttactcaccacaaggttccctttggacatggtactttacactaaatcactgtaatatacaaaagaggtgaacatggttggttaaacatcaccatgtagggagaatagagcaccagcaaatcactgacttagtgttagctggatgtccgagatggattggagatagtctctttagtttaacatgagatggagtctgctctgttgcccagactggagtgcagttagtgcgatctcggttcactgcaacttcgctcctgggttacaagcgattctccatgctcaaactcccaagcagctgggactacaggtgcatgccacatgcgcggct

SEQ ID NO: 4035 - DNA, 571 bp, Homo sapiens
agtaatcgaggaaaaatgtcgtcaggtggcagaaaacaaggagccacctagaagctggctgatgcagctggggcacacagaggaggggcctgggtaccccatttggggaaactgagacgaagctatttagaacagcttgaaaataagagacttttctagaatggggtggcagctaaagtagcttctttttctttctttcagaatgctcagatgcatcagttccttaatatacacgtgaaattggaaaactgtacattcggtgagattaaattttatatacaactagcaattgtccagctatgtgctcattttcaattaaggctaaagtgttcaacgatgagaaaatgtgatacattagatacagtgtggggtgggagtggatgggcagctctggtggtactggaccttccacaaggactgtgtccacaccagaatccatgctggacaggagggaggcagaggtatcaaaccaaacctctcaccaagcggcccaggaggggcagctgtacctctcgtgacaagcacaggcccatgagacagagtctcataaagaggggagctggacagggtc

SEQ ID NO: 4036 - DNA, 679 bp, Homo sapiens
tctctgtccagccacagtgccttggcttcagccttgacaggcacccccttctgtgggaaaggaacacggttctgagcccaagagactctggtaccccctgctggctcatgaaggaagaattattccttataaccttaaagtctcccagtctgggcaggcgggagtgggccctggttccatgtttctgatggggaagatggccaaaacacagcctgccccacccagactggtagtcctgccgtcactgctatgaggcccctgtgctgcctcctgctcccagattttaacctctctgtgggctgggggcacctgacccagcccccggagagggccgttcagattccttctgtatggggtcccccagcccaggcttaaccccgagatgagaggcacccttcccttcttccctccacccccaagaactacacggctcccgaaagtatgcagcctttattaccaagcccagagatacagatgtcccacgggccaaggagggtaccgtcaccacggacctcagacccaccggacccaggtgccaacccagaccagcccctcagggggctccccaccccacacacctacgctatgatggaatctcgagtctcgaaaaaaaaaaaaaaaaaaaaaaaaaaaaaaaaaaaaaaaaaaaaaaaaaaaaaaaaaaaaaaaaaaaaaaaaa

SEQ ID NO: 4037 - DNA, 2635 bp, Homo sapiens
acaacggccatccctgtggctgggccgccggctacgcaatgctgtctctcttgctgatcctctcaggcctgggcgctgacctccgcgggcccacgccacttattccatcaaaattgaggggaaaccataccttcctgcttgaaaaacagtcatttttacacccacatttcctggtgtatttatacaacaaatcaggaacattgtatgcagattcttcattttcaaagggtcattgcttttaccaaggatatgctgcagacattccaaaatcagttgtggcactacgcacctgttctggactcagaggattactgcagttagataatatcagttatggtattgaaccattggaatcttcacctacatataagcatgtagtttatcgaattaaaaatgatgctattggtcattcctcctttcaagaaaattatcctgtggctcaatatatagatcagtcctacaggattcttgtcaaatcagacataaattcaggtgccatgctatcgaaaagaactctgaaaatacaaatcattatggataaagccatgtatgcttatatgggctccacggtggcagttgcagttgagaaagttttccaaatctttggtcttatcaacactatgttttcccagcttaatatgacagttatgctgtcttccttggagatctggtcagatcaaaataagatttcaacaagtggtcatgctgatgaaatactacagcgatttttgccttggaaagaaaaatttttgtttcaaaggtctcatgatatgacatacttattaatttataggaaccattctacttatgtgggagcaacatatcacggaatggcatgcgatccaaagtttgcaacaggaattgctctgtatccaaagaaaatcactgcagaggccttttcagttgttatggcacagttgcttggaattaatctgggattgacatatgatgatatctacaattgttactgtccaggaactacatgcataatgaatcctgatgcgatacgatcccatggtatgaagttttttagcagttgcagcatggatggatttaaacggatagttctgcagcctgaacttaaatgttttcaggataaaacagtttcaaaaatgacttaccgaaaatcttcaacttgtggcaatggaattttggaacctacagagcagtgtgattgtggctataaagagagacaggatttcaccatgttggccaggctagtctcaaacttcggacctcaggttatccacctgcctcagcctctcaaggtgctgggattacaaacccacaaggagtcccttgcgggaagactgccaatatgtctgttaggggatactttaagaacctgtaaaatcaacacaagttatttacttaaaagcacagcatacacaaccccattttggaaaaggagaaatagacaagaagaaatgggtaacaggcctcaagcaagtctgaaacccaagagagccaatgatggacattcagactcctgaataatttcctttgatgacatgtcctgcatcttctataaacaggcatgcactcataaaaaatgctgtaatcctgcagattgtactctagttagatctgcagaatgtggcactggatcatgctgtaacaataaaacttgtacgatccacgaaagaggccatgtctgcagaaaaagtgtagatatgtgtgattttccagaatattgcaatggaacatctgagttttgtgtacctgatgtgaaagctgctgatttagaatactgcagtaataagactagctattgctttaaaggagtatgcagagaaagggatagacagtgttcacagttatttggaaaatttgctaagtctgctaatcttctgtgcacagaagaagtgaattttcaaaatgacaaatttggaaactgtggttcccgttgtgatttttttgatatcctttgtggaaagattgtttgtcactggatacattcagaactagtaccaatgacagacttagacatacaatatacttaccttagaggtcacgtatgtttgtccgcacatgcaagaaatggttcaaaacaatcggagacctatacagaagatataactgcatgtggccaacacaaggtatgtcactcccgagaatgcagaaattttagtgaactaaatataacaaaatatactacaaattgtggacagaatgggatttgcaatgaacatttccattgtcaatgtgatcctggttatgctcctccagattgtgagccagcaatgtcatcaccaggaggaagtatcaatgatggattttggcttacagtagaaaaaagtgtacccttgcttccaaaacgacgtgctgctcctaaaaacaatggtcttttgatcagtttctacattttttcacctttgctcattttaattgctattgttagtcttaaatggaataaaatgaagagattttggagcaaagtgggaacagtaagcagcagatctatctcagaagacagcagtagtaacagcagccagtcacagagttaaagtaaccaagtgataaaatcaaagccatcggatgaagaaaggatattaccaagaaactcacgattaacttaaaactttcaacttcacagaaaaaaataaatcatatgactaaaagcataaaaaaaaaa

SEQ ID NO: 4038 - DNA, 1232 bp, Homo sapiens
aggaaggtggcaagatggtgttggaaagcactatggtgtgtgtggacaacagtgagtatatgcggaatggagacttcttacccaccaggctgcaggcccagcaggatgctgtcaacatagtttgtcattcaaagacccgcagcaaccctgagaacaacgtgggccttatcacactggctaatgactgtgaagtgctgaccacactcaccccagacactggccgtatcctgtccaagctacatactgtccaacccaagggcaagatcaccttctgcacgggcatccgcgtggcccatctggctctgaagcaccgacaaggcaagaatcacaagatgcgcatcattgcctttgtgggaagcccagtggaggacaatgagaaggatctggtgaaactggctaaacgcctcaagaaggagaaagtaaatgttgacattatcaattttggggaagaggaggtgaacacagaaaagctgacagcctttgtaaacacgttgaatggcaaagatggaaccggttctcatctggtgacagtgcctcctgggcccagtttggctgatgctctcatcagttctccgattttggctggtgaaggtggtgccatgctgggtcttggtgccagtgactttgaatttggagtagatcccagtgctgatcctgagctggccttggcccttcgtgtatctatggaagagcagcggcagcggcaggaggaggaggcccggcgggcagctgcagcttctgctgctgaggccgggattgctacgactgggactgaaggtgaaagaggtggaatccgaagtcctgggactgcgggatgctaaacattgaaagctgggtgtaggcactgcagggagagtgtggaggtctgacagggtaggaatatgtgggagggctgggctaggaatggccttggaggctggcctgtgtggatatggcaccaattctaccctgctcctcttttccttttcccagactcagacgatgccctgctgaagatgaccatcagccagcaagagtttggccgcactgggcttcctgacctaagcagtatgactgaggaagagcagattgcttatgccatgcagatgtccctgcagggagcagagtttggccaggcggaatcagcagacattgatgccagctcagctatggacacatctgagccagccaaggaggaggatgattacgacgtgatgcaggaccccgagttccttcagagtgtcctagagaac

SEQ ID NO: 4039 - DNA, 1857 bp, Homo sapiens
atggcggaccgtggcggcgtgggtgaagccgcagctgttggagcgtctcctgcatctgtccctggcctaaacccgacgctaggctggagggagcgactgcgggccgggctggcggggactggggcctcgttgtggttcgtggcggggctggggctgctttacgccctgaggatccctttgaggctgtgtgagaatttggcagcggatatttgaatggtggtacttccataagcatggcacatcttttattgagcaagtatctgtaagccatttgcaaccactgatgggaggaacagagagcagcatttcagaaccaggttctccttcgaggaacagagaaaatgaaaccagcagacagaatttgtcagaatgtaaggtatggagaaaccctctaaatcttttcagaggagcagaatataggagatacacttgggtgactggtaaagagccacttacatactatgacatgaacctgtcagctcaggaccatcagacctttttcacctgtgacacagattttttacgtccttcagacacagttatgcagaaggcttggagggaaagaaatcctccagctcgaatcaaagcagcctatcaagctttagaattaaacaatgaatataagccttccaaagtcagcagcaatctgttacacagcagcactgttgaagacaaggactgtttcagaaaaattctctccagaaacagcctccagaagaggattaagcacagcagaaattaatgccgtggaagcaattcatagagctgtggaatttaatcctcatgttccaaaacttttagaatgattccatacccgttagagaaaggacatctattttacccttatcccagctgcacagagacggctgatagagagctattacctacctttcatcatgtttctgtttacccaaaaaaggagcttcctttgttcatccatttcacagcaggattttgctcttctacagcaatgatagccattctcactcaccagtttcctgaaatcatgggtatttttgctaaagctgtgctgggactctggtgcccccaaccctgggcatcctcaggctttgaggagaatacacaggatttgaagtcagaagacctaggtttgagttctggctgagccacgcactgttcatgtgaccttggacaaatcaccaaatttttctgaacagcatctgtaaagtgacagtaacccctacctcacagggttgttgtgaggattacatatatgctaaagcattttgcatatgaaaaagcttcttatgaatattgttattcctaggcaaaccccccttggaagctgtcaaaaaggacaactgtagatgaaattgtcttccttttttcttcattcagcttagcctttctgtttggccagggctacttacaggggctgttggggttgaagtcaagtcaccgcattttggctcctttggtcaaagagaaagaactctaatgtccagctgctccatcgatatactcatagaatggaagtgagcaaaggaaaattttaagccaggatagttaaccgttagggggccagtgggagaatgcttgccttgcatttgcacatccagaatgactaaaacatcttaagtaaatgaggaatagccaccgagatgctcagagataatataagccatgagtgggaagtgggaaaatgagtttgtcaacgccctctcttttctatccctttacctttgaggtcagggacagggcatattactgacaccccactggctattgccctatacctgccaatcacccaaagaaaataatagcttctgagaaagctcaattcactgtagcaactgtgatatatttaccctaataaagccaccacttggtcttttc

SEQ ID NO: 4040 - DNA, 2671 bp, Homo sapiens
gggctcagagctcgccgccaaggggcgtggcctccgggccgcggcggcctctgggagttgtagtcccgcctcaacttgtggtggcctctttaaaaaaacaaaaaacaaacaaacaaaaaaacactggcgcttgggtccgtcgctgcctcggtgtccctgtcgggcttcccagcagcggcctagtggaaaagtaaaagatgtctgaatatattcgggtaaccgaagatgagaacgatgagcccattgaaataccatcggaagacgatgggacggtgctgctgtccacggttacagcccagtttccaggggcgtgtgggcttcgctgcaggaatccggtgtctcaatgtatgagaggtgtccggctggtagaaggaattctgcatgcccccgatgctggctggagaaatccggtgtatgttgtcaactatccgaaagataacaaaagaaaaatgggtgagacagaagcttcatcagcagtgaaagtgaaaagaccagtccgatttaatagtgttgggtctcccatggaaaacaactgaacaggacctgaaagagtactgtagtacctttggagacgttcttatggtgcggcaaagccaagatgagcctttgagaagcagaaaagtgtttgtggggcgccgtacggaggacatgactgaggatgagctgtgggagttcttctctcagtatggggatgtgatggatgtcttcgtccccaagccgttcagggcctttgcctttgttccatttgcagatgatcagattgcgcggtctctttgtggagaggactcgatgaaaggaatcagcgttcacatatccaatgccgaacccaagcgcaatagcaatagacagcaagaagtggaagatttggtggtaatccaggtggctttgggaatcagggtggatttggtaagagtagagggggtggagctggtttgggaaacaatcaaggtagtaatatgggtggtgggataaactttggtgcgttcagcattaatccagccatgatggctgccccccaggcagtgctgcagagcagttggtgtacgatgggtgtgttagccagccagcgaagcagccaggcccatcggatgataaccaaagccaaggcaacatgcagagggagccaaaccaggccttcggttctggaaataactcttgtagtggttctaattttggtgcaacaattggttggggatcagcatccaatgcagggtcgggcagtggttttaatggcggctttggctcaagcatggattctaagtcttctggctgggaacgtagacagtggggttgtggttggttggtatagaatggttggaattcaaatttttctaaactcatggtaagtatattgtaaaatacatatgtactaagaattttcaaaattggtttcttcagtgtggagtatattcagtagtatttttgacatttttctttagaaaaaggaacagctaaaggaattttataagttttgttacatgaaaggttgaaatattgagtggttgaaagtgaactgctgtttgcctgattggtaaaccaacacactacaattgatatcagaaggtttctcctgtaatattttatccctggacttgtcaagtgagttctttgcatgttcaaaatggaagccatgaattagaactacattctttattccttgttttaatttgaaccccaccatatggatttttttccttaagaaaatctccttttagaagatcatggtgtcacagtttggttcttttgttttgttttttaacacttgtctcccctcaaacacaaaagtacaatatgaagccttcatttaatctctgcagttcatctcatttcaaatgtttatggaagaagcacttggttgaaagtagtgctgtaaatattctgccataggaacacttctgtctacatgccttctcattcaagaattcgtcatcacgcatcacaggccgcgtctttgacggtgggtgtcccatttttatctgctactctttatttcatagagtcgtatcaacgctgtgaacgcaaggctgtgatatggaactagaaggctgtttgaacttttgaaaccttgtgtgggattgacggtggtgctgaggcatgaaaggctagtatgagtgagaaaaggagagagcacgtgcagagacttggtggtgcataacggatattttttaacttggcgagatgtgtttctcaatcctgcggctttggtgacagtgtgcagacagcaatgatagcaaataatgtacgaatgttttttgcattcaaaggacatccacatctgttggaagactttgagtttttgttcttagataacccactttatttgaatgtgttaagtgaaatgatacttgtactccccctacccctttgtcaactgctgtgaatgctgtatggtgtgtgttctcttctgttactgatatgtaagtgtggcaatgtgaactgaagctgatgggctgagaacatggactgagcttgtggtgtgctttgcaggaggacttggaagcagagttcagcagtgaactctggtgtctcaaagaagggtagaagttctaatgtctgttagctacccataagaatgctgtttgctgcagttctgtgtcctgtgcttggatgctttttataagagttgtcattgttggaaattcttaaataaaactgatttaaaaaaaaaaaa

SEQ ID NO: 4041 - DNA, 1476 bp, Homo sapiens
gccacccaccctccggaccgcggcagctgctgacccgccatcgccatggcccgcgggaaagccaaggaggagggcagctggaagaaattcatctggaactcagagaagaaggagtttctgggcaggaccggtggcagttggtttaagatccttctattctacgtaatattttatggctgcctggctggcatcttcatcggaaccatccaagtgatgctgctcaccatcagtgaatttaagcccacatatcaggaccgagtggccccgccaggattaacacagattcctcagatccagaagactgaaatttcctttcgtcctaatgatcccaagagctatgaggcatatgtactgaacatagttaggttcctggaaaagtacaaagattcagcccagagggatgacatgatttttgaagattgtggcgatgtgcccagtgaaccgaaagaacgaggagactttaatcatgaacgaggagagcgaaaggtctgcagattcaagcttgaatggctgggaaattgctctggattaaatgatgaaacttatggctacaaagagggcaaaccgtgcattattataaagctcaaccgagttctaggcttcaaacctaagcctcccaagaatgagtccttggagacttacccagtgatgaagtataacccaaatgtccttcccgttcagtgcactggcaagcgagatgaagataaggataaagttggaaatgtggagtattttggactgggcaactcccctggttttcctctgcagtattatccgtactatggcaaactcctgcagcccaaatacctgcagcccctgctggccgtacagttcaccaatcttaccatggacactgaaattcgcatagagtgtaaggcgtacggtgagaacattgggtacagtgagaaagaccgttttcagggacgttttgatgtaaaaattaaattttaagtgacactacagaaaaacacaaaaaggtgatgggttgtgttatgcttgtattgaatgctgtcttgacatctcttgccttgtcctccggtatgttctaaagctgtgtctgagatctggatctgcccatcactttggctagtgacagggctaattaatttgctttatacattttcttttactttccttttttcctttctggaggcatcacatgctggtgctgtgtctttatgaatgttttaaccattttcatggtggaagaattttatatttatgcagttgtacaattttatttttttctgcaagaaaaagtgtaatgtatgaaataaaccaaagtcacttgtttgaaaataaatctttattttgaactttataaaaagcaatgcagtaccccatagactggtgttaaatgttgtctacagtgcaaaatccatgttctaacatatgtaataattgccaggagtacagtgctcttgttgatcttgtattcagtcaggttaaaacaacggacaataaaagaatgaacac

SEQ ID NO: 4042 - DNA, 2064 bp, Homo sapiens
gtagcggcggcaacgaccatggaggccacgtcccgggaggcggcgccagcgaagagctcggcctcgggccccaacgctccccccgccctgttcgagctgtgcgggcgggcggtgagcgcccatatgggggttctggagagcggggtgtgggccctcccaggcccaatacttcaaagcatcctacctctgctcaatatatattacttggagaggattgaggaaactgccctcaagaaaggcctctcaactcaggccatctggcgccgactctgggatgaactgatgaagacaaggccttccagtttggaaagtgtgacatgttggcgagccaagtttatggaggcctttttttcccatgttctacgtgggaccattgatgtgtcttctgacaggcgtctttgtgatcagcggttctcacctcttctgcacagctcccgccatgtccgacagctcaccatctgtaacatgctgcagggtgcaaccgagctggtggctgagcccaaccgcagggttctggagaccctggccagctccctgcacactctcaagttccgccacctgctgttctctgatgtggctgctcagcagtcacttcggcagctgttgcatcagctcattcaccatggggctgtcagtcaagtgtcgctatactcctggcctgtgcctgagtcagcccttttcatccttattctcaccatgagtgctggcttctggcaaccagggcctggtggcccaccctgccgcctctgtggagaggcctcccgaggccgggccccatcccgagatgaagggtccctcttattgggctcacgtcggccccgccgggatgctgctgagcgatgtgctgcagccctgatggccagccggcgtaagagtgaagccaagcagatgcccagagctgcacctgccactcgggtaacacgccggagcacacaggagagcctgacagcaggcggaacagaccttaagagggagctgcaccccccagccacctcccatgaggctcctggcaccaagcggtcaccttctgctccagcagccacctcctctgcctcttcttctacatcctcatacaaacgggcaccagctagctcagccccacagcctaagcccctaaagcgtttcaagcgagctgcagggaagaagggtgctcgcacccgtcaggggcctggtgcagagtctgaagacctgtatgacttcgtttttattgtggctggcgagaaggaggatggcgaagagatggagattggggaagtggcttgtggagctttggatggatcagatcccagctgcctggggcttccagcactggaagcttcacaaagattccgcagcatctccaccttggagctattcacagttccactctccacagaggcagccctgacactatgccacctgctgagctcctgggtgtcactggagagcctcacactctcctacaatggtgagcaccctggagtggcagggattgggcttagattgcctagcagcaccagctgtgtgcctaattctagggaggtgggaggggcaaattgggggtatgatcaggaggttagagaggaaggcttgtatgcctcatagcaggggagactgtcattgctagaagagaggaacataaagtctatacacttgattagttgttgaaagcaggggttcctgaggggcagtgagacaagccagctggaatctgaagaatgaatacattttagatatggaaggcagtccaagggcaggtgggagcagtatagtatatgcatgctcaggcagggctagagtttgacctcaccacctcaccagtcatattttaagtattcttgataatttgatctaacaatcctcacaaccctatgagggcaagtgacttcctcaggataacctagcaattatagagctaggattcaaaacccaggcaaccagactgcagattcatgctttcaaacaactatgctactctcctttccaccgtctctctcctatcagcattttaacaggtctccatcaaaaactgccaccaccacctccctctatgccatattaataaactgttatctcctgttcttc

SEQ ID NO: 4043 - DNA, 1645 bp, Homo sapiens
aattcttggaagaggagaactggacgttgtgaacagagttagctggtaaatgtcctcttaaaagatccaaaaaatgagacttctagcaaagattatttgccttatgttatgggctatttgtgtagcagaagattgcaatgaacttcctccaagaagaaatacagaaattctgacaggttcctggtctgaccaaacatatccagaaggcacccaggctatctataaatgccgccctggatatagatctcttggaaatgtaataatggtatgcaggaagggagaatgggttgctcttaatccattaaggaaatgtcagaaaaggccctgtggacatcctggagatactccttttggtacttttacccttacaggaggaaatgtgtttgaatatggtgtaaaagctgtgtatacatgtaatgaggggtatcaattgctaggtgagattaattaccgtgaatgtgacacagatggatggaccaatgatattcctatatgtgaagttgtgaagtgtttaccagtgacagcaccagagaatggaaaaattgtcagtagtgcaatggaaccagatcgggaataccattttggacaagcagtacggtttgtatgtaactcaggctacaagattgaaggagatgaagaaatgcattgttcagacgatggtttttggagtaaagagaaaccaaagtgtgtggaaatttcatgcaaatccccagatgttataaatggatctcctatatctcagaagattatttataaggagaatgaacgatttcaatataaatgtaacatgggttatgaatacagtgaaagaggagatgctgtatgcactgaatctggatggcgtccgttgccttcatgtgaagaaaaatcatgtgataatccttatattccaaatggtgactactcacctttaaggattaaacacagaactggagatgaaatcacgtaccagtgtagaaatggtttttatcctgcaacccggggaaatacagcaaaatgcacaagtactggctggatacctgctccgagatgtaccttgaaaccttgtgattatccagacattaaacatggaggtctatatcatgagaatatgcgtagaccatactttccagtagctgtaggaaaatattactcctattactgtgatgaacattttgagactccgtcaggaagttactgggatcacattcattgcacacaagatggatggtcgccagcagtaccatgcctcagaaaatgttattttccttatttggaaaatggatataatcaaaatcatggaagaaagtttgtacagggtaaatctatagacgttgcctgccatcctggctacgctcttccaaaagcgcagaccacagttacatgtatggagaatggctggtctcctactcccagatgcatccgtgtcagctttaccctctgaacttctgatcgaaggtcatccctctccagcttgagtggatcaaagatgacaagggccaatggaaccaagtttgagtcttgccaggtcaatacttgggtcctgagtatggtgactagtatctgttttgttatgtgtgtattattccagccagaatgggaaatgctaattcagctcctccaggcagcccaatggggctggtggctttgagattattaaactctt

SEQ ID NO: 4044 - DNA, 1607 bp, Homo sapiens
ctggcacaggcctgcctccccctgccccagcccagggccaggccacactctgcctccaaagccaccgtccccccgaggcaccactgcatcccccaaggggcgggttcggaggaaggaggaggcaaaggagagccccagcgccgcagggcccgaggacaagagccagagcaagcgcagggccagtaacgagaaggagtcagcagccccagcctcaccggcaccttcgccggcgccctcgcccaccccagccccgccccagaaggagcagccccccgcggagacccctacagacgctgctgtcttgacctcacccccagcccctgctcccccggtgacccctagcaaaccaatggccggcaccacagaccgagaagaagccactcggctcttggctgagaagcggcgccaggcccgggagcagcgggagcgcgaggagcaggagcggaggcgggaggagcaggaggcacgagagaaggcgcaggccgagcaggaggagcaggagcggctgcagaagcagaaagaggaggccgaagctcggtcgcgggaagaggcggagcggcagcgtctggagcgggaaaagcacttccagcagcaggagcaagagcggcaagagcgcagaaagcgtctggaggagatcatgaagaggactcggaagtcagaagtttctgaaaccaagcagaagcaggacagcaaggaggccaacgccaacggttccagcccagagcctgtgaaagctgtggaggctcggtccccagggctgcagaaggaggctgtgcagaaagaggagcccatcccacaggagcctcagtggagtctcccaagcaaggagttgccagcgtccctggtgaatggcctgcagcctctcccagcacaccaggagaatggcttctccaccaacggaccctctggggacaagagtctgagccgaacaccagagacactcctgccctttgcagaggcagaagccttcctcaagaaagctgtggtgcagtccccgcaggtcacagaagtcctttaagagggtttgccttggatccgggcacagttgtgagggctcctctgcatcacctaccaggatgtctggaggagaaaaagacagaacaaagatggaagtggcctgggcccctgggggtgggtcctctctgttgtttttaatctgcaccttatagactgatgtctctttggccggagccagatctgcccctcagtgcattcgtgtgctcgcacgcgcagacatcccttctcccccatacacacatatacactcacagcctctctggcctcttcccttggggaggggccacctgtagtatttgccttgatttggtggggtacagtggatgtgaatactgtaaatagcttgtgctcagactcctctgcgtggagagggtgggtgcaggaggcagaccctccccccaaagccccctggggagatcttcctctctctatttaactgtaactgagggggatcccaggtctggggatgggggacaccttgggccacaggatactggttgcttcaggggtacccatgccccctgccctcgcctggaatcagtgttactgcatctgattaaatgtctccagaaataaagaataattctgcc

SEQ ID NO: 4045 - DNA, 2486 bp, Homo sapiens
  misc_feature (348)..(348): n is a, c, g, or t
ccagcagtgaggagacagccagaagcaagcttttggagctgaaggaacctgagacagaagctagtcccccctctgaattttactgatgaagaaactgaggccacagagctaaagtgacttttcccaaggtcgcccagcgaggacgtgggacttctcagacgtcaggagagtgatgtgagggagctgtgtgaccatagaaagtgacgtgttaaaaaccagcgctgccctctttgaaagccagggagcatcattcatttagcctgctgagaagaagaaaccaagtgtccgggattcagacctctctgcggccccaagtgttcgtgggtgtgaagctcagccctgagggtnctctggacagcgatcactcagcctctggacagcgatcactcagcctctggacagacagcgatcactcagcctctggacagcgatcactcagcctctggacagcgatcactcagcctctggacagcgatcactcagcctctggacagcgataactcagcctctgtccccgtctgagatgttggcagggactgtcagatttgccaggcattgtttgaagttcttcccagcccagaaacctgcatgtgtagattttggtgcttccagaggcagggctatgctcacattcatggcctctgacagcgaggaagaagtgtgtgatgagcggacgtccctaatgtcggccgagagccccacgccgcgctcctgccaggagggcaggcagggcccagaggatggagagaatactgcccagtggagaagccaggagaacgaggaggacggtgaggaggaccctgaccgctatgtctgtagtggggttcccgggcggccgccaggcctggaggaagagctgaccctcaaatacggagcgaagcatgtgatcatgctgtttgtgcctgtcactctgtgcatgatcgtggtggtagccaccatcaagtctgtgcgcttctacacagagaagaatggacagctcatctacacgccattcactgaggacacaccctcggtgggccagcgcctcctcaactccgtgctgaacaccctcatcatgatcagcgtcatcgtggttatgaccatcttcttggtggtgctctacaagtaccgctgctacaagttcatccatggctggttgatcatgtcttcactgatgctgctgttcctcttcacctatatctaccttggggaagtgctcaagacctacaatgtggccatggactaccccaccctcttgctgactgtctggaacttcggggcagtgggcatggtgtgcatccactggaagggccctctggtgctgcagcaggcctacctcatcatgatcagtgcgctcatggccctagtgttcatcaagtacctcccagagtggtccgcgtgggtcatcctgggcgccatctctgtgtatgatctcgtggctgtgctgtgtcccaaagggcctctgagaatgctggtagaaactgcccaggagagaaatgagcccatattccctgccctgatatactcatctgccatggtgtggacggttggcatggcgaagctggacccctcctctcagggtgccctccagctcccctacgacccggagatggaagaagactcctatgacagttttggggagccttcataccccgaagtctttgagcctcccttgactggctacccaggggaggagctggaggaagaggaggaaaggggcgtgaagcttggcctcggggacttcatcttctacagtgtgctggtgggcaaggcggctgccacgggcagcggggactggaataccacgctggcctgcttcgtggccatcctcattggcttgtgtctgaccctcctgctgcttgctgtgttcaagaaggcgctgcccgccctccccatctccatcacgttcgggctcatcttttacttctccacggacaacctggtgcggccgttcatggacaccctggcctcccatcagctctacatctgagggacatggtgtgccacaggctgcaagctgcagggaattttcattggatgcagttgtatagttttacactctagtgccatatatttttaagacttttctttccttaaaaaataaagtacgtgtttacttggtgaggaggaggcagaaccagctctttggtgccagctgtttcatcaccagactttggctcccgctttggggagcgcctcgcttcacggacaggaagcacagcaggtttatccagatgaactgagaaggtcagattagggtggggagaagagcatccggcatgagggctgagatgcgcaaagagtgtgctcgggagtggcccctggcacctgggtgctctggctggagaggaaaagccagttccctacgaggagtgttcccaatgctttgtccatgatgtccttgttattttattgcctttagaaactgagtcctgttcttgttacggcagtcacactgctgggaagtggcttaatagtaatatcaataaatagatgagtcctgttag

SEQ ID NO: 4046 - DNA, 3173 bp, Homo sapiens
agattagttgaaaattattacaaaatattctaaaagggttttttgtggtacttcaagaaacctgattagttttgatctattgaaatcacaaaagtagaacagggcattttatttttgtataatttaggattaggtatgcttctttgttctaacaagtcatgttttctaacccttctttcactaagcaaaccagaacagatttgaactgttatgggttatatattagtatggagatcagctcagatgacattaaaaatgccgtagtgttattcttgtatgccaaatctttttttccccaaaattagcactttaattttatttactgttataatatttgttttcttagattaggtaggaaatcttaatttggccaccgcctactttgacaagtaaatattacatcatacgattttgcaacattaaattagaacactagaaactaaaaaattatgtttcagtgaatgctacaactaagcattttttttttttaagaaaaacaattgtattatgttttgttgccttgccactttgagtatcttatctgaaaatctgttccttgccatgtttttctcctgttaacataaactatgtgccctgtgaatttctggggactgaatttgaaattgctcctgccaaccgtttgtggcctggcgtgtatctgaatgcctgaatatctccccgctgaatgaatttcgtattctgccctgaattcactcgggtatattgattggctggatgatcttggtgccgcccacttgacgtttccagaagagtcaccgaaggaaaagaaccaggagtgtagaggatgatgaggagggtcacctgatctgtcagagtggagacgtactaagtgcaagatgtatagaatatttttcaacacttattaacttttcagataacataatctatatatagattaagctttcagggatttggaaatctttttttctttctcttttttgtttttgttttatttttccatttcttttggtgggggggattgtatttttgctttctttagaaatgtaatgtttgttatatagaacttccagaacagtaatcaaattaatgaaattagacctaataattatgttttttgatggtgttgaccaataaaatatctagtgataaggaaatttgtagcatcaactagaataatctacattgatagcatttattgtgataagtacattgtttccacttcttgatatgactgagatttatttctctcttttagatgaaattgttgatactttaggtgaaggagcttttggaaaagttgtggagtgcatcgatcataaagcgggaggtagacatgtagcagtaaaaatagttaaaaatgtggatagatactgtgaagctgctcgctcagaaatacaagttctggaacatctgaatacaacagaccccaacagtactttccgctgtgtccagatgttggaatggtttgagcatcatggtcacatttgcattgtttttgaactattgggacttagtacttacgacttcattaaagaaaatggttttctaccatttcgactggatcatatcagaaagatggcatatcagatatgcaagtctgtgaattgtaagttcttggtatatcttcgttaatttgctggttttatccattccacatatcaaaatgtgcatcctaagtgtgtacaatttttatttgattaaaaataaagggggaggaagaataggtatgaagagatttgattacaggctgttgatccagcagtgtacatttcattcagcaagtaggatatccaccatataacaacgtactttgttgcagactatgatttagacttttctgatgcgcaaaaatagtaacttcgaatgctgggtaaaaattaaggcgtgatatatctcataaaagaaagcttcataagaggtagtaagttttagttactggtgattttctagcagactggaatgttgaccattctttgggaaaggaatcagaggttttttgttgggtttttttgttttttgaaatggagtctcgctttgttgttcaggctgaagtgcagtggcgcagtcttcactcactgcaaactctgcctccccagttcaagtgattctcctgcctcagcctcccgagtagctaggactacaggcacacgccaccacacccggccaatttttgtaattttggtagagacagggtttcaccatattggtcaggctggtctcgaactcctgacctcaggtgattacaggcgtgagccactgcacccggcctgttgtggggttttgtgatttggtttggtttggtgttttctgattacagcaactttctctttattctcagttttgcacagtaataagttgactcacacagacttaaagcctgaaaacatcttatttgtgcagtctgactacacagaggcgtataatcccaaaataaaacgtgatgaacgcaccttaataaatccagatattaaagttgtagactttggtagtgcaacatatgatgacgaacatcacagtacattggtatctacaagacattatagagcacctgaagttattttagccctagggtggtcccaaccatgtgatgtctggagcataggatgcattcttattgaatactatcttgggtttaccgtatttccagacacacgatagtaaggagcatttagcaatgatggaaaggattcttggacctctaccaaaacatatgatacagaaaaccaggaaacgtaaatattttcaccacgatcgattagactgggatgaacacagttctgccggcagatatgtttcaagacgctgtaaacctctgaaggaatttatgctttctcaagatgttgaacatgagcgtctctttgacctcattcagaaaatgttggagtatgatccagccaaaagaattactctcagagaagccttaaagcatcctttctttgaccttctgaagaaaagtatatagatctgtaattggacagctctctcgaagagatcttacagactgtatcagtctaatttttaaattttaagttattttgtacagctttgtaaattcttaacatttttatattgccatgtttattttgtttgggtaatttggttcattaagtacatagctaaggtaatgaacatctttttcagtaattgtaaagtgatttattcagaataaattttttgtgcttatgaagttg

SEQ ID NO: 4047 - DNA, 1291 bp, Homo sapiens
cagccaaggcggagctgatggctgcgccgagggcggggcggggtgcaggctggagccttcgggcatggcgggctttggggggcattcgctgggggaggagaccccgtttgacccctgacctccgggccctgctgacgtcaggaacttctgacccccgggcccgagtgacttatgggacccccagtctctgggcccggttgtctgttggggtcactgaaccccgagcatgcctgacgtctgggaccccgggtccccgggcacaactgactgcggtgaccccagataccaggacccgggaggcctcagagaactctggaacccgttcgcgcgcgtggctggcggtggcgctgggcgctgggggggcagtgctgttgttgttgtggggcgggggtcggggtcctccggccgtcctcgccgccgtccctagcccgccgcccgcttctccccggagtcagtacaacttcatcgcagatgtggtggagaagacagcacctgccgtggtctatatcgagatcctggaccggcaccctttcttgggccgcgaggtccctatctcgaacggctcaggattcgtggtggctgccgatgggctcattgtcaccaacgcccatgtggtggctgatcggcgcagagtccgtgtgagactgctaagcggcgacacgtatgaggccgtggtcacagctgtggatcccgtggcagacatcgcaacgctgaggattcagactaagtttggaaactctggaggtcccctggttaacctggatggggaggtgattggagtgaacaccatgaaggtcacagctggaatctcctttgccatcccttctgatcgtcttcgagagtttctgcatcgtggggaaaagaagaattcctcctccggaatcagtgggtcccagcggcgctacattggggtgatgatgctgaccctgagtcccagggctggtctgcggcctggtgatgtgattttggccattggggagcagatggtacaaaatgctgaagatgtttatgaagctgttcgaacccaatcccagttggcagtgcagatccggcggggacgagaaacactgaccttatatgtgacccctgaggtcacagaatgaatagatcaccaagagtatgaggctcctgctctgatttcctccttgcctttctggctgaggttctgagggcaccgagacagagggttaaatgaaccagtgggggcaggtccctccaaccaccagcactgactcctgggctctgaagaatcacagaaacactttttatataaaataaaattatacctagc

SEQ ID NO: 4048 - DNA, 1922 bp, Homo sapiens
aaatttgcactgatggctcagaaggcttacgtcatggagagtatgacctacctcacagcagggatgctggaccaacctggctttcccgactgctccatcgaggcagccatggtgaaggtgttcagctccgaggccgcctggcagtgtgtgagtgaggcgctgcagatcctcgggggcttgggctacacaagggactatccgtacgagcgcatactgcgtgacacccgcatcctcctcatcttcgagggaaccaatgagattctccggatgtacatcgccctgacgggtctgcagcatgccggccgcatcctgactaccaggatccatgagcttaaacaggccaaagtgagcacagtcatggataccgttggccggaggcttcgggactccctgggccgaactgtggacctggggctgacaggcaaccatggagttgtgcaccctagtcttgcggacagtgccaacaagtttgaggagaacacctactgcttcggccggaccgtggagacactgctgctccgctttggcaaggtaaccaggccctcccaggcctgggtcgcaagcggtcctccaatttggccagcattcatgagactactttttgtcaagcatcctttgggaccaggcctagaacagaaatgttgatcaccctggagggatggggtggtgaggtcaggctgactttgtcagcctggggcccacttagctactcggatgggtacccttgctgggtgagttttctgcagtgtttttctgtgcacctttcaggtagagaggctccctagaatcgggagggcagctccacctggggcctgaatctagggacctgattggtggggcccttgctgctgaaggtggcagtagcacagtaagcactggcttctggtctcagccaagcttctgggacctggtcttgccttaacccctccctgaatctagagctcaaagagaagggaaaacagaaggtggctgggagccgttctcccacaacctgaagagaaaggtgttattgactccactttctcaaggaacacaggagactaagacaggcaaagatgcagcccagggagggaccatgtgggggactggtctaggtagtgagtccccacttggagcctctgtgatcccagaccatcatggaggagcagctggtactgaagcgggtggccaacatcctcatcaacctgtatggcatgacggccgtgctgtcgcgggccagccgctccatccgcattgggctccgcaaccacgaccacgaggttctcttggccaacaccttctgcgtggaagcttacttgcagaatctcttcagcctctctcagctggacaagtatgctccagaaaacctagatgagcagattaagaaagtgtcccagcagatccttgagaagcgagcctatatctgtgcccaccctctggacaggacatgctgaggcaggggacagtgtcccctgctaccgcccgcccctacccatggcccgttgctggatgactgttactcttttttcagaaggtgttgggattatcacaggttaagccttttgttccccgtctgcacctgaagggttgtcgcctggcctgggagagcctcttccaggttttgacctgcaggcagtgctctctaacaggaccatcacagcttctgaactgagccggagagagagaatggaattgctgacccctggaactggcgggtattctggtcattgaggagacaccatagtggaaactggggcttatgctgctgcctccagggtgtgaggtgggtggggacctgtgtcaggtgtggatagccatttctgctcaaccacacattctctaagaaacagcttgaaagctctgtctgggtcattcatttaaactagaagcagaggcacttaaaacatgtaccaggaaccatttaacaaagaatataaaatgtc

SEQ ID NO: 4049 - DNA, 1805 bp, Homo sapiens
ctctgagtcaccaacctgaggctgccccggccgcctgcgcacccggcagcaccatgacagatcaggcctttgtgacactaaccacaaacgatgcctacgccaaaggtgccctggtcctgggatcatctctgaaacagcacaggaccaccaggaggctggtcgtgctcgccacccctcaggtctcagactccatgagaaaagttttagagacagtctttgatgaagtcatcatggtagatgtcttggacagtggcgattctgctcatctaaccttaatgaagaggccagagttgggtgtcacgctgacaaagctccactgctggtcgcttacacagtattcaaaatgtgtattcatggatgcagatactctggtcctagcaaatattgatgatctttttgacagagaagaattgtcagcagcaccagacccagggtggcctgactgcttcaattccggagtcttcgtttatcagccttcagttgaaacatacaatcagctgttgcatcttgcttctgagcaaggtagttttgatggtggggaccaaggcatactgaacacattttttagcagctgggcaacaacagatatcagaaaacacctgccgtttatttataacctaagcagcatctctatatactcctacctcccggcatttaaagtgtttggtgcaagtgccaaagttgtgcatttcctgggacgagtcaaaccatggaattatacttatgatcccaaaacaaaaagtgtcaaaagtgaggcccatgatcccaacatgactcatccagagtttctcatcctgtggtggaacatctttaccaccaacgttttacctctgcttcaacaatttggccttgtcaaagacacctgctcatatgtaaatgtgctttcagacttggtctatacactggctttctcttgtggcttctgtagaaaggaagatgtctcaggagccatatcacatctgtcccttggggagatcccagctatggcacagccgtttgtatcctcggaagaacggaaggaacgatgggaacagggccaggctgattatatgggagcagattcctttgacaacatcaagaggaaacttgacacttacctccagtagaaacactgcatttttctgtgaacacatccacttcacaagccttgtttctgatacttagtatctagagctgggttgagaaaagtctgttacagttgctagaggttttcattaaaacttatcagatgagaggcttttttaggataagaggtgagaactgggcaaaagttgtgaagcagcaattctgttatatggacagtgttctgctttttaatcctatttagcttgtttcagaaattctcacttttgttgactgccaacatacaaagtaagggaaactcaagatattaagatggctgtatcagttcttaaaatctgcagagcctggttcaaaatcagtcactcccttcagaagcagacatggcatctgttccttgcttgcttgttggttgtgtacctttcacgagacctgaattttagaattgcccagtgctgccagagtgagtgagtgtaattctcctttcaggtaaagataggctatctcaacactgctgagtgattcataaacatatcaaccaatagcattaacccattttatttcctgtccttagtgtctgaagatgctcaccagttttctgtgtacagtaaggcagcatgctaaaatgcttttgttcagttctgtatatttgaaaatagcagtgtgttctctgatggttacctgcagtggcaccctgtacaaaaaataaaagacttattgctgta

SEQ ID NO: 4050 - DNA, 5090 bp, Homo sapiens
cgattttgctctaaactgctgcatctgtctatgccaaactaatcaataccgattgcaccaccaaactccattgcaaattcagctgtgaggagattccctttcagacaactttgctgaaagcagcttggaaattcggtgtcgaagggtctgccacgttttcatgcttgcattttgggctccaaattggcactgggaaggggttactgagagcacaaggctgataccaggccctacttttaaacgttcatctacttacaatcctagtatttctctaaaaaccaaaacctctttgaattaacagtttcatgctgtgaatttctagtgggagatcttttccttgatattgacgacacaattttccatgtacttttaaagcagggagtggggaaaagtattttgaggggacattttcatcatcagttcagctttttttttttggttgttgctcttttttgggggggttgggtttgttggtttcactgaaacatttaactacctgtaaaatctaaacatggctgttagtgtcacaccaattcgggacacaaaatggctaacactggaagtatgtagagagttccagagggggacttgctcacggccagacacggaatgtaaatttgcacatccttcgaaaagctgccaagttgaaaatggacgagtaatcgcctgctttgattcattgaaaggccgttgctccagggagaactgcaaatatcttcatccacccccacatttaaaaacgcagttggagataaatggacgcaataacttgattcagcagaagaacatggccatgttggcccagcaaatgcaactagccaatgccatgatgcctggtgccccattacaacccgtgccaatgttttcagttgcaccaagcttagccaccaatgcatcagcagccgcctttaatccctatctgggacctgtttctccaagcctggtcccggcagagatcttgccgactgcaccaatgttggttacagggaatccgggtgtccctgtacctgcagctgctgcagctgctgcacagaaattaatgcgaacagacagacttgaggtatgtcgagagtaccaacgtggcaattgcaaccgaggagaaaatgattgtcggtttgctcatcctgctgacagcacaatgattgacaccaatgacaacacagtcactgtgtgtatggattacatcaaagggagatgctctcgggaaaagtgcaaatactttcatccccctgcacatttgcaagccaagatcaaggctgcccaataccaggtcaaccaggctgcagctgcacaggctgcagccaccgcagctgccatgactcagtcggctgtcaaatcactgaagcgacccctcgaggcaacctttgacctgggaattcctcaagctgtacttcccccattaccaaagaggcctgctcttgaaaaaaccaacggtgccaccgcagtctttaacactggtattttccaataccaacaggctctagccaacatgcagttacaacagcatacagcatttctcccaccagttcccatggtgcacggtgctacgccagccactgtgtccgcagcaacaacatctgccacaagtgttcccttcgctgcaacagccacagccaaccagatacccataatatctgccgaacatctgactagccacaagtatgttacccagatgtagaattttcatcactaaacaatcatgctaaagaggaaaggacagtgtgcttggttagagtaaaggacgaggtcattagccatattgtatatatcgtcaagcaacacacacaaaagttcctcagccacaagacatccacatattgcatgttaaccagaagaaaagacaacattttccggaaatccactgcacactgttgcctatacactttgtacatttaattgatatttgtgctgaggtgatattcctgtctaaaagaacaacattgtctttcttttctagcacagagttatgcattcaaagatgcatacctagttagtttcctatatattcatgccatcttgaaaagacagactatggtgtaaccatgattctattatgtattggtacgtctgtagaccaagatataattttttaaaaataagtttatttctttcaaggtttacaaataacaaaggtgcaccttgtatttaaaattgccattatagatgagagcgtgcatgcacagtcatttttgtttaagagtaatatttttaatgtaatagattgtaagacgtggtgagggagggatctgacagagatgaatgtgccaagcaaaaccacaactgtgtatattttaaagcacatcatggctttaagtaccatgttgttaaggattctcatgaagtgccatagactgtacatcaaattagagtattatttcttcagtgttattgttttcagagccacattttgttgcatatttgctagtactaatcagtcaaagggcaccattctttttttttttttttgaaaccaaagctgtctcagaaatggccaatttaactttacagtaacaatagacagcacaacacaaactctctcaatacagataaactcacacatactggagatatatatataatagatatatataaaattattttaatgcattgtagtgtaatatttatgcatactatactgtataacatgttattcaacaagggattgccatttctgagacacaaaaacacaaaaatgaggaaattatttgcttctatttatagcctatgtcaaaagtcaattgactataaatgctttgcaaaaatgtttcacgtttgcttaaatgcttcatcacagtcacattcaaaatagtgactctaaacaaagaagaaagcagcactgtcatcagatgcatgataaaccaaaatatgaaaatgggaaatgtttaattaacctagtaattgggtgggttaagtacatgggtgaattttatatgtgatttttgttttgttttgttttgttcagattaactgcttatagccttagaaagccttttacaaaattaaaaaaaaaatagatgtgcattcagtttttaagaatggaatcatccaaaggaattcctttttttgaggtttggatgttgcagctagtaaaggatatttttgctctgttcagcagttctaaaaattgctgaagtaggggccaggtcactggtagttatagtatggaatgggagaagtgaaagttcagttatagaactttccatacttccaagtttactgcaagtttttatgcttgagagagatgctttctaatataagactgatgtgttgattttactgattgtactgtacatctattaaagccttagattattacattacgggttggaacccataccaatgtaatttcaatcgtgttaagaaagtaatggtgacttcacatgttattgtagttagttacattatagaatattacttatttttcttgttaaaatgtagtttttcatttcctacatttattagattttcattttctattaacaattgaataccatttcagtttatagacttgttttattagattttaccaatgaatttttcaaaatacaaaaaaaagtagtttttccttcataacatactcagttttgaattacatgtagtgtcacatgaatattcgtattgttaactaaatgatttatattttactgatttaatattacagtgtaagaatgtcagtcattgttagttcttgtctagttttcattaaaagaacaaagatcttttatatggatatcttataaatatataatcattgctaagtaagaagttaagtagttgctatcgcaacaatcctggcagacaattgagtaatattttgatgatttattttgtttgtaattagttattataagaagatctagatcctagatattagaataaaatttattttctactgtatccatttcaaatgttaaaatattgtttaatatttttgaaatccctgagtatcaggccttgttataaataagctgcataatcaataaatagaacaagggactttttgttgataatccaaatactcaaagtttacgtaatgaaaattatagcgtgtgtgcaaactcttgagggttgattatgctgcaatttagcatgttggaacgtctagggagaaggttgactttttgcacttctgtatatagtcaaaagagagaaacctgtataatagtaagatcttattttgaataaaaacgtctataattacaaggagttttgttaaggctaatacaatgacagactgagcaaaattgcttgcaaaagtggcacagagttagcactccataccccttcaaacatgttgctttgctttcttgtggacagcttgtagtttgccaggattttttcagctggaaagatacgccatcctttcaaaccctcatgactgacaaaaactccatggggccaaatctgcctgaagatcattaccaaaaatagcaggtacttctaccattaaggtgaaatcatggatcagatattccttacatttttcaaaactactgcatgtttaaaacttcaacaaaaaaagagagaaagaactatactaagaacatatattattcagatcagtttctgccaatttcagtggtttattgttcacaaaaaaatcttcaaaacaagtattgactttcacaaaatttaaatcataaacaggcaaaccaaacagcacactgtagctatagttgttatgtgattgttttttaattgctgtaggatcctgttctttcagcaggtgaaaaataaaacgcagttcaaatttcatggttttaattttcaactcagaagcactcaaaaatgcaaaatgtgataatgggcacttgtttaaaagaattagtgtatccagccttcactccagctggttaaaaatgttgcacttatcagcaaccctaccactttcatctgctgaaaggacaaatgtgcttggttttactattatgtaatcacaacttactttctgcttgtagttgcttaaaattatgtattttgtcttgggctgcaatttgttttatgcttattttattattactgcagtagttgactttgctgtatggaaaaataaagtgaaattgccctaataaaacttctctttcttaagt

SEQ ID NO: 4051 - DNA, 1991 bp, Homo sapiens
gaggagacggcccacggcgcccgcgggctggggcggtcgcttcttccttctccgtggcctacgagggtccccagcctgggtaaagatggccccatggcccccgaagggcctagtcccagctgtgctctggggcctcagcctcttcctcaacctcccaggacctatctggctccagccctctccacctccccagtcttctcccccgcctcagccccatccgtgtcatacctgccggggactggttgacagctttaacaagggcctggagagaaccatccgggacaactttggaggtggaaacactgcctgggaggaagagaatttgtccaaatacaaagacagtgagacccgcctggtagaggtgctggagggtgtgtgcagcaagtcagacttcgagtgccaccgcctgctggagctgagtgaggagctggtggagagctggtggtttcacaagcagcaggaggccccggacctcttccagtggctgtgctcagattccctgaagctctgctgccccgcaggcaccttcgggccctcctgccttccctgtcctgggggaacagagaggccctgcggtggctacgggcagtgtgaaggagaagggacacgagggggcagcgggcactgtgactgccaagccggctacgggggtgaggcctgtggccagtgtggccttggctactttgaggcagaacgcaacgccagccatctggtatgttcggcttgttttggcccctgtgcccgatgctcaggacctgaggaatcaaactgtttgcaatgcaagaagggctgggccctgcatcacctcaagtgtgtagacattgatgagtgtggcacagagggagccaactgtggagctgaccaattctgcgtgaacactgagggctcctatgagtgccgagactgtgccaaggcctgcctaggctgcatgggggcagggccaggtcgctgtaagaagtgtagccctggctatcagcaggtgggctccaagtgtctcgatgtggatgagtgtgagacagaggtgtgtccgggagagaacaagcagtgtgaaaacaccgagggcggttatcgctgcatctgtgccgagggctacaagcagatggaaggcatctgtgtgaaggagcagatcccaggtgcattccccatcttaactgatttaacccctgaaacaacccgacgctggaagttgggttctcatccccactctacatatgtaaaaatgaagatgcagagagatgaagctactttcccagggctatatggcaagcaagtcgcaaagctgggatcccaatccagacagtctgaccgtggaacgagactcatacacagtcagcaggcttcttctcagagatgacagaagacgagttggtggtgctgcagcagatgttctttggcatcatcatctgtgcactggccacgctggctgctaagggcgacttggtgttcaccgccatcttcattggggctgtggcggccatgactggctactggttgtcagagcgcagtgaccgtgtgctggagggcttcatcaagggcagataatcgcggccaccacctgtaggacctcctcccacccacgctgcccccagagcttgggctgccctcctgctggacactcaggacagcttggtttatttttgagagtggggtaagcacccctacctgccttacagagcagcccaggtacccaggcccgggcagacaaggcccctggggtaaaaagtagccctgaaggtggataccatgagctcttcacctggcggggactggcaggcttcacaatgtgtgaatttcaaaagtttttccttaatggtggctgctagagctttggcccctgcttaggattaggtggtcctcacaggggtggggccatcacagctccctcctgccagctgcatgctgccagttcctgttctgtgttcaccacatccccacaccccattgccacttatttattcatctcaggaaataaagaaaggtcttggaaagtt

SEQ ID NO: 4052 - DNA, 1742 bp, Homo sapiens
ttttcagtcgggcgctgagtggtttttcggatcatgtctggtggctccgcggattataacagagaacatggcggcccagagggaatggaccccgatggtgtcatcgagagcaactggaatgagattgttgataactttgatgatatgaatttaaaggagtctctccttcgtggcatctatgcttacggttttgagaagccttccgctattcagcagagagctattattccctgtattaaagatccaaaaggtaattctggcacttggagactatatgggagccacttgtcatgcctgcattggtggaacaaatgttcgaaatgaaatgcaaaaactgcaggctgaagcaccacatattgttgttggtacacccgggagagtgtttgatatgttaaacagaagatacctttctccaaaatggatcaaaatgtttgttttggatgaagcagatgaaatgttgagccgtggttttaaggatcaaatctatgagattttccaaaaactaaacacaagtattcaggttgtgttgctttctgccacaatgccaactgatgtgttggaagtgaccaaaaaattcatgagagatccaattcgaattctggtgaaaaaggaagaattgacccttgaaggaatcaaacagttttatattaatgttgagagagaggaatggaagttggatacactttgtgacttgtacgagacactgaccattacacaggctgttatttttctcaatacgaggcgcaaggtggactggctgactgagaagatgcatgccagagacttcacagtttctgctctgcatggtgacatggaccagaaggagagagatgttatcatgagggaattccggtcagggtcaagtcgtgttctgatcactactgacttgttggctcgcgggattgatgtgcaacaagtgtctttggttataaattatgatctacctaccaatcgtgaaaactatattcacagaattggcagagggggtcgatttgggaggaaaggtgtggctataaactttgttactgaagaagacaagaggattcttcgtgacattgagactttctacaatactacagtggaggagatgcccatgaatgtggctgaccttatttaattcctgggatgagagttttggatgcagtgctcgctgttgctgaataggcgatcacaacgtgcattgtgcttctttctttgggaatatttgaatcttgtctcaatgctcataacggatcagaaatacagattttgatagcaaagcgacgttagtcgtgagctcttgtgaggaaagtcattggctttatcctctttagagttagactgttggggtgggtataaaagatggggtctgtaaaatctttctttcttagaaatttatttcctagttctgtagaaatggttgtattagatgttctctatcatttaataatatacttgtggactaaaagatataagtgctgtataaaatcagccaattatgttaaactagcatatctgcctttattgtgtttgtcattagcctgagtagaaaggcctttaaaatttttttagaaagcatttgaatgcattttgtttggtattgtatttattcaataaagtatttaattagtgctaagtgtgaactggaccctgttgctaagccccagcaagcaatcctaggtagggtttaatccccagtaaaattgccatattgcacatgtcttaatgaagtttgaatgttaaataaattgtatattcacttt

SEQ ID NO: 4053 - DNA, 2528 bp, Homo sapiens
gcctaggcccgggcctgcggtggtgggggttgctgcgcgccgggggtcgctcctgctgtgtcttccgctccagcttcgcccacttccccttgccagcggggtgggcgcggagaagacctgccggagccatggaggacgaagtggtccgctttgccaagaagatggacaagatggtgcagaagaagaacgcgtccacaagaatcggaatgtcagttaatgctattcgcaagcagagtacagatgaggaagttacatctttggcaaagtctctcatcaaatcctggaaaaaattattagatgggccatcaactgagaaagaccttgacgaaaagaagaaagaacctgcaattacatcgcagaacagccctgaggcaagagaagaaagtacttccagcggcaatgtaagcaacagaaaggatgagacaaatgctcgagatacttatgtttcatcctttcctcgggcaccaagcacttctgattctgtgcagttgaagtgtagggagatgcttgctgcagctcttcgaacaggggatgactacattgcaattggagctgatgaggaagaattaggatctcaaattgaagaagctatatatcaagaaataaggaatacagacatgaaatacaaaaatagagtacgaagtaggatatcaaatcttaaagatgcaaaaaatccaaatttaaggaaaaatgtcctctgtgggaatattcctcctgacttatttgctagaatgacagcagaggaaatggctagtgatgagctgaaagagatgtggaaaaacttgaccaaagaagccatcagagagcatcagatggccaagactggtgggacccagactgacttgttcacatgtggcaaatgtaaaaagaagaattgcacttacacacaggtacaaacccgtagtgctgatgaaccagtgacaacatttgttgtctgtaatgaatgtggaaatcgatggaagttctgttgagttggaagaattggcaaaatatctggaccattaagaaaacggattttgtaactagctttaaactaggccaagcaactagttttcctgcaaatcaaatttttaaagcaacttgagttagactttgtttttgacctaacatcccttccttaaatgccttctgtagtttcagatcagtagggagaccatataataattgtatggtacctgtttcaaaacatattttttctgtttttataagtaagttgatattaattaaactcttggcaatatttcttctttcttaaaggaaaatacaccttaactttttttcttttacactgtgaaacatacacagtagaaattctgttactctctgttattaatacataaatgaaaatacttttttttccatattggcatgtagctacaaatattaaaggaggagaaaaggtaatataattttaggtttaccaaatatggtgtgtattcaaataatacttgaccagcttatctaaaatgtacataattttgaggtagcttatgaatttgattttaattattatgttcacaagcttggaatattagatattattttgcatctgtaactaaccgtgatcatcatctcttgtaatttcttgtacatgtatattacttgttcttaatagatttttggaaacaagactttattgagatcagtttggttttcctgttaatttacctgtttgactttataatgtgttttagttttgcagaagaacactgttgtagtttagaaggcttttcataaatcccctcataggcaaagatgagaacttcccactatttttttcccctcttaggaagacatactggaaagaaaatgtttagcatcttagtgtagtatagctattgtaaacagttcatgactagattttgattcggaaatctatactgaccaaggattaatcttaaggactgtataattcattaaagcggtggtctttccatgtggagactgatagaaaataattttgtcccaagtcttatttgctgactttttctgtcaatgagtgagattgttgaacaaactgaatatatgggctatagcaagtagctttacagtacagatcttacaattaagttttgcttttgttaaagtgtgtaccattttttctgtttggagtaagacaaaaattgttttgacataggttccctagggtacacttgctctagcatactttaaaggccactgttgcaaagtctacattttatgctgaatctgcattctgtcaggcacccgtagaaagacctcagtacatgctttgcactctcctttgctccctttttccaatttcttattgcatatcattttgttgtaatacagaaagcagcatttttaaatgtccatgttaagaattggcccactggtaccgactcacctctattttgtcagttcatagttgaagattttgttttatttcaaaaacaaagtacatttttgaaataatgtttcagaataaaataatctcacttttaaattaagtgatccattttaaaatttgtaattcaataaagttttttttgttgttaaacataaaa

SEQ ID NO: 4054 - DNA, 1608 bp, Homo sapiens
  misc_feature (632)..(632): n is a, c, g, or t
gagtgcaagatcgttttctcagtggtggtggaagttgcctcatcgcaggcagatgttggggctttgtccgaacagctcccctctgccagcttctgtagataagggttaaaaactaatatttatatgacagaagaaaaagatgtcattccgtaaagtaaacatcatcatcttggtcctggctgttgctctcttcttactggttttgcaccataacttcctcagcttgagcagtttgttaaggaatgaggttacagattcaggaattgtagggcctcaacctatagactttgtcccaaatgctctccgacatgcagtagatgggagacaagaggagattcctgtggtcatcgctgcatctgaagacaggcttgggggggccattgcagctataaacagcattcagcacaacactcgctccaatgtgattttctacattgttactctcaacaatacagcagaccatctccggtcctggctcaacagtgattccctgaaaagcatcagatacaaaattgtcaattttgaccctaaacttttggaaggaaaagtaaaggaggatcctgaccagggggaatccatgaaacctttaacctttgcaaggttctacttgccaattctggttcccagcgcanagaaggccatatacatggatgatgatgtaattgtgcaaggtgatattcttgccctttacaatacagcactgaagccaggacatgcagctgcattttcagaagattgtgattcagcctctactaaagttgtcatccgtggagcaggaaaccagtacaattacattggctatcttgactataaaaaggaaagaattcgtaagctttccatgaaagccagcacttgctcatttaatcctggagtttttgttgcaaacctgacggaatggaaacgacagaatataactaaccaactggaaaaatggatgaaactcaatgtagaagagggactgtatagcagaaccctggctggtagcatcacaacacctcctctgcttatcgtattttatcaacagcactctaccatcgatcctatgtggaatgtccgccaccttggttccagtgctggaaaacgatattcacctcagtttgtaaaggctgccaagttactccattggaatggacatttgaagccatggggaaggactgcttcatatactgatgtttgggaaaaatggtatattccagacccaacaggcaaattcaacctaatccgaagatataccgagatctcaaacataaagtgaaacagaatttgaactgtaagcaagcatttctcaggaagtcctggaagatagcatgcgtgggaagtaacagttgctaggcttcaatgcctatcggtagcaagccatggaaaaagatgtgtcagctaggtaaagatgacaaactgccctgtctggcagtcagcttcccagacagactatagactataaatatgtctccatctgccttaccaagtgttttcttactacaatgctgaatgactggaaagaagaactgatatggctagttcagctagctggtacagataattcaaaactgctgttggttttaattttgtaacctgtggcctgatctgtaaataaaacttacatttttc

SEQ ID NO: 4055 - DNA, 1304 bp, Homo sapiens
  misc_feature (249)..(285): n is a, c, g, or t
tgcctccgggtcgcggtcattttgagcccctgtctggatgacttcttgcggctgttctacccctccccctccccgcggtaccttgcacttttctccctccctgccccctctcgagtccaccctccgggccttctgcccctgatcgcttggttttccttgcagtcgcctgctgctgtcgtcgggaggaaagatgaatgggagggctgattttcgagagccgaatgcagaggttccaagaccaattccccnnnnnnnnnnnnnnnnnnnnnnnnnnnnnnnnnnnnngagagtcttcgcagaatgcaatgatgaaagcttctggttcagatctgtgcctttggctgcaacaagtatgttgattactcaaggattaattagtaaaggaatactttcaagtcatcccaaatatggttccatccctaaacttatacttgcttgtatcatgggatactttgctggaaaactttcttatgtgaaaacttgccaagagaaattcaagaaacttgaaaattccccccttggagaagctttacgatcaggacaagcacgacgatcttcaccacctgggcactattatcaaaagtcaaaatatgactcaagtgtgagtggtcaatcatcttttgtgacatccccagcagcagacaacatagaaatgcttcctcattatgagccaattccattcagttcttctatgaatgaatctgctcccactggtattactgatcatattgtccaaggtagaaacttctcttgaaatgaatttcaacattttatggtccaactcaaagtaaacaagtatggagatacttgggatgagtgaaaaattacatcattggacatgaaggagtttcaacatccagcttcatctaggtggtcatgattacctgcatgctttgagctcagcagcagtcttcataaacacatttaaaacaagatcctgggtttttgtggtttgacttctatggtgttttaaaaaaacacagatttttagtgttaatattgtgtaaatgtactcaccttagggattcatttgaatgatggtattataccatgattgtatacagtttgtgaaattgttgcaagggcaaagataactcttaaaaaaccgtcgagattacaatgctctagaatcagcatataagaaaataaatgatatctgcatgttgaattggggtggatggggggagcaagcataatttttaagtgtgaagctttgcatcaagaaattattaaaaagctttttttctccagtattttctgtattatcttaatgtttatggcaaataaaatgtaaaggaacatgc

SEQ ID NO: 4056 - DNA, 5003 bp, Homo sapiens
agcagcggcggcagcggcagcccagccgagcgttaggtgctgctctctgcgcggcgttttgcaaaggacttcaccgatctacttttgcagtcgcctcggactgtccatgtgtttacttcccccagcccgaggattcgatatctaggttcctgtgaaatgcaactgagcagccaaagtactttgagaacacggggcggcataaacaccaaaacttttttgtggaaggaaaatgcaataagcaagcttgccgttttccgatgcggtgtggagtgagtgtgtgtcgcgcgtgtccgcactggaggcatatgcttgtgtgtgtacatggggtgtgtttttcggtatgtagggagaaaatgcttgccaaccaccggaaatctcctggaatttattagaaaataatggattataaaaagaaggcaagcaaggagcggatctccccttgagttgcaacccgatttgctgctggctcagtttgttgtgattctttttgttgataggtgtctgatggtattccgataacgttccccccttttcttccccttgagcttttacagtttaaaaaaaggaaacaaaaaccaccccaaaatctccccccccgtttttttcgccccgtcgggatcgccgtttccatccatgtgcttgcgtctcccccgcgttccacttaaactattttaatccttggacccaaggaggaggctgataggggggtggataaaaaaagttcttccaaaatagtgtgcccggggagcaggatgggggatttcgcagcccccgctgctgccgcgaatggcagtagtatttgcatcaacagtagcctgaacagcagcctcggcggggccgggatcggtgtgaataatactcccaatagtactcccgctgctccgagtagcaatcacccggcagccggtggatgcggcggctccgggggccccggcggcggttcggcggccgttcccaagcacagcaccgtggtggagcggctccgccagcgcatcgagggctgccgtcggcaccacgtcaactgcgagaacaggtaccagcaggctcaggtggagcagctggagctggagcgccgggacaccgtgagcctctaccagcggaccctggagcagagggccaagaaatcgggcgccggcaccggcaaacagcagcacccgagcaaaccccagcaagatgcggaggctgcctcggcggagcagaggaaccacacgctgatcatgctacaagagactgtgaaaaggaagttggaaggagctcgatcaccacttaatggagaccagcagaatggtgcttgtgatgggaatttttctccgactagcaaacgaattcgaaaggacatttctgcggggatggaagccatcaacaatttgcccagtaacatgccactgccttcagcttctcctcttcaccaacttgacctgaaaccttctttgcccttgcagaacagtggaactcacactcctgggcttctagaagatctaagtaagaatggtaggctccctgagattaaacttcctgtcaacggttgcagtgacctggaggatagcttcaccatcttgcagagcaaagacctcaaacaagaacctctcgatgaccctacttgcatagacacatcagaaacatctctttcaaatcagaacaagctgttctcagacattaatctgaatgatcaggagtggcaagaattaatagatgaattggccaacacggttcctgaggatgacatacaggacctgttcaacgaagactttgaagagaagaaggagccagaattctcgcagccagcaactgagacccctctctcccaggagagtgcgagcgtgaagagcgacccctctcactctcccttcgcacatgtctccatgggatctccccaggcgaggccttcttcttctggtcctcccttttctactgtctccacggccactagtttaccttctgttgccagcactcccgcagctccaaaccctgcaagctcaccagcaaactgtgctgtccagtcccctcaaactccaaaccaagcccacactccaggccaagctccacctcggcctggaaatggttatctcctgaatccggcagcagtgacagtggccggttcagcgtcagggcctgtggctgtgcccagctctgacatgtctccagcagaacagctcaaacagatggctgcacagcagcaacaaagggccaaactcatgcagcagaaacagcaacagcaacagcagcagcagcagcagcagcagcagcagcagcagcagcagcagcagcagcagcagcaacagcactcaaatcagacttcaaattggtctcccttaggacctccctctagtccatatggagcagcttttactgcagaaaaaccaaatagcccaatgatgtacccccaagcctttaacaaccaaaaccctatagtgcctccaatggcaaacaacctgcagaagacaacaatgaataactacctccctcagaatcacatgaatatgatcaatcagcagccaaataacttgggtacaaactccttaaacaaacagcacaatattctgacttatggcaacactaaacccctgacccacttcaatgcagacctgagtcagaggatgacaccaccagtggccaaccccaacaaaaaccccttgatgccgtatatccagcagcagcaacagcagcagcaacagcaacagcagcagcagcagcagcagcagccgccacctccacagctccaggcccccagggcacacctgagcgaagaccagaaacgcctgcttctcatgaagcagaaaggagtgatgaatcagcccatggcttacgctgcacttccatcccacggtcaggagcagcatccagttggacttccccgaaccacaggccccatgcagtcctccgtgcccccaggctcaggtggcatggtctcaggagccagtcccgcaggccccggcttcctgggcagccagccccaagcagccatcatgaagcagatgctcattgatcagcgggcccagttgatagagcagcagaagcaacagttcctgcgggagcaaaggcagcagcagcagcagcagcagcagcagattttggcggaacagcagttgcagcaatcacatctaccccggcagcacctccagccacagcggaatccatacccagtgcagcaggtcaatcagtttcaaggttctccccaggatatagcagccgtaagaagccaagcagccctccagagcatgcgaacgtcacggctgatggcacagaacgcaggcatgatgggaataggaccctcccagaaccctgggacgatggccaccgcagctgcgcagtcggagatgggactggccccttatagcaccacgcctaccagccaaccaggaatgtacaatatgagcacaggcatgacccaaatgttgcagcatccaaaccaaagtggcatgagcatcacacataaccaagcccagggaccgaggcaacctgcctctgggcagggggttggaatggtgagtggctttggtcagagcatgctggtgaactcagccattacccagcaacatccacagatgaaagggccagtaggccaggccttgcctaggccccaagcccctccaaggctgcagagccttatgggaacagtccagcaaggagcacaaagctggcaacagaggagcttgcagggcatgcctgggaggactagtggagaattgggaccattcaacaatggcgccagctaccctcttcaagctgggcagccgagactgaccaagcagcacttcccacagggactgagccagtcagtcgtggatgctaacacgggcacagtgaggaccctcaacccagctgccatgggtcggcagatgatgccatcgctcccggggcagcaaggcaccagccaggcgaggccaatggtcatgtctggcctgagccagggagtcccaggcatgccagcgttcagccagcccccagcacagcagcagatacccagtggcagctttgctccaagcagccagagccaagcctatgagcggaatgcccctcaggacgtgtcatacaattacagtggcgacggagctgggggttccttccctggcctcccggacggtgcagaccttgtggactccatcatcaaaggcgggccaggggacgagtggatgcaggagcttgatgaattgtttggtaacccctaatcaagagaggccccaagatccacaactcgagtggttaaagcttaaaaagtgaaaaagaaacaggatgttgacccatccttgttttttgtttttttgacccacgtaaactgagcaaaactgcagctggctgacaatggaagatccaggtgccaatccacagccccaccaggcctcatttcacctgattttcacacagcaatcgagatgagacgccatgcagatcccggctgcgagagagggagacacccggaggagcaggtgggaagatgaagccggccagagcccctctgcccagcatgccctgtgatcgcctggcccagcaggagctgcttcagccgagagggactattacccaagagaggtatcctcagcccctcctgccccaggtcgggagacagcagctttggagacacaaaagagacagagcctcagccagggagagtgagtcccccagaagaggctgggtggttgcacaggccaggtgcacaggttggaaatgcactgaactctgggtgccgagagatgtaaggctttgagacatgctactgaatttggagggcaggcacgaagaacagtgagattgtcaaaaggagacaaccacagatcctacaggactgtctgtctcctgccccatgatgaccctcaggaattgcaaaggctctgctgtcacaaggagagcaggctgagtttggagcagggtccatccggcagtcctgggacggcttccctctgctggtgcccctggtggcagtccctccaggtggggctggagcctgctggcgcccaatacaaaacccatacatccaggtggaatacatctacttgtggcggccg

SEQ ID NO: 4057 - DNA, 2971 bp, Homo sapiens
attcaagggaggcaggcgctttggaagtttgtaaacaccaactttctgagtaagggaggagcactttttttccaaaaaggaaagaacgtctctactgggtttttttcctcctgatattcagcattagagtagaaaagaaactattgtttggccacattagccgtggttagcaggtgctgcagcctttgccactgttattatttttaaagggcagaaatgcctgaaggtgaagactttggaccaggcaaaagctgggaagttatcaattccaaaccagatgaaagacccaggctcagccactgtattgcagaatcatggatgaatttcagcatatttcttcaagaaatgtctctttttaaacagcagagccctggcaagttttgtctcctggtctgtagtgtgtgcacattttttacgatcttgggaagttacattcctggggttatactcagctatctactgttactgtgtgcatttttgtgtccattgtttaaatgtaatgatattggacaaaaaatttacagcaaaattaagtcagttctgctgaaactggattttggaattggagaatatattaatcagaagaaacgtgagagatctgaagcagacaaagaaaaaagtcacaaagatgacagtgaattagacttttcagctctttgtcctaagattagcctcacggttgctgccaaagagttatctgtgtctgacacagacgtctcagaggtatcctggactgataatgggaccttcaacctttcagaaggatacactccacagacagacacttctgatgatcttgaccgacccagtgaggaagttttctctagagatctttcagattttccatctctagaaaatggcatgggaacaaatgatgaagatgaattaagccttggtttgcccactgagctcaagagaaagaaggaacagttggacagtggtcacagaccaagcaaagagacgcaatcagcagctggtctcacccttcctctgaacagtgaccaaacctttcacctgatgagcaacctggctggggatgttatcacagctgcagtgactgcagctatcaaagaccagttagagggtgtgcagcaagcactttctcaggctgcccccatcccagaagaggacacagacactgaagaaggtgatgactttgaactacttgaccagtcagagctggatcaaattgagagtgaattgggacttacacaagaccaggaagcagaagcacagcaaaataagaagtcttcaggtttcctttcaaatctgctgggaggccattaatctaggaatcagcttgcaacagagcacaaaaaacaccaaaaaaatttcaaacaagaaaaaaaaaaaaaaaaggaaaagaaaaaaattgaactgtaagctttaatgattactttagatttgttttattttccctcctgcagtgaattaattggatatatatcagctgacactgatagattgatatttctgatcgttatttttgtgtcataagcatggaaatgaactttatacacaccactgtgttgtcagagataaatattaggggttgtttttaaagcaaaaagaaaaaaacaaaaaccaaactattaaaatcctcctataaatattctttttctttacagtttttcaagcatgcaaaacagtttattgtaacttactgaaaaatattaacaattaattgtgaatacatgctgttaccagcttccttattcctaatacctggaaaatttttttttcaacggatagattttgatgtaaaaaagaccgaaattatcaaggtatcttagttgaaggacttgggaaatactatcaaaattaatttcttaggaaaaaatttaaaagtatatttaagtactctggatagactgaaacgtttccatgttatttctgcagttgtagacttaggcttatttgtaaagaagcatgctccattgactgccatctctagtcttgcagtgggtggtattaacccatagaaagcaagcagttgtgtatcacatagacaatggttatgatgtaaacagattcagttgttttgttgttcattcgtcatatgtttgtgatagggatgttgggagcacagctctattctgcctgctcagacttaagttagacccttatcttttatattatgtcatgaaaaaagtctcctaaaattgtgaaactagttcttgatgagtgatgtgatcatcagcaataaagatataataactctgttttcttagcctgtatagaggagaggaacttgcttggctttaaaatatatttatttgccatttaagtataaatatgaaatctgtttcttattgggaagatagaatatatatattttcctttaaactttttaaggtcacttttaaataaccaaatttgatttatggtttttaacaaaggactaaagagctgaaaccaacctagttttgtttttgtgatataaactttaagtgtcgagggaccatgccagcaactaccaaaaatctcttaaatcttcaggtacagctggcattttggcagatgcatagagacatctgagaccctcagaaaggaaggataatccaagaatataggaaatctgtgttctcttcctttcattttatcccttatatttctaaagactaattataagtaatctgacattttaatgtagctactcttatttattttttctttctgaggtattaaaatatctggactgagttttgccaaatgttaaagggagaagagttactgaagactttgaacacttgctttttgtgattgcttatgtcattagtgcctcatgactgtgtttgatgtcctttattgatacaaagtgagcctgtgccttcattatcttgcccattttaatacaaatggaaacctggtgtttgaaaatctctgaactgtgtgggttttggaggaatatacctgaattttattcaataacagtttctggacaggaagaaaaatacagttacatatttat

SEQ ID NO: 4058 - DNA, 1038 bp, Homo sapiens
gctggagtgcagtggtgcgatctctgctcactgcaagctccgcctcccgggttcacaccattctcctgcctcagcctcccgagtagctgggactacagcttccgaagaactgaccattgctggcatgacgtttacaacttttgatctgggtggacatgttcaagctcgaagagtgtggaaaaactaccttcctgctatcaatggcattgtatttctggtggattgtgcagaccacgaaaggctgttagagtcaaaagaagaacttgattcactaatgacagatgaaaccattgctaatgtgcctatactgattcttgggaataagatcgacagacctgaagccatcagtgaagagaggttgcgagagatgtttggtttatatggtcagacaacaggaaaggggagtatatctctgaaagaactgaatgcccgacccttagaagttttcatgtgtagtgtgctcaaaagacaaggttacggagaaggcttccgctggatggcacagtacattgattaacacaaactcacattggttccaggtctcaacgttcaggcttactcagagatttgattgctcaacatgcataacttgaattcaatagacttttgctggttataaaacagatgttttttagattattaatattaaatcaacttaatttgaatgagaattgaaaactgattcaagtaagtttgagtatcacaatgttagctttctaattccataaaagtacttggtttttacagtttataatctgacatcaccccagcgccatttgtaaagagcaactttccagcagtacatttgaagcactttttaacaacatgaaactataaaccatatttaaaagctcatcatgttaaattttttatgtacttttctggaactagtttttaaattttagattatatgtccacctatcttaagtgtacagttaataattagcttattcaatgattgcatgatgccttacagttttcaataactttttttcttatgcaaacgtcatgcaataaaacaaactctaatgtttggca

SEQ ID NO: 4059 - DNA, 2581 bp, Homo sapiens
ctccggccgcggccctgggagctggaggaaccgcgactcagcaggcatgactggagagggaagtcccaatggtgctagaatggtgctgcagtggcagaagacggctcacaagtgaggtctggaagaacaacagggaagacatccatcatttgctccaaagtgtgcaagtcaaatcctggggagaatcatgataaccctgatcactgagcagctacagaagcagactctggatgagctgaaatgcacacgcttcagcatcagtctgcctttgcctgatcatgcagacatctccaactgtgggaactctttccagcttgtgtctgaaggtgcttcctggaggggcctgccccactgttcctgtgctgagttccaggacagcctcaacttcagctaccatccctcaggcctgagcctgcacctcagaccacccagtcggggaaactcccccaaggagcagcccttctcccaagtcctaagacctgagcccccagatccagagaagcttcctgtgccccctgcccctccatccaagaggcactgccgctcactctcagtgcccgtggacctgtctcgctggcagccggtgtggcggcccgccccctccaagctgtggactcccataaagcaccggggcagtggtggagggggtgggccgcaggtgcctcaccagagccccccaaagcgggtctccagcctcaggttcctccaagctcccagtgcctcttctcaatgtgccccagctcacagaccctacagccctcctttcttcagcctggccctggcccaagattcctctcgaccctgcgccgcctcccctcaaagtggctcctgggagagtgatgctgagtccttgtcaccttgcccacctcagcgccgcttctccctgtcacccagtctgggcccgcaggcaagccgcttcttgccctctgcccggagctctcccgcatcctccccagagctgccctggcgacctcgaggtctccgcaaccttccccgaagccgctcacagccttgtgatctggatgcccgcaaaactggggtcaagcggcgccacgaggaagacccccggcgtctgcggccttcgttggactttgacaagatgaatcagaaaccatactcaggaggtctttgtctccaagaaacagcccgggaaggcagcagcatctctccaccatggttcatggcctgtagccccccacccctctctgcttcctgcagccccactgggggttcctcccaggtgctgagtgaaagcgaagaggaggaggagggggctgtgcggtggggtcggcaggcgctgagcaagcggacactgtgccagcgggactttggggacctggacttgaatttgattgaggaaaactaaaactgagaggctacttcctggggccacacagactgactctctcatggctactaacaagtgtcgagtccccaaggctgggggccgagcctgggaatgggggtgagtggagggctccgactcagggcagctggaaatcttctcgctccagcaagctcgaccatgccaagagactggccgggacaagataaacggagctggtggcgggagggacagccccagagcagacccttcctatggcggccctgagtgtgagtatccctgccaccaagagagcaatgggcagggaaggaaggggtctgccgaccccagctcggggaatttcactagcccctttgcttcaaagggcacttgtgtcttagaatttggccagggtggggggttgagtcagcctcctcagagaaactgcgtgagagtgtgtgcgtgcatgggagtgtacttgtggaaaggtgtgtttgcgtagccttagggaaggaaggcaattgctccttaacagcagagtatcatgatacccccaggatcttgagttttttacaggatgttgggtttgctcaaggagtcaagaggagggcaccaagttttccattactttcagtctggaaaactaagctagtcagaactgtcatcttgcttcccaatctaagaacctgtggccctggaacacttttcaagaattggttcattttgctttacacagtagatctgttccaacagttctgtgtaaaccaaatgctatttttcaatgcatttggactgctgaccatttaaaagcagcctatgattgcttctttttgtaaagcaagcaacctccctccactttagctgttttgactatttgaattttcacatattgggcttacccagagtggagcacacctccagggcatgtggctgacactgggtcaatgtctgcatctgtgctgtgtgtgtagtgtggttggccagtaggtgagtatccctgtgtgtgtgagtgaagccactccccaggctggtgctctcctcctgtgcccagtgactgcccagtggcagctcagctgcccttcactcccacctgctgccaaagtccctgtgctaatgggattacaaatacaaaaagtggaaaaaaattttcgtaaactttgttttatattaaaagaaaaatccataagtctgtgtgtgttaaacatgaggttctgcctctgtggctgtgtttgaaaaaataaagttttattagaataa

SEQ ID NO: 4060 - DNA, 5267 bp, Homo sapiens
ctgcataaagctgagagatgcctacagctgagagtgaagcaaaagtaaaaaccaaagttcgctttgaagaattgcttaagacccacagtgatctaatgcgtgaaaagaaaaaactgaagaaaaaacttgtcaggtctgaagaaaacatctcacctgacactattagaagcaatcttcactatatgaaagaaactacaagtgatgatcccgacactattagaagcaatcttccccatattaaagaaactacaagtgatgatgtaagtgctgctaacactaacaacctgaagaagagcacgagagtcactaaaaacaaattgaggaacacacagttagcaactgaaaatcctaatggtgatgctagtgtagaggaagacaaacaaggaaagccaaataaaaaggtgataaagacggtgccccagttgactacacaagacctgaaaccggaaactcctgagaataaggttgattctacacaccagaaaacacatacaaagccacagccaggcgttgatcatcagaaaagtgagaaggcaaatgagggaagagaagagactgatttagaagaggatgaagaattgatgcaagcatatcagtgccatgtaactgaagaaatggcaaaggagattaagaggaaaataagaaagaaactgaaagaacagttgacttactttccctcagatactttattccatgatgacaaactaagcagtgaaaaaaggaaaaagaaaaaggaagttccagtcttctctaaagctgaaacaagtacattgaccatctctggtgacacagttgaaggtgaacaaaagaaagaatcttcagttagatcagtttcttcagattctcatcaagatgatgaaataagctcaatggaacaaagcacagaagacagcatgcaagatgatacaaaacctaaaccaaaaaaaacaaaaaagaagactaaagcagttgcagataataatgaagatgttgatggtgatggtgttcatgaaataacaagccgagatagcccggtttatcccaaatgtttgcttgatgatgaccttgtcttgggagtttacattcaccgaactgatagacttaagtcagattttatgatttctcacccaatggtaaaaattcatgtggttgatgagcatactggtcaatatgtcaagaaagatgatagtggacggcctgtttcatcttactatgaaaaagagaatgtggattatattcttcctattatgacccagccatatgattttaaacagttaaaatcaagacttccagagtgggaagaacaaattgtatttaatgaaaattttccctatttgcttcgaggctctgatgagagtcctaaagtcatcctgttctttgaggattcttgatttcttaagcgtggatgaaattaagaataattctgaggttcaaaaccaagaatgtggctttcggaaaattgcctgggcatttcttaagcttctgggagccaatggaaatgcaaacatcaactcaaaacttcgcttgcagctatattacccacctactaagcctcgatccccattaagtgttgttgaggcatttgaatggtggtcaaaatgtccaagaaatcattacccatcaacactgtacgtaactgtaagaggactgaaagttccagactgtataaagccatcttaccgctctatgatggctcttcaggaggaaaaaggtaaaccagtgcattgtgaacgtcaccatgagtcaagctcagtagacacagaacctggattagaagagtcaaaggaagtaataaagtggaaacgactccctgggcaggcttgccgtatcccaaacaaacacctcttctcactaaatgcaggagaacgaggatgtttttgtcttgatttctcccacaatggaagaatattagcagcagcttgtgccagccgggatggatatccaattattttatatgaaattccttctggacgtttcatgagagaattgtgtggccacctcaatatcatttatgatctttcctggtcaaaagatgatcactacatccttacttcatcatctgatggcactgccaggatatggaaaaatgaaataaacaatacaaatactttcagagttttacctcatccttcttttgtttacacggctaaattccatccagctgtaagagagctagtagttacaggatgctatgattccatgatacggatatggaaagttgagatgagagaagattctgccatattggtccgacagtttgatgttcacaaaagttttatcaactcactttgttttgatactgaaggtcatcatatgtattcaggagattgtacaggggtgattgttgtttggaatacctatgtcaagattaatgatttggaacattcagtgcaccactggactataaataaggaaattaaagaaactgagtttaagggaattccaataagttatttggagattcatcccaatggaaaacgtttgttaatccataccaaagacagtactttgagaattatggatctccggatattagtagcaaggaagtttgtaggagcagcaaattatcgggagaagattcatagtactttgactccatgtgggacttttctgtttgctggaagtgaggatggtatagtgtatgtttggaacccagaaacaggagaacaagtagccatgtattctgacttgccattcaagtcacccattcgagacatttcttatcatccatttgaaaatatggttgcattctgtgcatttgggcaaaatgagccaattcttctgtatatttacgatttccatgttgcccagcaggaggctgaaatgttcaaacgctacaatggaacatttccattacctggaatacaccaaagtcaagatgccctatgtacctgtccaaaactaccccatcaaggctcttttcagattgatgaatttgtccacactgaaagttcttcaacgaagatgcagctagtaaaacagaggcttgaaactgtcacagaggtgatacgttcctgtgctgcaaaagtcaacaaaaatctctcatttacttcaccaccagcagtttcctcacaacagtctaagttaaagcagtcaaacatgctgaccgctcaagagattctacatcagtttggtttcactcagaccgggattatcagcatagaaagaaagccttgtaaccatcaggtagatacagcaccaacggtagtggctctttatgactacacagcgaatcgatcagatgaactaaccatccatcgcggagacattatccgagtgtttttcaaagataatgaagactggtggtatggcagcataggaaagggacaggaaggttattttccagctaatcatgtggctagtgaaacactgtatcaagaactgcctcctgagataaaggagcgatcccctcctttaagccctgaggaaaaaactaaaatagaaaaatctccagctcctcaaaagcaatcaatcaataagaacaagtcccaggacttcagactaggctcagaatctatgacacattctgaaatgagaaaagaacagagccatgaggaccaaggacacataatggatacacggatgaggaagaacaagcaagcaggcagaaaagtcactctaatagagtaaagaattgaagaaaagttaagagctgccgaaatgcacagaggtgaaaatgacaaaccaaatggaatttctcttcagagttcagaattttcagatactaaggaggaagaaaggatccactacttcttgttcttatgaatgactctagaaaaatcagaatcaagttgtgggtggaaaaatcaacgtggcctttgagttcagttgttataaaccattgtgactattgttggtcaaagtattggtacttatattgttagtaattgcatcataattacattaccagtgttggaaaactaatgaagaaaacactgtaattgctactcagcaaatgtgaataaaaggtgtttgcgttattaggatgtctgttaagtaatcatttaatattattatattggtaatggttgtatgtgtgatgctatgcccagaatatgaagtatctgtttttgaaattcactttatttaaaagataagcagctgactgggcacggtgcctcatgcctgtaatcctagcaccttgggaggctgaggcaggtggatcacctaaggtcaggagttcaacaacaccagcctgaccaacatggtgaaaccccatctctactaaaaatacaaaaatcagccgggtctcatggcaggcacctgtaatcccatctactgaggcaggagaattgcttgacccaggaggcagaggttgcagtgagccaagatcacgccattgcactccagcctgggggacagagcaagactctatctccaaaaaacaaaaaagataagcagctttagaatatggcgcattcaaaacagtctcagtaacaaagacattaaaagaaaacaatttactttctaattaaaattttgtgtttcttaagatcaaatcatataggtaacttcatagacctaaattaaaagtgatttttggctggactggcaacaatgttcccaatgtctttactttttaaaaaaggcttttcatatttaagcacatacctattttgtagacttacattgtttaatatttattttaatcttaatatttttacattattatattgcattatttattttttctaagttccagaataatagtgtcattattatagactatatgttttgaagtttgatattataatgggatattcattttttgttcttttcttgactcctttctcaagtgtgtgataaggtctgctgataaaatatttaaccccaagaaagtgaaaactaatataaaattagaaagacctatccaaattagacagtcaattccattaaaataagaagtgagaaaaacaatgttgggcattgaggtgtaaattttgcccagatgtatacccagtgtgaaatatcttctaataaaaatatatttggctcttatccctgcacatgtagaggcataaaaattggtaaacatgtcccgctgtgtagaactttaaaaaaaaggcatttttgaaagtgttgagtggcactgataactggtgaagcctacagccatccgcccaaaagtctgttctgatggcactgagttttcattgttctggatgtataagtctgtgtgtcaggtacagctgggcccagccagcttgagtcactcttgtacaagcttgtttttttctgtcttgtgaatgcacttgataatttaaaaataaaaatatctgtttctctgc

SEQ ID NO: 4061 - DNA, 1536 bp, Homo sapiens
cttctacaatggctggatcctcttcctggctgtgctcgccatccctgtgtgtgccgtgcgaggacgcaacgtcgagaacatgaagatcttgcgtctaatgctgctccacatcaaatacctgtacgggatccgagtggaggtgcgaggggctcaccacttccctccctcgcagccctatgttgttgtctccaaccaccagagctctctcgatctgcttgggatgatggaggtactgccaggccgctgtgtgcccattgccaagcgcgagctactgtgggctggctctgccgggctggcctgctggctggcaggagtcatcttcatcgaccggaagcgcacgggggatgccatcagtgtcatgtctgaggtcgcccagaccctgctcacccaggacgtgagggtctgggtgtttcctgagggaacgagaaaccacaatggctccatgctgcccttcaaacgtggcgccttccatcttgcagtgcaggcccaggttcccattgtccccatagtcatgtcctcctaccaagacttctactgcaagaaggagcgtcgcttcacctcgggacaatgtcaggtgcgggtgctgcccccagtgcccacggaagggctgacaccagatgacgtcccagctctggctgacagagtccggcactccatgctcactgttttccgggaaatctccactgatggccggggtggtggtgactatctgaagaagcctgggggcggtgggtgaaccctggctctgagctctcctcccatctgtccccatcttcctccccacacctacccacccagtgggccctgaagcagggccaaaccctcttccttgtctcccctctccccacttattctcctatttggaatcttcaacttctgaagtgaatgtggatacagcgccactcctgccccctcttggccccatccatggactcttgcctcggtgcagtctccactcttgacccccacctcctactgtcttgtctgtgggacagttgcctccccctcatctccagtgtagcctcctgtcagtgggggctggacccttctaattcagaggtctcatgcctgcccttgcccagatgcccagggtcgtgcactctctgggataccagttcagtctccacatttctggttttctgtccccatagtacagttcttcagtggacatgaccccacccagccccctgcagccctgctgcaccatctcaccagacacaaggggaagaagcagacatcaggtgctgcactcacttctgccccctggggagttggggaaaggaacgaaccctggctggaggggataggagggcttttaatttatttctttttctgttgaggcttccccctctctgagccagttttcatttcttcctggtggcattagccactccctgcctctcactccagacctgttcccacaactggggaggtaggctgggagcaaaaggagagggtgggacccagttttgcgtggttggtttttattaattatctggataacagcaaaaaaactgaaaataaagagagagagag

SEQ ID NO: 4062 - DNA, 2040 bp, Homo sapiens
ttcttgctcagaataccttcatgatttcttgctaaaattccaaaatctttagcttggcatttgggattttctacagtaggaaccctgtccatcacataaaccttaacgtcactacatgtgcttatgcaaaaagggctgcctgaatgagttgcttgaatgtatgtactatttgaataattacctgtttgccattgcttgctgtttatattacctggaatgccatccttttcttcttgagagctttagcacaaatccctcctcagtaaaaatagtggcttaagtttcctgagtgcttacgtctgtgaggcaccatgcctttaatttccactattgcattgaagcagtggttatagttatcagtcaagccttgtacattaaaatatacacacccaaatatatatacacaccttgtgacacaggtactgttatcatcaacttgcatttggaggatttgtccaagatcacatacctagtaagtagcaagagtgggtctctgtctcatgtaattccagagcccaggtgcttagtcatactccagtgccatagcacttatagctaacacttactagaggaccagttacatgtcagggactgctataagggcttacatatttgatcctttgaacaccctaatgaggtagcaactgcagtgatctctgttgtatatatgatgaaattgacgctttgagaagtaacttacccacagtctcatatctgcgaaacgggaaagccagaattagaacccaggcggtctgcttttggaattctactgtaagtctctttgataagctgtcaaattgtacagccacagagggaaaaatttactgtttgtccatctatttgtcattatataagggattgggtataaagaaataagcattatataggcgttatataaggacttggatataaagaaatgaagcaagaaaaaaaaatctcatcttctctaaactcatagagcttgcgttgtagtaccactgtctatacctgatcctcaagggcacagatgtggtatttagttgttctgtattagtagtaccttgcgcgagtaagtatttaatgtgttggtgatgataattcattggcttttctgttaactcctgccaaggagactttgccctgatttaggcttattaataatttttttttcccagacaactcgtagccaggcgttcattctcttcccgctcatctttcctcttcccatttgaatcatgtttttgttgacatctagagtattttatcccattatgtactatggagcattcttctatttgtagggataggattaccaccctggagaattaatttttttcttttttcctcagtactatactggcaattgctggagaagattttgcaattgttgcttctgatactcgattgagtgaagggttttcaattcatacgcgggatagccccaaatgttacaaattaacagacaaaacagtcattggatgcagcggttttcatggagactgtcttacgctgacaaagattattgaagcaagactaaagatgtataagcattccaataataaggccatgactacgggggcaattgctgcaatgctgtctacaatcctgtattcaaggcgcttctttccatactatgtttacaacatcatcggtggacttgatgaagaaggaaagggggctgtatacagctttgatccagtagggtcttaccagagagactccttcaaggctggaggctcagcaagtgccatgctacagcccctgcttgacaaccaggttggttttaagaacatgcagaatgtggagcatgttccgctgtccttggacagagccatgcggctggtgaaagatgtcttcatttctgcggctgagagagatgtgtacactggggacgcactccggatctgcatagtgaccaaagagggcatcagggaggaaactgtttccttaaggaaggactgatctgtgtgctcttatcaccaatcagttcagacctggttgattttgtactttggaactgtaccttggatggttttgtttattaaaagagaaacctgaagt

SEQ ID NO: 4063 - DNA, 3101 bp, Homo sapiens
ccgtcctggtgccttactgtgcatacagttctactcgtctcagaaacgtatgtcaaacgaggatacagtgtctggaactattggttctaagatataagtggaatgagcctggatcaggagaagtatgctgagctagagttgaaggaagcttctctttctaacaagagaaagcagagttaaattatggcagagacaagtctgttagaggctggggcctctgcagcctctacagctgcggctttggagaacttacaggtggaggcgagctgctctgtgtgcctggagtatctgaaggaacctgtcatcattgagtgtgggcacaacttctgcaaagcttgcatcacccgctggtgggaggacctagagagggacttcccttgtcctgtctgtcgaaagacatcccgctaccgcagtctccgacctaatcggcaactaggcagtatggtggaaattgccaagcagctccaggccgtcaagcggaagatccgggatgagagcctctgcccccaacaccatgaggccctcagccttttctgttatgaggaccaggaggctgtatgcttgatatgtgcaatttcccacacccaccgggctcacaccgttgtgccactggacgatgctacacaggagtacaaggaaaaactgcagaagtgtctggagcccctggaacagaagctgcaggagatcactcgctgcaagtcctctgaggagaagaagcctggtgagctcaagagactagtggaaagtcgccgacagcagatcttgagggagtttgaagagcttcataggcggctggatgaagagcagcaggtgttgctttcacgactggaagaagaggaacaggacattctgcagcgactccgagaaaatgctgctcaccttggggacaagcgccgggacctggcccacttggctgccgaggtggagggcaagtgcttacagtcaggcttcgagatgcttaaggatgtcaaaagtaccctggaaaaatgtgaaaaggtgaagaccatggaggtgacttcagtatccatagagctggaaaagaacttcagcaattttccccgacagtactttgccctaaggaaaatccttaaacagctaattgcggatgtgaccctggaccctgagacagctcatcctaacctagtcctgtcagaggatcgtaagagcgtcaagttcgtggagacaagactccgggatctccctgacacaccaaggcgtttcaccttctacccttgcgtcctggctactgagggtttcacctcaggtcgacactactgggaggtggaggtgggcgacaagacccactgggcagtgggtgtatgccgggactccgtgagccgaaagggcgagttgactccactccctgagactggctactggcgggtgcggctatggaatggggacaaatatgcagccaccaccacaccttttacccctttgcacatcaaggtgaaacccaagcgggtaggcatattcctagactatgaggccggcacactgtctttctacaatgtcacagaccgctctcatatctacaccttcactgatacttttactgagaaactttggcccctcttctacccaggcatccgggctggacggaagaatgctgcaccacttaccatcaggcccccaacagattgggagtgacaggttgggatgtgggaatgactggggtgaggcagggtcaagtgctacgggcctccttcccgtgtcctgctggaacgtcttcgtgtccacctgggtccagtcctgaatcatcttggagaaacaccttggtttctaggatggttttgtgtggagggggaggtaggactgggctggatgagagagcacagctgtgacttcctcctaactgtcagggtggggagctggttcccagaggattgtctaccctgaagtccatcaggttttctgttgcacaaggacgggtcaggaaggaaggagaggcttttccagaaacaaaaaatctgtgagggtctgacttgctcaaaccagaggaggaaacagaaacccctgcacatctttttagggggttctttgacccaggatagtcttgcttcttgaggtagatcacaggggtctgtgtacctctgaattcatgagagatgaatgacagatgctctcatgggtctagatattgaggagtttttctgagggcagagattggacatcaacaaggctagaagggtcagggaagtgggctaaaggaacagattcctagagattaatgaagaggagggaggtttctttggtcttctattccaagggtaaggttgcgattatgggtaagattggccagaggtaggaatgtggggagaaggagaggctgaaaagaaagcagaggagaacccaggtccctgcctcagccttcagcagagttggcttattgcctgcctctataccaataagtcagtcaccttgctcctctccagaggcaaagtggaagagatcctgcaagacacatctatcctttcacagtgttcccaagggaacttggaaaggagagtcaggtattagaggaaagagaagggtatttgtatacaaagccctggccttaaagaatgttacttagtagctactcccaaattgtcagccttcttacctggccaaggtgtccaagccagaaaggaaaaaaggttatggagtctttctcaccctaaggacagggtggaagagggtggtatatagggaagggccagataggcaacttcatttggcttgtgtgcatctggcctggaactggtgttaagccaggcttttgcttgtttgttgccatccctcaccctttgccatttcccttttcagagaatgtaaatgattttcatgttaggccaaaataaacaacttatagggtacatatgttgtcataaaaggtaaaagtgatgcatgccaaaccaaactaaaccaatttggattatctgctattcgggtaatcttcacagaaatgactgagagaagaatctgcagtttactgagggcatttcagttcctcctaccacctcaacaggactttgtccagactctcctcctcttacctttgtgccttgactgtggttctttgtggcaagatactttggttggttaaaataatatggaac

SEQ ID NO: 4064 - DNA, 3560 bp, Homo sapiens
agcaaactcgtcttgtctacccaccctccctcccccatcctccccaaaatagccttgtgatttcggaagtatggactaaaatcacactcctccttaccttaccgcttggactctggtggctcccaactcgccgtcagaccccacctgccccggtggtgggaagcgcctggacagaccatgaccacagccaaggagccaagcgcttcggggaaatccgtgcagcagcaggaacaggagctggtggggagtaaccctccgcagaggaattggaaaggaatagcaattgcactgcttgtcattctggtcatctgctccttgatcgtcacctcggtcatacttctgacaccagcggaagataatagtctgtctcaaaagaagaaggtcactgtagaagatctcttcagtgaagacttcaaaattcatgaccccgaggctaagtggataagtgatacagaattcatctacagagaacagaaaggaacagtgagactgtggaatgttgaaacaaatacttctactgtcttaatagaaggcaaaaaaattgaatcattaagagccatcagatatgaaatatctccagatagagagtatgcacttttttcatacaatgtggaacccatatatcaacactcgtatactggatattacgtcctgagcaaaattcctcatggggatcctcaaagtctggacccaccagaagtcagcaatgcaaaacttcagtatgcaggatggggccctaaaggccaacagctgatatttatttttgaaaacaatatctactactgtgcacatgtcgggaaacaggccatccgtgtggtctccactggcaaggaaggtgtgatttacaatggcctcagtgactggctgtatgaagaggagattttgaagacacacatcgcacactggtggtctccggatggcacgagactcgcctacgccgccatcaatgattcccgtgtccccatcatggagctcccaacttacaccggctccatctaccccaccgtgaagccctaccactatcccaaggctggaagtgagaaccccagcatttccctacacgttattggcttaaatggacccacccatgatctggagatgatgccgcctgatgatccacggatgagggagtactacatcaccatggtgaagtgggccaccagcaccaaggtcgccgtgacctggctgaaccgggcgcagaacgtgtccatcctcaccctctgcgacgccaccacgggggtctgcacgaagaaacacgaggatgaaagtgaggcctggctccacagacagaatgaagaacctgtgttctccaaggatggccgaaagtttttcttcatcagagccatcccccagggaggacgagggaaattctatcacatcacggtgtcctcgtcccagcccaacagcagcaacgacaacatccagtccatcacctccggggactgggacgtgaccaagatcctagcctacgatgagaaggggaataagatctacttcctgagcacggaggacctgcctcggagacgacaactctacagtgccaacacggtgggcaacttcaacaggcagtgcctctcctgtgacctggttgagaactgcacctacttcagcgcttccttcagccatagcatggacttcttcctgctcaagtgcgaaggtcctggtgttcctatggtgacggtgcacaacacaacagataagaaaaaaatgtttgacctagaaacaaatgaacatgtcaagaaggccataaatgaccgacagatgcctaaagtggaatacagggacattgagattgatgattacaacctgcccatgcagatactgaagccagcaaccttcaccgacaccacccactaccctctgctcctggtggtggatggcaccccaggcagccagagtgtggctgagaagttcgaggtgagctgggagacggtgatggtgagcagccacggcgcggtggtggtaaagtgtgacggccgtggcagcggcttccaagggaccaagctcctgcacgaagtgaggcggcggctgggcttgctggaggagaaggaccagatggaggccgtgcggacgatgctgaaggagcagtacattgacaggacgcgcgtggccgtgtttgggaaggattacggtggctacctgagcacctacatcctcccagcaaagggagaaaatcaaggccagacattcacctgcggctctgctctctctccaataacagacttcaaactctatgcctctgcgttttccgagaggtacttgggcctccatggacttgacaacagagcatacgagatgaccaaggtagcccatcgagtctccgcgctggaagaacagcagttcctgatcattcatcccactgccgatgaaaaaattcatttccagcacacagcagaactcattacacaactaattaggggaaaggctaattacagcttacagatttacccggacgaaagccattactttaccagctccagcctcaaacagcatctgtaccggtccatcatcaacttcttcgtggaatgcttcaggatccaggacaaactgctgacagtcacagcgaaagaggacgaggaggaggactaagctcaggtcgctctaagcacaaacgtggctctttctacaaccagatgcaaccgagggatttccctgccctccctcttccctcggaggggcggggcggggcggggccgggtgttccatagcatgtgtgtctcggatgcggaaggcagttttgcttgggaaacaagctccttccccggggtcatcactcacggcctccatggcaccagggacaacgctgtccccgcagcagcgcctcctcccggcgcccgagagaccggcacgccacggcccctcccccaaggaacagagcaaaggatggtggccgcaggccccacgcgagcccacaggacaccggcccctagattccagccaccaagcggaagcatgagacccgcccacactagcctctgtgttcccgttagggacatcacaccctgtctcacgtcgcagtgccatggacgcagcagttacagcaccattgttttagcagtgcgtgttcatatatgggcttgctacttcctgtaatgaggacgttcaacatggtgaggggctacaagaaaacgcttttctgtacagagtcttactgtagctacgctaatggttaacctgatagaattaactcgtatttttctatggttttaacctgatgctccactgtctccgtcatggggttgttttgctgtttggggttgggccttgtttccctttcctttctccagtccacgtgtagactttgcgcttgatgaagaagcagatcggaagtaactgctccctcctcaaggttgtcttcagacgtcttggggacgttcctaaacactgagggggaagacagccaatagcacccattaaaagaaatacctaaataaaacctctctcccactcagctatgctagggcttggctgtaggtgtgcactgtctatttacatccgtccttacaaccatccttgtcctccttggtaccgtatcaagctctttcccatgacatttggtt

SEQ ID NO: 4065 - DNA, 2438 bp, Homo sapiens
gcgcgcgtgagctgagccggtgggtgagcggcggccacggcatcctgagctgtgggggctacgaggaaagatctaattatcatggacctgcgacagtttcttatgtgcctgtccctgtgcacagcctttgccttgagcaaacccacagaaaagaaggaccgtgtacatcatgagcctcagctcagtgacaaggttcacaatgatgctcagagttttgattatgaccatgatgccttcttgggtgctgaagaagcaaagacctttgatcagctgacaccagaagagagcaaggaaaggcttggaatgattgtagataaaatagacgcggataaagatgggtttgtgacggagggggagctgaaatcctggattaagcacgcccagaagaaatacatatatgacaatgttgaaaaccaatggcaggagtttgatatgaatcaagacggcttaatctcctgggatgagtacagaaacgtgacttatggcacttacctggatgatccagatcctgatgatggatttaactataaacagatgatggttagagatgagcggaggtttaaaatggcagacaaggatggagacctcattgccaccaaggaggagttcacagctttcctgcaccctgaggagtatgactacatgaaagatatagtagtacaggaaacaatggaagatatagataagaatgctgatggtttcattgatctagaagagtatattggtgacatgtacagccatgatgggaatactgatgagccagaatgggtaaagacagagcgagagcagtttgttgagtttcgggataagaaccgtgatgggaagatggacaaggaagagaccaaagactggatccttccctcagactatgatcatgcagaggcagaagccaggcacctggtctatgaatcagaccaaaacaaggatggcaagcttaccaaggaggagatcgttgacaagtatgacttatttgttggcagccaggccacagattttggggaggccttagtacggcatgatgagttctgagctacggaggaaccctcatttcctcaaaagtaatttatttttacagcttctggtttcacatgaaattgtttgcgctactgagactgttactacaaactttttaagacatgaaaaggcgtaatgaaaaccatcccgtccccattcctcctcctctctgagggactggagggaagccgtgcttctgaggaacaactctaattagtacacttgtgtttgtagatttacactttgtattatgtattaacatggcgtgtttatttttgtatttttctctggttgggagtatgatatgaaggatcaagatcctcaactcacacatgtagacaaacattagctctttactctttctcaaccccttttatgattttaataattctcacttaactaattttgtaagcctgagatcaataagaaatgttcaggagagaggaaagaaaaaaaatatatgctccacaatttatatttagagagagaacacttagtcttgcctgtcaaaaagtccaacatttcataggtagtaggggccacatattacattcagttgctataggtccagcaactgaacctgccattacctgggcaaggaaagatccctttgctctaggaaagcttggcccaaattgattttcttctttttccccctgtaggactgactgttggctaattttgtcaagcacagctgtggtgggaagagttagggccagtgtcttgaaaatcaatcaagtagtgaatgtgatctctttgcagagctatagatagaaacagctggaaaactaaaggaaaaatacaagtgttttcggggcatacattttttttctgggtgtgcatctgttgaaatgctcaagacttcattatttgccttttgaaatcactgtaaatgcccccatccggttcctcttcttcccaggtgtgccaaggaattaatcttggtttcactacaattaaaattcactcctttccaatcatgtcattgaaagtgcctttaacgaaagaaatggtcactgaatgggaattctcttaagaaaccctgagattaaaaaaagactatttggataacttataggaaagcctagaacctcccagtagagtggggatttttttcttcttccctttctcttttggacaatagttaaattagcagtattagttatgagtttggttgcagtgttcttatcttgtgggctgatttccaaaaaccacatgctgctgaatttaccagggatcctcatacctcacaatgcaaaccacttactaccaggcctttttctgtgtccactggagagcttgagctcacactcaaagatcagaggacctacagagagggctctttggtttgaggaccatggcttacctttcctgcctttgacccatcacaccccatttcctcctctttccctctccccgctgcc

SEQ ID NO: 4066 - DNA, 2505 bp, Homo sapiens
gccccggcggccgccgccgcccagaccggacgacaggccacctcgtcggcgtccgcccgagtccccgcctcgccgccaacgccacaaccaccgcgcacggccccctgactccgtccagtattgatcgggagagccggagcgagctcttcggggagcagcgatgcgaccctccgggacggccggggcagcgctcctggcgctgctggctgcgctctgcccggcgagtcgggctctggaggaaaagaaagtttgccaaggcacgagtaacaagctcacgcagttgggcacttttgaagatcattttctcagcctccagaggatgttcaataactgtgaggtggtccttgggaatttggaaattacctatgtgcagaggaattatgatctttccttcttaaagaccatccaggaggtggctggttatgtcctcattgccctcaacacagtggagcgaattcctttggaaaacctgcagatcatcagaggaaatatgtactacgaaaattcctatgccttagcagtcttatctaactatgatgcaaataaaaccggactgaaggagctgcccatgagaaatttacaggaaatcctgcatggcgccgtgcggttcagcaacaaccctgccctgtgcaacgtggagagcatccagtggcgggacatagtcagcagtgactttctcagcaacatgtcgatggacttccagaaccacctgggcagctgccaaaagtgtgatccaagctgtcccaatgggagctgctggggtgcaggagaggagaactgccagaaactgaccaaaatcatctgtgcccagcagtgctccgggcgctgccgtggcaagtcccccagtgactgctgccacaaccagtgtgctgcaggctgcacaggcccccgggagagcgactgcctggtctgccgcaaattccgagacgaagccacgtgcaaggacacctgccccccactcatgctctacaaccccaccacgtaccagatggatgtgaaccccgagggcaaatacagctttggtgccacctgcgtgaagaagtgtccccgtaattatgtggtgacagatcacggctcgtgcgtccgagcctgtggggccgacagctatgagatggaggaagacggcgtccgcaagtgtaagaagtgcgaagggccttgccgcaaagtgtgtaacggaataggtattggtgaatttaaagactcactctccataaatgctacgaatattaaacacttcaaaaactgcacctccatcagtggcgatctccacatcctgccggtggcatttaggggtgactccttcacacatactcctcctctggatccacaggaactggatattctgaaaaccgtaaaggaaatcacagggtttttgctgattcaggcttggcctgaaaacaggacggacctccatgcctttgagaacctagaaatcatacgcggcaggaccaagcaacatggtcagttttctcttgcagtcgtcagcctgaacataacatccttgggattacgctccctcaaggagataagtgatggagatgtgataatttcaggaaacaaaaatttgtgctatgcaaatacaataaactggaaaaaactgtttgggacctccggtcagaaaaccaaaattataagcaacagaggtgaaaacagctgcaaggccacaggccaggtctgccatgccttgtgctcccccgagggctgctggggcccggagcccagggactgcgtctcttgccggaatgtcagccgaggcagggaatgcgtggacaagtgcaaccttctggagggtgagccaagggagtttgtggagaactctgagtgcatacagtgccacccagagtgcctgcctcaggccatgaacatcacctgcacaggacggggaccagacaactgtatccagtgtgcccactacattgacggcccccactgcgtcaagacctgcccggcaggagtcatgggagaaaacaacaccctggtctggaagtacgcagacgccggccatgtgtgccacctgtgccatccaaactgcacctacggatgcactgggccaggtcttgaaggctgtccaacgaatggaagctacatagtgtctcactttccaagatcattctacaagatgtcagtgcactgaaacatgcaggggcgtgttgagtgccaaggatcttgacaagttgttttgaagatggcattttgctaagtccctgagggtcactggtcctcaaagcggcatggcggcatggcgtggctggttctgccacatgccagctgtgtgacctctgagactccacttcttcagtgctgaaaataaagaaggagttttactaaggaccaaacaagataatgaatgtgaaactgctccacgaaccccaaagaattatgcacatagatgcgatcattaagatgcgaagccatcgagttaccacctggcatgcttaaactgtaaagagtgggtcaaagtaaactgaattggaaaatccaaagttatgcagaaaaacaataaag

SEQ ID NO: 4067 - DNA, 3002 bp, Homo sapiens
gcccggggacgcagcccagttggtagcgtcgctccctgagcgtttctaagggggccgcccggccttgtctttcggcagtggccgagccaccgccgcctgccgcgcgttccagagctgggcgctgcagctgcactgccgatcgccgtgtttggtcgatagaatccccagtgtgcccagagagtgcgacccctcgcccggcccggcgagccccgggcgtgaaccgagctgagggaggatggcagcctctggggtggagaagagcagcaagaagaagaccgagaagaaacttgctgctcgggaagaagctaaattgttggcgggtttcatgggcgtcatgaataacatgcggaaacagaaaacgttgtgtgacgtgatcctcatggtccaggaaagaaagatacctgctcatcgtgttgttcttgctgcagccagtcatttttttaacttaatgttcacaactaacatgcttgaatcaaagtcctttgaagtagaactcaaagatgctgaacctgatattattgaacaactggtggaatttgcttatactgctagaatttccgtgaatagcaacaatgttcagtctttgctggatgcagcaaaccaatatcagattgaacctgtgaagaaaatgtgtgttgattttttgaaagaacaagttgatgcttcaaattgtcttggtataagtgtgctagcggagtgtctagattgtcctgaattgaaagcaactgcagatgactttattcatcagcactttactgaagtttacaaaactgatgaatttcttcaacttgatgtcaagcgagtaacacatcttctcaaccaggacactctgactgtgagagcagaggatcaggtttatgatgctgcagtcaggtggttgaaatacgatgaacctaatcgccagccatttatggttgatatccttgctaaagtcaggtttcctcttatatcaaagaatttcttaagtaaaacggtacaagctgaaccacttattcaagacaatcctgaatgccttaagatggtgataagtggaatgaggtaccatctactgtctccagaggaccgagaagaacttgtagatggcacaagacctagaagaaagaaacatgactaccgcatagccctatttggaggctctcaaccacagtcttgtagatattttaacccaaaggattatagctggacagacatccgctgcccctttgaaaaacgaagagatgcagcatgcgtgttttgggacaatgtagtatacattttgggaggctctcagcttttcccaataaagcgaatggactgctataatgtagtgaaggatagctggtattcgaaactgggtcctccgacacctcgagacagccttgctgcatgtgctgcagaaggcaaaatttatacatctggaggttcagaagtaggaaactcagctctgtatttatttgagtgctatgatacgagaactgaaagctggcacacaaagcccagcatgctgacccagcgctgcagccatgggatggtggaagccaatggcctaatctatgtttgtggtggaagtttaggaaacaatgtttctgggagagtgcttaattcctgtgaagtttatgatcctgccacagaaacatggactgagctgtgtccaatgattgaagccaggaagaatcatgggctggtatttgtaaaagacaagatatttgctgtgggtggtcagaatggtttaggtggtctggacaatgtggaatattacgatattaagttgaacgaatggaagatggtctcaccaatgccatggaagggtgtaacagtgaaatgtgcagcagttggctctatagtttatgtcttggctggttttcagggtgttggtcgattaggacacattctcgaatataataccgaaacagacaaatgggttgccaactccaaagttcgtgcttttccagtcacaagttgtttaatttgtgttgtcgatacttgtggagcaaatgaagagacccttgaaacatgaaaaatgagtggacttcagactcatcagagactctaaaatatagccaccagtgctttgttccaggagtttggtgacaaagttttggtttggtgttttggtaaagaaagtttcaagtgaaatgaggttcctataaaatagatgtttcttttatatggatttccttaattcaaagatcatattttagctggccacaaaaccaagaacatatctagcaagaaaacttgaaaaagtataagcatttgttaaaaatgtgaatttcttgaatgaatttcacatttgtaactatgattttggcagaatagaagattggctcatcagtgaagcgcagtatcttagctctagattctattttcatgcatcacagaagtgctatacggttaggtctgtttgtgctcagtcaagaactaagaaatagtatgaattgtaagtcaagatgggcaactcagatggagcagcttagtctcacagtttgcttgtctatttattttatttagtgccaaatgtattccattttaaaagtaagccagagtgagtcaaggcatatacacactttctcacaaaacttcctaaacagatttgggggtttaatatgtccaactcctcatgaaatatattcaatccacttaaatatattccatctttttaacataaaatgtaaagcttagcacccatcattaatttatgtctctgttttatccagtggttaaaaaaggattctgcctctttagtcctcactgttaaataaaacccaatcatagtaagtgattaactagcaaaaagtaaagctatttatagcaaatttctagatcattagaaaagcactggtagttgtacaatatcagtgttgactttgaacttctttaacgagatcatgaattcttttcccttagccaaaacatgaaatatttaacctagttgtctctaaaagttttgtaatcatgagttagatatatgtcatctcctattcattgcttttatgtgatcaataaatcttttacaaacccaa

SEQ ID NO: 4068 - DNA, 4354 bp, Homo sapiens
ggccgctacgccgaggctctggagcagcactggcaggagctgcagcttcgggagcgcgctgacgacccctctgggctgtgccgtggcccaccgcaagatcggagagcgcctggccgagatggaggactacccggctgccttgcagcaccagcaccagtacctggagctggcacattccctgcgcaaccacacggagctgcagagggcctgggccaccatcggccgcacccacctggacatctatgaccactgccagtcgagggatgctttgctgcaggcacaggctgcctttgagaagagcttggctattgtggatgaggagctggaggggacactggcccagggagagctgaatgagatgaggacccgcctctatctcaacctgggcctcacctttgagagcctgcagcagacagccctgtgcaacgattacttcaggaagagcatcttccttgcggagcagaaccacctttacgaggacctattccgcgcccgctacaacctgggcaccatccactggcgcgcgggccagcactcccaggctatgcgctgcttggagggtgcccgggagtgtgcgcacaccatgaggaagcggttcatggagagcgagtgctgcgtggttattgcacaggtcctccaagacctgggagacttttttggctgccaagcgagccctgaagaaggcctacaggctgggctcccagaagcctgtgcagagggcagccatctgtcagaacctccagcatgtgctggcagtggtccggctgcagcaacagctggaagaggctgagggcagagaccctcagggtgccatggtcatctgtgagcagctaggggacctcttctccaaggcaggagactttcccagggcagctgaggcttaccagaagcagctgcgttttgctgagctgctggacagaccgggtgctgagcgggccatcatccacgtgtccctggccaccacactgggagacatgaaggaccaccatggggccgtgcgccactatgaggaggaactgaggctgcgcagcggcaacgtgctggaggaggccaagacctggctgaacattgcactgtcccgcgaggaggccggcgatgcctacgagctgctggccccgtgcttccagaaagcgctcagctgtgcccagcaggcccagcgtccccagctgcagaggcaggtcttgcagcatctccataccgtgcagctgaggctgcagccccaggaggcccctgagaccgaaaccagactgcgggagctcagtgtagctgaagatgaagatgaggaggaggaggcggaggaggcggcagccacagcggagagcgaagccctggaggccggcgagatggagctctcagagggcgaggacgacaccgatggcctgaccccgcagctggaggaggacgaggagcttcagggccacctgggccggcggaaggggagcaagtggaaccggcgaaacgacatgggggagaccctgctgcaccgagcctgcatcgagggccagctgcgccgcgtccaggaccttgtgaggcagggccacccccttaaccctcgggactactgtggctggacacctctgcacgaggcctgcaactacgggcatctagaaattgtccgcttcctgctggaccacggggccgcagtggacgacccaggtggccagggctgcgaaggcatcacccccctccacgatgccctcaactgtggccacttcgaggtggctgagctgctgcttgaacggggggcgtccgtcaccctccgcactcgaaagggcctcagcccgctggagacgctgcagcagtgggtgaagctgtaccgcagggacctggacctggagacgcggcagaaggccagggccatggagatgctgctccaggcggctgcctcgggccaagatccccacagctcccaggccttccacaccccaagcagccttctgtttgaccccgagacctctcctcctttgagcccctgcccagaacccccctctaatagcactagactcccagaggcctctcaggcccatgtcagggtctccccagggcaggcggcaccagccatggccaggcctcggaggagcaggcatgggccagccagcagcagcagcagctcagaaggcgaggacagcgcaggccccgcacggccgtcccagaagaggcctcggtgctcggccacagcacaacgggtggcagcctggacgcctggccccgccagcaacagggaagcagccacagccagcaccagccgggcagcctaccaggcagccatccggggtgtgggcagtgctcagagccggctggggcctggcccaccgcggggccacagcaaagcccttgccccccaggcagcgctcatcccggaggaggagtgcctggctggggactggctggagctggacatgcccctgacccgcagccgccggccccgcccccggggcactggagacaaccgcaggcccagtagtacctctgggtcggacagtgaggagagcaggccccgtgcccgagccaagcaggtccgcctgacctgcatgcagagttgcagtgcgccagttaacgcagggcccagcagcctggcttcagaacctccagggagccccagcacccccagggtctcagagcccagtggggacagctctgcggcaggccagcccttgggtccggccccgccccctcccatccgggttcgagttcaagttcaggatcatctcttcctcatccctgtcccacacagcagtgacacccactctgtggcctggctggccgagcaggcggcccagcgctactaccagacctgcgggctgctgcccaggctcaccctacggaaagagggggccctgctggccccacaggacctcatccctgatgtgctgcagagcaatgacgaggtgttggctgaggtgacttcgtgggacctgcccccattgactgaccgctaccgcagggcctgccagagcctggggcaaggggagcaccaacaggtgctgcaggccgtggagctccagggcttgggcctctcgttcagcgcctgctccctggccctggaccaggcccagcttacacccctgctgcgggccctcaagctgcacacagcactccgggagctgcgcctggcagggaaccggctgggggacaagtgtgtggctgagctggtggctgccctgggcaccatgcccagcctggccctccttgacctctcctccaatcacctgggtcccgaaggcctgcgccagcttgccatggggctcccaggccaagccaccttgcagagtttggaggagctggacttaagcatgaaccccctgggggacggctgtggccagtccctggcctccctcctgcacgcctgccccttactcagcaccctgcgcctgcaggcgtgtggcttcggccccagcttctttctgagccaccagacagcactgggtagtgctttccaagatgctgagcacctgaagaccctgtccctgtcctacaacgccctgggagcccctgccctggccaggaccctgcagagcctgcccgccggcaccctcctgcacttagagctcagctccgtggcagccggcaagggtgattcggacctcatggagcctgtattccgatacctggccaaggaaggctgtgctctagcccacctgaccctgtctgcaaaccacctgggggacaaggctgttagagacctgtgcagatgtctctctctgtgcccctcactcatctcactggatctgtctgccaaccctgagatcagctgtgccagcttggaagagctcctgtccaccctccaaaagcggccccaaggccttagcttccttggcctgtcaggctgcgccgtccagggtcccctgggcctgggcctgtgggacaagatagccgcgcagctccgggaactgcagctgtgcagcagacgcctctgcgctgaggacagggacgccctgcgccagctgcagcccagtcggccgggccccggcgagtgcacgctggaccacggctccaagctcttctttcggcgcctctgaccctggcgctgcctttccccaccctcaccgaagcccctaataaatgaagctgctggccgggcgcggtggctcacgcctgtaatcccaacactttgggaggcccaggcgggcggatcacgaggtcaggagatcgagaccatcctggctaacatggtgaaaccccgtctctactaaaaataccaaaaattagccgggcgtggtggtggaagcctgtagtcccagctactccggaggctgaggcaggagaatggcgtgaacccgggaggcggagcttgcagtgagccgagatcgcaccactgcactccagcctgggcgacagaccgagactccgtctc

SEQ ID NO: 4069 - DNA, 2473 bp, Homo sapiens
ggactttgaaatccaacccggtcacctacccgcgcgactgtgtccacggatggcacgaaagccaagcgagtccccctgccgagctactcgcgtccgcctcctcccaagctgagctctgctccgcccacctgagtccttcgccagttaggaggaaacacagccgcttaatgaactgctgcatcgggctgggagagaaagctcgcgggtcccaccgggcctcctacccaagtctcagcgcgcttttcaccgaggcctcaattctgggatttggcagctttgctgtgaaagcccaatggacagaggactgcagaaaatcaacctatcctccttcaggaccaacgtacagaggtgcagttccatggtacaccataaatcttgacttaccaccctacaaaagatggcatgaattgatgcttgacaaggcaccaatgctaaaggttatagtgaattctctgaagaatatgataaatacattcgtgccaagtggaaaagttatgcaggtggtggatgaaaaattgcctggcctacttggcaactttcctggcccttttgaagaggaaatgaagggtattgccgctgttactgatatacctttaggagagattatttcattcaatattttttatgaattatttaccatttgtacttcaatagtagcagaagacaaaaaaggtcatctaatacatgggagaaacatggattttggagtatttcttgggtggaacataaataatgatacctgggtcataactgagcaactaaaacctttaacagtgaatttggatttccaaagaaacaacaaaactgtcttcaaggcttcaagctttgctggctatgtgggcatgttaacaggattcaaaccaggactgttcagtcttacactgaatgaacgtttcagtataaatggtggttatctgggtattctagaatggattctgggaaagaaagatgccatgtggatagggttcctcactagaacagttctggaaaatagcacaagttatgaagaagccaagaatttattgaccaagaccaagatattggccccagcctactttatcctgggaggcaaccagtctggggaaggttgtgtgattacacgagacagaaaggaatcattggatgtatatgaactcgatgctaagcagggtagatggtatgtggtacaaacaaattatgaccgttggaaacatcccttcttccttgatgatcgcagaacgcctgcaaagatgtgtttgaaccgcaccagccaagagaatatctcatttgaaaccatgtatgatgtcctgtcaacaaaacctgtcctcaacaagctgaccgtatacacaaccttgatagatgttaccaaaggtcaattcgaaacttacctgcgggactgccctgacccttgtataggttggtgagcacacgtctggcctacagaatgcggcctctgagacatgaagacaccatctccatgtgaccgaacactgcagctgtctgaccttccaaagactaagactcgcggcaggttctctttgagtcaaaagcttgtcttcgtccatctgttgacaaatgacagacctttttttttcccccatcagtagatttttcttatttacagataacttctttaggggaagtaaaacagtcatctagaattcattgagttttgtttcactttgacatttggggatctggtgggcagtcgaaccatggtgaactccacctccgtggaataaatggagattcagcgtgggtgttgaatccagcacgtctgtgtgagtaacgggacagtaaacactccacattcttcagtttttcacttctacctacatatttgtatgtttttctgtataacagccttttccttctggttctaactgctgttaaaattaatatatcattatctttgctgttattgacagcgatataattttattacatatgattagagggatgagacagacattcacctgtatatttcttttaatgggcacaaaatgggcccttgcctctaaatagcactttttggggttcaagaagtaatcagtatgcaaagcaatcttttatacaataattgaagtgttccctttttcataattactgtacttcctagtaaccctaagttgctaacttaaaaaaccgcatcccaggttctgttaatttagtaaataaacaagtcaaagacttgtggaaaataggaagtgaacccatattttaaattctcataagtagcattcatgtaataaacaggtttttagtttgttcttcagattgatagggagttttaaagaaattttagtagttactaaaattatgttactgtatttttcagaaatcaaactgcttatgaaaagtactaatagaacttgttaacctttctaaccttcacgattaactgtgaaatgtacgtcatttgtgcaagaccgtttgtccacttcattttgtataatcacagttgtgttcctgacactcaataaacagtcattgg

SEQ ID NO: 4070 - DNA, 5864 bp, Homo sapiens
tcagaagaaagccccgagatcacagagacccggcgagatcacagagacccggcctgaaggaacgtggaaagaccaatgtacctgttttgaccggttgcctggagcaagaagttccagttggggagaattttcagaagataaagtcggagattgtggaaagacttgacttgcagcattactctactgactggcagagacaggagaggtagatgtccacgcccacagaccctggtgcgatgccccacccagggccttcgccggggcctgggccttcccctgggccaattcttgggcctagtccaggaccaggaccatccccaggttccgtccacagcatgatggggccaagtcctggacctccaagtgtctcccatcctatgccgacgatggggtccacagacttcccacaggaaggcatgcatcaaatgcataagcccatcgatggtatacatgacaaggggattgtagaagacatccattgtggatccatgaagggcactggtatgcgaccacctcacccaggcatgggccctccccagagtccaatggatcaacacagccaaggttatatgtcaccacacccatctccattaggagccccagagcacgtctccagccctatgtctggaggaggcccaactccacctcagatgccaccaagccagccgggggccctcatcccaggtgatccgcaggccatgagccagcccaacagaggtccctcacctttcagtcctgtccagctgcatcagcttcgagctcagattttagcttataaaatgctggcccgaggccagcccctccccgaaacgctgcagcttgcagtccaggggaaaaggacgttgcctggcttgcagcaacaacagcagcagcaacagcagcagcagcagcagcagcagcagcagcagcagcagcaacagcagccgcagcagcagccgccgcaaccacagacgcagcaacaacagcagccggcccttgttaactacaacagaccatctggcccggggccggagctgagcggcccgagcaccccgcagaagctgccggtgcccgcgcccggcggccggccctcgcccgcgccccccgcagccgcgcagccgcccgcggccgcagtgcccgggccctcagtgccgcagccggccccggggcagccctcgcccgtcctccagctgcagcagaagcagagccgcatcagccccatccagaaaccgcaaggcctggaccccgtggaaattctgcaagagcgggaatacagacttcaggcccgcatagctcataggatacaagaactggaaaatctgcctggctctttgccaccagatttaagaaccaaagcaaccgtggaactaaaagcacttcggttactcaatttccagcgtcagctgagacaggaggtggtggcctgcatgcgcagggacacgaccctggagacggctctcaactccaaagcatacaaacggagcaagcgccagactctgagagaagctcgcatgaccgagaagctggagaagcagcagaagattgagcaggagaggaaacgccgtcagaaacaccaggaatacctgaacagtattttgcaacatgcaaaagattttaaggaatatcatcggtctgtggccggaaagatccagaagctctccaaagcagtggcaacttggcatgccaacactgaaagagagcagaagaaggagacagagcggattgaaaaggagagaatgcggcgactgatggctgaagatgaggagggttatagaaaactgattgatcaaaagaaagacaggcgtttagcttaccttttgcagcagaccgatgagtatgtagccaatctgaccaatctggtttgggagcacaagcaagcccaggcagccaaagagaagaagaagaggaggaggaggaagaagaaggctgaggagaatgcagagggtggggagtctgccctgggaccggatggagagcccatagatgagagcagccagatgagtgacctccctgtcaaagtgactcacacagaaaccggcaaggttctgttcggaccagaagcacccaaagcaagtcagctggacgcctggctggaaatgaatcctggttatgaagttgcccctagatctgacagtgaagagagtgattctgattatgaggaagaggatgaggaagaagagtccagtaggcaggaaaccgaagagaaaatactcctggatccaaatagcgaagaagtttctgagaaggatgctaagcagatcattgagacagctaagcaagacgtggatgatgaatacagcatgcagtacagtgccaggggctcccagtcctactacaccgtggctcatgccatctcggagagggtggagaaacagtctgccctcctaattaatgggaccctaaagcattaccagctccagggcctggaatggatggtttccctgtataataacaacttgaacggaatcttagccgatgaaatggggcttggaaagaccatacagaccattgcactcatcacttatctgatggagcacaaaagactcaatggcccctatctcatcattgttcccctttcgactctatctaactggacatatgaatttgacaaatgggctccttctgtggtgaagatttcttacaagggtactcctgccatgcgtcgctcccttgtcccccagctacggagtggcaaattcaatgtcctcttgactacttatgagtatattataaaagacaagcacattcttgcaaagattcggtggaaatacatgatagtggacgaaggccaccgaatgaagaatcaccactgcaagctgactcaggtcttgaacactcactatgtggcccccagaaggatcctcttgactgggaccccgctgcagaataagctccctgaactctgggccctcctcaacttcctcctcccaacaatttttaagagctgcagcacatttgaacaatggttcaatgctccatttgccatgactggtgaaagggtggacttaaatgaagaagaaactatattgatcatcaggcgtctacataaggtgttaagaccatttttactaaggagactgaagaaagaagttgaatcccagcttcccgaaaaagtggaatatgtgatcaagtgtgacatgtcagctctgcagaagattctgtatcgccatatgcaagccaaggggatccttctcacagatggttctgagaaagataagaaggggaaaggaggtgctaagacacttatgaacactattatgcagttgagaaaaatctgcaaccacccatatatgtttcagcacattgaggaatcctttgctgaacacctaggctattcaaatggggtcatcaatggggctgaactgtatcgggcctcagggaagtttgagctgcttgatcgtattctgccaaaattgagagcgactaatcaccgagtgctgcttttctgccagatgacatctctcatgaccatcatggaggattattttgcttttcggaacttcctttacctacgccttgatggcaccaccaagtctgaagatcgtgctgctttgctgaagaaattcaatgaacctggatcccagtatttcattttcttgctgagcacaagagctggtggcctgggcttaaatcttcaggcagctgatacagtggtcatctttgacagcgactggaatcctcatcaggatctgcaggcccaagaccgagctcaccgcatcgggcagcagaacgaggtccgggtactgaggctctgtaccgtgaacagcgtggaggaaaagatcctcgcggccgcaaaatacaagctgaacgtggatcagaaagtgatccaggcgggcatgtttgaccaaaagtcttcaagccacgagcggagggcattcctgcaggccatcttggagcatgaggaggaaaatgaggaagaagatgaagtaccggacgatgagactctgaaccaaatgattgctcgacgagaagaagaatttgacctttttatgcggatggacatggaccggcggagggaagatgcccggaacccgaaacggaagccccgtttaatggaggaggatgagctgccctcctggatcattaaggatgacgctgaagtagaaaggctcacctgtgaagaagaggaggagaaaatatttgggagggggtcccgccagcgccgtgacgtggactacagtgacgccctcacggagaagcagtggctaagggccatcgaagacggcaatttggaggaaatggaagaggaagtacggcttaagaagcgaaaaagacgaagaaatgtggataaagatcctgcaaaagaagatgtggaaaaagctaagaagagaagaggccgccctcccgctgagaaactgtcaccaaatccccccaaactgacaaagcagatgaacgctatcatcgatactgtgataaactacaaagataggtgtaacgtggagaaggtgcccagtaattctcagttggaaatagaaggaaacagttcagggcgacagctcagtgaagtcttcattcagttaccttcaaggaaagaattaccagaatactatgaattaattaggaagccagtggatttcaaaaaaataaaggaaaggattcgtaatcataagtaccggagcctaggcgacctggagaaggatgtcatgcttctctgtcacaacgctcagacgttcaacctggagggatcccagatctatgaagactccatcgtcttacagtcagtgtttaagagtgcccggcagaaaattgccaaagaggaagagagtgaggatgaaagcaatgaagaggaggaagaggaagatgaagaagagtcagagtccgaggcaaaatcagtcaaggtgaaaattaagctcaataaaaaagatgacaaaggccgggacaaagggaaaggcaagaaaaggccaaatcgaggaaaagccaaacctgtagtgagcgattttgacagcgatgaggagcaggatgaacgtgaacagtcagaaggaagtgggacggatgatgagtgatcagtatggacctttttccttggtagaactgaattccttcctcccctgtctcatttctacccagtgagttcatttgtcatataggcactgggttgtttctatatcatcatcgtctataaactagctttaggatagtgccagacaaacatatgatatcatggtgtaaaaaacacacacatacacaaatatttgtaacatattgtgaccaaatgggcctcaaagattcagattgaaacaaacaaaaagcttttgatggaaaatatgtgggtggatagtatatttctatgggtgggtctaatttggtaacggtttgattgtgcctggttttatcacctgttcagatgagaagatttttgtcttttgtagcactgataaccaggagaagccattaaaagccactggttattttatttttcatcaggcaattttcgaggtttttatttgttcggtattgtttttttacactgtggtacatataagcaactttaataggtgataaatgtacagtagttagatttcacctgcatatacatttttccattttatgctctatgatctgaacaaaagctttttgaattgtataagatttatgtctactgtaaacattgcttaatttttttgctcttgatttaaaaaaaagttttgttgaaagcgctattgaatattgcaatctatatagtgtattggatggcttcttttgtcaccctgatctcctatgttaccaatgtgtatcgtctccttctccctaaagtgtacttaatctttgctttctttgcacaatgtctttggttgcaagtcataagcctgaggcaaataaaattccagtaatttcgaagaatgtggtgttggtgctttcctaataaagaaataatttagcttgac

SEQ ID NO: 4071 - DNA, 1893 bp, Homo sapiens
gagcactgtcggcatcatcgggctggggcgcataggtgaggctcccaccggcccgcttgcccgccccggctctcacagcgtggtttgcatccctggcaccacgtgtctgaaggctgagaagacccacatgctgtcagggcactttgcttgcagtagagatatctctaatgagggatacagctttgtaaaacacaggcaaatacataaataaaccaaagcaggattccttaagaactcaccaggtgataaaagcaagttgcctaagggtcagggggcttcatgattccggctccataaagaacagatgaagactacaaatgtgttggggccgttaggagtggttaccgtgagagagcccattcccccgacacctactccggcttgcgttctggaaggtatgtgactcacaaagccctaactcgggccggagggctcagtgggcagagttgatctgcagttctgcagatgaggcagagacacttttcttccagtggcccttatttggagaagcctggcagaagggcgtgagcctagccaagcagctatctattggtggttctctgtcatcctgcctggtgcaggggtgcgggtgagggtggagagtgtggagaacctgtctagccaacgaacagccctgcctctcactagagagttgcttggaggaacccaacagctttggggcacgttctgagcctgaaaatccaactgtacaaatctgtctcagcagcagcttacatgaaaattgtaagtttggggtgagctggcagtttggcagtgccaccaaaaagtcaaatggggtctgagactgcattcacagaagcagagggtccaggacaaaggaggggactgcttgaccaggtgtctcctttgtgaaaacctctccagttctcagaggttaggaaaaacctgagtggctttccagatggcttggaccatgtgaggacagcatcagccagtcacagtctcaggggagctgaggtgctgtctccagatccctggggcagtgtgggctggctgggggctagttacagtggggcagccagccccccacccgctttggaggagacaggagcaggcaactcgggctgtgctgatgaaaagggtctgccctgagggccgctgttccagaaatgctgggtggtgtccctaccctttgcgggactgggaacgagacatggactctccttgctctaggccaggccattgctcggcgtctgaaaccattcggtgtccagagatttctgtacacagggcgccagcccaggcctgaggaagcagcagaattccaggcagagtttgtgtctacccctgagctggctgcccaatctgatttcatcgtcgtggcctgctccttaacacctgcaaccgagggactctgcaacaaggacttcttccagaagatgaaggaaacagctgtgttcatcaacatcagcaggggcgacgtcgtaaaccaggacgacctgtaccaggccttggccagtggtaagattgcagctgctggactggatgtgacgagcccagaaccactgcctacaaaccaccctctcctgaccctgaagaactgtgtgattctgccccacattggcagtgccacccacagaacccgcaacaccatgtccttgttggcagctaacaacttgctggctggcctgagaggggagccgatgcctagtgaactcaagctgtagccaaacagtagagatggagggccgggaagcaaaccgtgccctggtattgtcagacacacccaggcttgatttggatccacaggcagagccaagggaaggtgtgattctctgaggaaagagtgattctgatatatgtacttgtcacattggtgttggacacatttgcgccaaaagtatggtaattctattattaaataattctctg

SEQ ID NO: 4072 - DNA, 1557 bp, Homo sapiens
gctggctgcttttctcagtgccgaagccgcgccatgctcgttctcagaagcggcctgaccaaggcgcttgcctcacggacgctcgcgcctcaggtgtgttcatcttttgctacgggccctagacaatacgatggaacgttctatgaatttcgtacttattaccttaaaccttcaaatatgaatgcgttcatggaaaatcttaagaaaaacattcatcttcggacctcttactctgaattggttggattctggagtgtagaatttggaggcagaacgaataaagtgtttcatatttggaagtatgataattttgctcatcgagctgaagttcggaaagccttagccaactgtaaggaatggcaagaacaatctatcattccaaatttggctcgcattgataaacaagagacggaaattacttacctgataccatggtccaaattagaaaagcctccaaaagaaggagtctatgaactagctgtttttcagatgaaacctggtgggccagctctgtggggtgatgcatttgaaagagcaattaatgcccatgtcaatttaggctacacaaaagtagttggtgttttccacacagaatatggagaactcaacagagttcatgttctttggtggaatgagagtgcagatagtcgtgcagctgggagacataagtcccatgaggatcccagagttgtggcggctgttcgggaaagtgtcaactacctagtttctcagcagaatatgcttctgattcctgcatcattttcaccattgaaatagttttctactgaaatacaaaacatttcattaactgctctaagatgtgtctgctaatggtgcttaaattctcccaagaggttctcgcttttatttgaaggaggtggtaagttaattagttaatttgctgtgcttcttgcatttttgaaagttacatattctccactgctttaagaaataattcagttcactttcaccttggcatttcagtatctgttacacattagaagtagttgtcactatttcatcatcttggtttttcatttgttttagaatacctcttctgtattttgataactcattgctttatagcattttcttttactcaaataaggattttacatttccttgcctgacagtatttttgaattatttatataaaatatctatcttttcatcatgtctatagttcctgagattttaaaaaaatttgcttagtaaaggttattttgtgatataaaatgggatttataaaaatattagattgtttatttctttactgtggaaaagtacaatgtcatctgtattaattattgcttttacattcattgattattagtcattctaacttggaaaataatgcaattgggtcacagtgttaaaaatctagaaaagacttgttggtttatatgctgaaattgttcatttataattaattttactaatttctacttagtttggatcactaacagagatcttgggacatttatttgttttaaagaaatatttatggttatggaaacgcttgccctaataaaaatcctgcatattcattgttttttt

SEQ ID NO: 4073 - DNA, 1954 bp, Homo sapiens
ctgctctgccgcctgccaccgctgcccgagcccggtgggcggcggcactgcgtgctggggaagcacagattcttgtgccctctgtgaccttgagcctgccactgacctctctgagccctgctggctgcctccccaataggaatgacaactcctacttcatgaggttgtagtgggggctcaggggcacagggagatcccgctgaggctcccagggccctgcctggtgcttggcaaggagcagttctgatgggggatgtgtcagctgccagaggctcagagccaaggcccctcccacatctcctgcctgcgtgcattcctcacatcctggccttgggccaaactgctcagcctcagccgccttccctcgatgctggaggatcaggtccaagagatgcctctccccgaccagcctaggactgcagtcagcattcccaggccccagtgtggtctgtggggctgtgtgcagagtgtgcgagacgctatgtccagcaaaggctccgtggttctggcctacagtggcggcctggacacctcgtgcatcctcgtgtggctgaaggaacaaggctatgacgtcattgcctatctggccaacattggccagaaggaagacttcgaggaagccaggaagaaggcactgaagcttggggccaaaaaggtgttcattgaggatgtcagcagggagtttgtggaggagttcatctggccggccatccagtccagcgcactgtatgaggaccgctacctcctgggcacctctcttgccaggccctgcatcgcccgcaaacaagtggaaatcgcccagcgggagggggccaagtatgtgtcccacggcgccacaggaaaggggaacgatcaggtccggtttgagctcagctgctactcactggccccccagataaaggtcattgctccctggaggatgcctgaattctacaaccggttcaagggccgcaatgacctgatggagtacgcaaagcaacacgggattcccatcccggtcactcccaagaacccgtggagcatggatgagaacctcatgcacatcagctacgaggctggaatcctggagaaccccaagaaccaagcgcctccaggtctctacacgaagacccaggacccagccaaagcccccaacacccctgacattctcgagatcgagttcaaaaaaggggtccctgtgaaggtgaccaacgtcaaggatggcaccacccaccagacctccttggagctcttcatgtacctgaacgaagtcgcgggcaagcatggcgtgggccgtattgacatcgtggagaaccgcttcattggaatgaagtcccgaggtatctacgagaccccagcaggcaccatcctttaccatgctcatttagacatcgaggccttcaccatggaccgggaagtgcgcaaaatcaaacaaggcctgggcttgaaatttgctgagctggtgtataccggtttctggcacagccctgagtgtgaatttgtccgccactgcatcgccaagtcccaggagcgagtggaagggaaagtgcaggtgtccgtcctcaagggccaggtgtacatcctcggccgggagtccccactgtctctctacaatgaggagctggtgagcatgaacgtgcagggtgattatgagccaactgatgccaccgggttcatcaacatcaattccctcaggctgaaggaatatcatcgtctccagagcaaggtcactgccaaatagacccgtgtacaatgaggagctggggcctcctcaatttgcagatcccccaagtacaggcgctaattgttgtgataatttgtaattgtgacttgttctccccggctggcagcgtagtggggctgccaggccccagctttgttccctggtccccctgaagcctgcaaacgttgtcatcgaagggaagggtggggggcagctgcggtggggagctataaaaatgacaattaaaagaga

SEQ ID NO: 4074 - DNA, 1755 bp, Homo sapiens
tgatcacacccacagttgagctgcgctggccagagatgcctgcccacagcctggtgatgagcagcccggccctcccggccttcctgctctgcagcacgctgctggtcatcaagatgtacgtggtggccatcatcacgggccaagtgaggctgcggaagaaggcctttgccaaccccgaggatgccctgagacacggaggcccccagtattgcaggagcgaccccgacgtggaacgctgcctcagggcccaccggaacgacatggagaccatctaccccttccttttcctgggcttcgtctactcctttctgggtcctaacccttttgtcgcctggatgcacttcctggtcttcctcgtgggccgtgtggcacacaccgtggcctacctggggaagctgcgggcacccatccgctccgtgacctacaccctggcccagctcccctgcgcctccatggctctgcagatcctctgggaagcggcccgccacctgtgaccagcagctgatgcctccttggccaccagaccatgggccaagagccgccgtggctatacctggggacttgatgttccttccagattgtggtgggccctgagtcctggtttcctggcagcctgctgcgcgtgtgggtctctgggcacagtgggcctgtgtgtgtgcccgtgtgtgtgtatgtgtgtgtgtatgtttcttagccccttggattcctgcacgaagtggctgatgggaaccatttcaagacagattgtgaagattgatagaaaatccttcagctaaagtaacagagcatcaaaaacatcactccctctccctccctaacagtgaaaagagagaagggagactctatttaagattcccaaacctaatgatcatctgaatcccgggctaagaatgcagacttttcagactgaccccagaaattctggcccagccaatctagaggcaagcctggccatctgtatttttttttttccaagacagagtcttgctctgttgcccaagctggagtgaagtggtacaatctggctcactgcagcctccgcctcccgggttcaagcgattctcccgcctcagcctcctgagtagctgggattacaggcgcgtatcaccatacccagctaatttttgtatttttagtagagacgggttcaccatgttgcccaggagggtctcgaactcctggcctcaagtgatccaccggcctcggcctcccaaagtgctgggatgacaggcatgaatcactgtgctcagccaccatctggagttttaaaaggctcccatgtgagtccctgtgatggccaggccaggggacccctgccagttctctgtggaagcaaggctggggtcttgggttcctgtatggtggaagctgggtgagccaaggacagggctggctcctctgcccccgctgacgcttcccttgccgttggctttggatgtctttgctgcagtcttctctctggctcaggtgtgggtgggaggggcccacaggaagctcagccttctcctcccaaggtttgagtccctccaaagggcagtgggtggaggaccgggagctttgggtgaccagccactcaaaggaactttctggtcccttcagtatcttcaaggtttggaaactgcaaatgtccccttgatggggaatccgtgtgtgtgtgtgtgtgtgtgtgtgtgtgtgtgtgtgtgtgtgtgtgttttctcctagacccgtgacctgagatgtgtgatttttagtcattaaatggaagtgtctgcc

SEQ ID NO: 4075 - DNA, 1449 bp, Homo sapiens
gctaaatccccacctgatgtgtgtgctttgtggagggtacttcattgatgccacaaccataatagaatgtctacattccttctgtaaaacgtgtattgttcgttacctggagaccagcaagtattgtcctatttgtgatgtccaagttcacaagaccagaccactactgaatataaggtcagataaaactctccaagatattgtatacaaattagttccagggcttttcaaaaatgaaatgaagagaagaagggatttttatgcagctcatccttctgctgatgctgccaatggctctaatgaagatagaggagaggttgcagatgaagataagagaattataactgatgatgagataataagcttatccattgaattctttgaccagaacagattggatcggaaagtaaacaaagacaaagagaaatctaaggaggaggtgaatgataaaagatacttacgatgcccagcagcaatgactgtgatgcacttaagaaagtttctcagaagtaaaatggacatacctaatactttccagattgatgtcatgtatgaggaggaacctttaaaggattattatacactaatggatattgcctacatttatacctggagaaggaatggtccacttccattgaaatacagagttcgacctacttgtaaaagaatgaagatcagtcaccagagagatggactgacaaatgctggagaactggaaagtgactctgggagtgacaaggccaacagcccagcaggaggtattccctccacctcttcttgtttgcctagccccagtactccagtgcagtctcctcatccacagtttcctcacatttccagtactatgaatggaaccagcaacagccccaagactttttctctgtgttaggaaagatgggaaatggtttctgtaaccattgtttggatttggaagtactctgcagtggacataagcattgggccatagtttgttaatctcaactaacgcctacattacattctccttgatcgttcttgttattacgctgttttgtgaacctgtagaaaacaagtgctttttatcttgaaattcaaccaacggaaagaatatgcatagaataatgcattctatgtagccatgtcactgtgaataacgatttcttgcatatttagccattttgattcctgtttgatttatacttctctgttgctacgcaaaaccgatcaaagaaaagtgaacttcagttttacaatctgtatgcctaaaagcgggtactaccgtttattttactgacttgtttaaatgattcgcttttgtaagaatcagatggcattatgcttgttgtacaatgccatattggtatatgacataacaggaaacagtattgtatgatatatttataaatgctataaagaaatattgtgtttcatgcattcagaaatgattgttaaaattctcccaactggttc

SEQ ID NO: 4076 - DNA, 1320 bp, Homo sapiens
ttctgtctggcggcggcagcatggcggcgggggcggctgaggcagctgtagcggccgtggaggaggtcggctcagccgggcagtttgaggagctgctgcgcctcaaagccaagtccctccttgtggtccatttctgggcaccatgggctccacagtgtgcacagatgaacgaagttatggcagagttagctaaagaactccctcaagtttcatttgtgaagttggaagctgaaggtgttcctgaagtatctgaaaaatatgaaattagctctgttcccacttttctgtttttcaagaattctcagaaaatcgaccgattagatggtgcacatgccccagagttgaccaaaaaagttcagcgacatgcatctagtggctccttcctacccagcgctaatgaacatcttaaagaagatctcaaccttcgcttgaagaaattgactcatgctgccccctgcatgctgtttatgaaaggaactcctcaagaaccacgctgtggtttcagcaagcagatggtggaaattcttcacaaacataatattcagtttagcagttttgatatcttctcagatgaagaggttcgacagggactcaaagcctattccagttggcctacctatcctcagctctatgtttctggagagctcataggaggacttgatataattaaggagctagaagcatctgaagaactagatacaatttgtcccaaagctcccaaattagaggaaaggctcaaagtgctgacaaataaagcttctgtgatgctctttatgaaaggaaacaaacaggaagcaaaatgtggattcagcaaacaaattctggaaatactaaatagtactggtgttgaatatgaaacattcgatatattggaggatgaagaagttcggcaaggattaaaagcttactcaaattggccaacataccctcagctgtatgtgaaaggggagctggtgggaggattggatattgtgaaggaactgaaagaaaatggtgaattgctgcctatactgagaggagaaaattaataaatcttaaacttggtgcccaactattacggggtctggctctgtcacccaggctggagtgcagtggcacgattatggctcattgcagcctcgacttctcggggccaagcgatcctcctgcctcagccttctgagtagctgggaccacaggcgtgcaccaccatgcccacctaattttttatttcttgtagagatgaggtctcctgcctcagcctcccaaagtgctggaatttacaggtaggaccaccacacttggtccacttacttataataaacattgatttggtcgttc

SEQ ID NO: 4077 - DNA, 1117 bp, Homo sapiens
ctgaccgaccttcagcagggctgtggctaccatgttctctcgcgcgggtgtcgctgggctgtcggcctggaccttgcagccgcaatggattcaagttcgaaatatggcaactttgaaagatatcaccaggagactaaagtccatcaaaaacatccagaaaattaccaagtctatgaaaatggtagcggcagcaaaatatgcccgagctgagagagagctgaaaccagctcgaatatatggattgggatctttagctctgtatgaaaaagctgatatcaaggggcctgaagacaagaagaaacacctccttattggtgtgtcctcagatcgaggactgtgtggtgctattcattcctccattgctaaacagatgaaaagcgaggttgctacactaacagcagctgggaaagaagttatgcttgttggaattggtgacaaaatcagaggcatactttataggactcattctgaccagtttctggtggcattcaaagaagtgggaagaaagccccccacttttggagatgcgtcagtcattgcccttgaattactaaattctggatatgaatttgatgaaggctccatcatctttaataaattcagggtctgtcatctcctataagacagaagaaaagcccatcttttcccttaataccgttgcaagtgctgacagcatgagtatctatgacgatattgatgctgacgtgctgcaaaattaccaagaatacaatctggccaacatcatctactactctctgaaggagtccaccactagtgagcagagtgccaggatgacagccatggacaatgccagcaagaatgcttctgagatgattgacaaattgacattgacattcaaccgtacccgccaagctgtcatcacaaaagagttgattgaaattatctctggtgctgcagctctgggattaatgaaaatcaagttccatcctcagacaagaggtaaagaaggaaaattcagccagttgattttgtttttagcttactgctgcctttgtccgaagaaaccgttcctccattatttgaattactgaagacagcaagatatttgtaaattatcttaaaataaacaacttaaaataaaatcattgtttttctt

SEQ ID NO: 4078 - DNA, 3184 bp, Homo sapiens
agcctcggcggaccttgctgcctctgtctctttaacgcgagaggaagcgatgcagaggggtggaaaatggcagagctgcagatgttactagaggaggagatcccgtctggcaagagggcgctgatcgagagttaccagaacctgactcgggtggcagactactgtgaaaacaactacatacaggctacagacaagagaaaagctttagaggagaccaaagcctatacaacccaatctctagctagtgttgcttatcaaataaatgcattggccaacaatgtactccagttgctggatatccaagcctctcagcttcggagaatggagtcttccatcaatcatatctcacagactgtggatattcataaggagacagtggcacgaagagagattggtattttgacaacaaataagaatacatcaagaactcacaaaataatagcacctgcgaatatggagcgccctgtaaggtatattcggaaacctatcgattacacagttctggatgatgtgggccatggtgtcaagtggctaaaagccaagcatggaaataaccagcctgcaagaactggcacactgtcgagaacaaatcctcctactcagaaaccgccaagtcctcccatgtcaggccggggaacactgggacggaatactccttataaaaccctggaacctgttaaacccccaacagttcctaatgactatatgaccagtcctgctaggcttggaagtcagcatagtccaggcaggacagcatctttaaatcagagaccaaggacacacagtggaagtagtggaggaagtggaagtcgagaaaacagtggtagcagtagtattggcattcccattgctgtgcctacaccttcgccacccactattggaccagccccgggctcagctcctggttcccagtatggcacaatgaccaggcagatatctcgacacaactctactacttcttcgacatcttctggtggatacagacgaactccctctgtgactgctcaattttctgctcagcctcatgttaatggaggtccactttattctcaaaattcaatttctattgctccaccccctccccctatgcctcagttgactccacagatacctctcacaggcttcgtggccagggtgcaggaaaacattgctgatagtccaactccaccgccaccacctccaccagatgacattcccatgtttgatgactctccacctcccccaccaccaccaccagtggattatgaagatgaggaggctgcagtagttcagtataatgatccatatgcagatggggatcctgcttgggcccccaagaattatattgagaaagttgttgcaatatatgattatacaaaagacaaggatgatgagctgtcatttatggagggtgcaatcatttatgttataaagaagaatgatgatggctggtatgaaggagtctgcaatcgagtgactggtctgttccctgggaactatgttgaatcaatcatgcactatactgattaatttttttttttcttttgaagtagattcttattactcagtcatactgtgggactattatggttaacagaactgtcttaatatgttttaaaatgtgcccatattttcagaacatgctgttttattggtaaattgaatgtctacctgtaagcataaatctttgaggcagtttatgtattgctgaatagcaatttatacaagaagctgtccataactgattatgcttatgtacttacttacacatttttaactttatgaccagcctaaatattctgggggaagtggggtataatatttaacgaatcatgattcagattgtaccattacatgtttcagtgcagcatggttactaacgctatgtcagactaatattaaaatcagaaaatttaaatgctggtgctggtcagactttttttgttagattctctcatttaaaaaaaatactgtttgtttaaagcatgcataaaaatttatgtattgaaatatacttaaaaattcaagatgcttcccatttgtgtaatatttacctggaggactcgtacttaggtgtcttaacgtgaattgagtctccaaggtctccatgtgaaacaagcaaaaagagaattatctgtaatgttgtaatttgtacctaagttttttaatgagtgaaatttgcattataaactttttccattcataaatacataagtgaaccaaaggtttttgtcctttccttcactgatttgctttaaaaaaaataaaagataatgatttattgcagaattatgattctattttctcaatatgttaacttggaaaaaaattttagccttatcttaatctgtcccaacagcaatgtgacggatttttgcagattcaaaatctgcaatggttatttacaagtcaatctactgaattccttttttaaataatcttttgaaactaagaaaatgtgtcaaattgtgtgcattcattctgtaggtaaaattcttaaggattgccatgtcagtccttcagttgtacagtgaactgttgtacactggttcaatgaaaggaagttaaaagtaccttttacatattgtaaaagtggatacagttgatttgtgagtaggcactctttaatccattacctggcactagcaacattagaattttaaaataaaataattgggaaagaaggtgggtcatgtattaatcagtgaacagagatttacctaaccaacagacttggattgtcttttgacataatcaaaatgcaacacatgcactttgtgtgtctcctcttaattgaagggagggctgagggatgttttctcttcttgtcttgtgtataattctctattgcttaggatattaaagtagagcactcaagtgtgggtttctgtgttattgaggatttgtttggaattcaaattacagttatgtactggatgctacagacttataacagcatagtgaatggtaagactagtgcaaaacagttatttctgaaaattaaagaccattattgctaccaaatcaatgtgactatttcatatgcattttgcctttgttaattttaaacaaacaaagtatcattagtgatcagctagctaccttctactttccatttttcaagtggattgttctcttaatttgtatataacctgttgtctaaattttatgtacagtcttttataataaaccattctcctatatg

SEQ ID NO: 4079 - DNA, 1478 bp, Homo sapiens
gtcggtgccgagggcaggatggagaagctgcggctcctgggcctccgctaccaggagtacgtgactcgtcacccggccgccacggcccagctggagacagcagtgcggggcttcagttacctgctggcaggtcgattcgccgattcgcacgagctgtcagagctggtgtactctgcctctaacctgcttgtgctgctcaatgacgggatcctacggaaggagcttcggaaaaagttgcctgtgtcgctgtcccagcagaagctgctgacatggctgagcgtgctggagtgcgtggaggtgttcatggagatgggagctgccaaggtgtggggtgaagtgggccgctggcttgtcatcgccctcgtccagctggccaaggctgtactgcggatgctcctgctgctctggttcaaggctggcctccagacttcaccccctatcgttccactggacagagagacccaggcacagcccccggatggtgaccacagccctggcaaccatgagcagtcctacgtggggaagcggtcaaaccgggtggtgcgaaccctccagaacacgccgtccctgcactccaggcactggggagctccccagcagcgggagggacggcagcagcagcatcacgaggagctgagtgcgacccccacccccctggggctgcaggagaccatcgcagagtttttgtacattgcccggccgctgctgcacttgctcagcctgggcctgtggggtcagaggtcgtggaaaccctggctcttggctggtgttgtggacgtgaccagcctgagcctcctgagtgacagaaagggcctgacccggagggagcggcgggagctgcggcgccggaccatcctgctgctctactacctgctgcgctctcctttctatgaccgcttctccgaggccaggatcctcttcctgctccagttgctggccgaccacgtccctggcgttggcctggtcacaacgtcccagcgtgcggcctctccgtgcctaccggccaggccccacacacagccctggtcgccaccagcgttcctcccaggacacccttgactgcgctctcctgtgacgatgccactgcagcccgcaccttgtcactgctgggccaagaagccttcactaggagtgggatccaggctcctctcccacagaaagcggtgacttcacctcatggagcccgggaagctgctcgcctcggcagccataggagcgaacactgctgctctctcgctggcccctggtgaggacaggaagcctgaacccgggtgatggctgaacgctgcccagcgtgtcttctggctggggccctccgtctgccccttctccgcagggccctgtggctctggcagccccaggccatggcgttgccagcctccctgtgacagagcctggtgaacagtgagcctggctcccacgcaagtggcactttaagccctgcatcctcggttgagagtaaaaggcttttctccctt

SEQ ID NO: 4080 - DNA, 2011 bp, Homo sapiens
gtccgttagagtgtgccctttctgtgtaagctgtgagcgtaggcggccctgaggggtgtgttgcaggggtttccaagcccagcaccagcacccttgcccttttccatcaggggttcagcctagggtccccgctggtgggcggctcccgagtcttggagaagagcacgagaacctagaccgcccccgaagtgcggagaccccctgggcaggctgaaagatggcggcggcgtctgtctctgcggcttctggttctcacttgtcgaacagctttgctgagccatcaaggtctaatggaagcatggttcggcattcttcatctccatatgtagtatatccttcggataagcctttccttaatagtgatctacgacgctccccaagtaagcctacacttgcctatccagaaagcaacagcagagccatattttctgctcttaagaatcttcaagataagattcgacgcttggaacttgagaggattcaggcagaagaaagtgtgaaaaccttgtctagagaaacaattgaatataagaaagtactggatgaacagatacaagaaagggagaattcaaagaatgaggaatcaaagcacaatcaagaactgacatctcagttgttagctgcagaaaataaatgcaatctattagaaaaacaattggaatacatgcgaaatatgataaagcatgccgaaatggagaggacatctgtcttagagaaacaagtttccctagaaagagaacgacaacatgatcaaacacatgttcagagccaacttgaaaaattggatcttcttgaacaggagtataacaaacttaccacaatgcaggcccttgcagaaaaaaaaatgcaagagttggaagcaaaactccatgaagaagaacaggaaaggaaacgcatgcaagctaaggcagctgagttgcagactggtctagaaacaaatagacttatctttgaagataaggcaactccgtgtgttcccaatgcaagaagaattaaaaaaaagaagtcaaaaccaccagaaaagaaaagttctaggaactattttggtgcacaaccacattatagattatgcttgggtgatatgccatttgtagctgggaagtccacaagccctagccatgccgtggtagccaatgttcagcttgtcttgcatctaatgaagcaacacagtaaagctttgtgcaatgatcgagtcatcaacagtattcctttggcaaagcaagtatcttcacgaggtggtaaaagtaagaagttgtcagtaacacctccctcctccaacggtattaatgaggagttgtcagaagtcttacagactttacaggatgaatttgggcaaatgagctttgatcaccagcagcttgcaaaacttatccaggagtcgccaaccgttgaactgaaagacaagttggagtgtgaattggaggcattagtgggaaggatggaagcaaaagccaaccaaataactaaagttcgaaaataccaagcccagctggagaaacagaagttagagaagcagaagaaggaattaaaagctaccaaaaagactcttgatgaagaaggaaacagcagcagccgttctggaatcacagggaccacaaataagaaagattttatgaaactgagacctggagaaaaaaggagaaaaaatcttcagttattgaaggacatgcaaagcatacagaattcattacaaagcagtagtttgtgttgggattactgactcataaccaggtcagaaattttattcagataatctgtacctcatcaatcagatgatgacaatttacttcccaggtctcatactcacttatgttggaattaattaatagcaggtgttaaaggacccaggcttcattacacaggcttttcatgtatgcaggatgactcaatgttaaagcatttaaatggaaaccaggggagttttaaagcccgagaaaccacacataatcttttgttgagatgagtttgctgtactgacgctgcactttgtaaacagattaccagtttttta

SEQ ID NO: 4081 - DNA, 1696 bp, Homo sapiens
tccgaggttatgcgtctcaatgatcccgcggaaacgctacgggtctaagaacacggatcagggtgtctacctgggtctctcaaagacacaggtcctgtcccctgcaactgctggcagtagcagcagcgacatcgcccctctgccccccccagtgaccctcgtccctccccctcccgacaccatgtcctgccgggatcggacccaggagtttctgtctgcctgcaagtcgctgcagacccgtcagaatggaatccagacaaataagccagctttgcgtgctgtccgacaacgcagtgaattcaccctcatggccaagcgcattgggaaagaccttagcaacacatttgccaagctggagaagctgacaatcttggcaaagcgcaagtccctctttgatgataaagcagtggaaattgaagagctaacatatatcatcaaacaggacatcaatagcctcaacaaacaaattgctcagctccaggatttcgtgagagccaagggcagccagagtggccggcacctgcagacccactccaacaccattgtggtctccttgcagtcgaaactggcttctatgtccaatgacttcaaatcggttttagaagtgaggacagagaacctgaagcagcagaggagccggagagagcagttctcccgggcacctgtgtcagccctgccccttgcccctaaccacctgggcggtggtgctgtggttctgggggcagagtcccatgcctccaaggatgtcgccatcgacatgatggactctcggaccagccagcagctgcagctcattgacgagcaggattcctacatccagagtcgggcagacaccatgcagaacattgagtcgacaattgttgagttgggctccatctttcagcagttggcacacatggttaaggaacaggaggaaaccattcagagtgtccttttgtttcctcttctcccggccttgtccccaggatcgacgagaacgtgctaggagcccagctggacgttgaggccgcccattcagagatcctcaagtacttccagtctgtcacctccaaccggtggctcatggtcaaaatcttcctcatcctcattgtcttcttcatcatctttgtggtcttccttgcttgaaccctctctactctgaggcactctgttggggtttgggaccctcctgggaaggcaagtggccagtgctgccactgagcctgtgcagggtacttgggagaaaggccctgtttccctggaactgctaagaatgaccactgcccctgatcccccaccccttgcctctggccaccctgtcctccccccaccaccctcaggcctatgaaacacacagggttctagatttgaactctgctgtgaagtgactggaagggagcagaggccagctgggggccagtgggggaggttgtttccactaggagatttttataaaccctctccagcctctcccaaaggaagcgttggcagcaaagggagatgatgcccttacccaccttcctgtgagtgaagagaggaagcagccccagggaccaattttcccaattgacctctttcttcctctttcaccatgtgaggcagggagccctgagcccttcagctgcctgcacaacccctgacattggctgctggtgactcaatctgccaaatgtgctgcagctcgttttctcccaattacagcaagactgtcagcctc

SEQ ID NO: 4082 - DNA, 1900 bp, Homo sapiens
gctgtttaaagatggcggcggaggaacctcagcagcagaagcaggagccgctgggcagcgactccgaaggtgttaactgtctggcctatgatgaagccatcatggctcagcaggaccgaattcagcaagagattgctgtgcagaaccctctggtgtcagagcggctggagctctcggtcctatacaaggagtatgctgaagatgacaacatctatcaacagaagatcaaggacctccacaaaaagtactcgtacatccgcaagaccaggcctgacggcaactgtttctatcgggctttcggattctcccacttggaggcactgctggatgacagcaaggagttgcagcggtgagaagggtgggcactgggcaccgaggcaggtgggtgtctacctcctccccgggcgagtaggatgtgtctcgagtagggtgtctccctccttcccgggcgatgggctggactctggccttgccaggcggggcagtgctgtctcggccctggcgtctgggctggtcgaggagcccatgctgggcccgcctttccatcccacccccaggttcaaggctgtgtctgccaagagcaaggaagacctggtgtcccagggcttcactgaattcacaattgaggatttccacaacacgttcatggacctgattgagcaggtggagaagcagacctctgtcgccgacctgctggcctccttcaatgaccagagcacctccgactaccttgtggtctacctgcggctgctcacctcgggctacctgcagcgcgagagcaagttcttcgagcacttcatcgagggtggacggactgtcaaggagttctgccagcaggaggtggagcccatgtgcaaggagagcgaccacatccacatcattgcgctggcccaggccctcagcgtgtccatccaggtggagtacatggaccgcggcgagggcggcaccaccaatccgcacatcttccctgagggctccgagcccaaggtctaccttctctaccggcctggacactacgatatcctctacaaatagggctggctccagcccgctgctgccctgctgcccccctctgccaggcgctagacatgtacagaggtttttctgtggttgtaaatggtcctatttcacccccttcttcctgtcacatgacccccccccatgttttattaaagggggtgctggtggtgagccgtgtgtgcgtgtccctgctctgctgcccgcctggctgctctgtctgctgccccctccccccaggtgggtccccctgcttttcacctatctactcctgagcttccccaacaggagcaggtttgaggggccaggcctcttggaggcccctcctgcttcgttgggttctgcttccttcccttcttagctggctcaggggcttctatgggatcctggaagttccttagggacttgcccagggtcccagggccacccacacttcatctgctccctcataggccccacctccacgtcccggctgggccccagaccccagcttcctgccctccaccgggagtctgcatggttgggagtcctgggtggaggggcctttgtgaggctggacccggctcagggcaggtggaggagctgggcctcccacagggtgcccgggcagtgccatcctggtgggggagggcagccttcaaacgtgtggggtctacagtcctcaggtctaggcagggctgccggttctccacctccccatccgccccaggccccctgcctgtgcctgccttgcaccccctctgcttgggccacggtgtctctgcattgcctgcctttttgccttcacctcttttcttccccgccccctgcacattcggggtctcagcccccaggctgtgagctccttgggggcaggccctcaataaatgtgaactgctgctgc

SEQ ID NO: 4083 - DNA, 2993 bp, Homo sapiens
gagcaaattcattcccttgctgggttgctgggctctggcactgcgctggccctcgttggaggtctgcagaagtgcacagaaagtgtgggcaatggactggccatttccacagttttggaaacttttaaaaatccatattcttgctgggattacagatgtgagccatcgtgcccagcccacccactttgttaatcatgatcagagcaggggtgccattctaccaccttggcacacctgcctagaggagtgagtggcgctgggagcagactgaggaacatcttagctgagcagtgaatccagcactgttctaaggaagctcagatggtctgtgactcatccctgtcctctggactgaatctgaggccttggaactcacccagggtcttagtggaggcacagctctgagctatgggtgtagagcatctgaacccatctacacattgaccaaacacaggcaggttccagtctgcgggggagatggagaaggtgccaccatgctgctgcacaaatcccaggatagctggggaatgagaatccagcactttgggcctaggacctggaaggagaggtcttttgggagaggtatggggacatctgaaggaggacttcttggaaggggaggggctggagcagaggcaagagtgattttgtcagatggagagaaggttctccacatgggcggggctggcagaggcagatgcccagacaggtcacaactctctaggtgcccaattacctgccctcggtgagctcagccatcggcggggaggtgccccagcgctacgtgtggcgtttctgcatcggcctgcactcggcgcctcgcttcttggtggccttcgcctactggaaccactacctcagctgcacctccccgtgttcctgctatcgcccgctctgccgcctcaacttcggcctcaatgtcgtggagaacctcgcgttgctagtgctcacttatgtctcctcctccgaggacttcagtgggtgcctggatgagggaggagtggggaagtgttccctgaggggacgggcctgcccctaccacattcggaccttcctacttcgtggtgtgggcactccctgcaatgtggctcccaatcctctttccctccagccatccacgaaaatgctttcattgtgttcattgcctcatccctcgggcacatgctcctcacctgcattctctggcggttgaccaagaagcacacagtaagtcaggaggtacggtctatccctagcgggggctccaaggcagcccagaagaaaatcaaggacatctgtcctcaggattcgggtaatggtgaggtgggaactgagttctaatgggaaccctggcagaggggtgctggggttggggctggggcttgggaacaaactgagggtggttggtcagaatctaggactatagcactgtgtttgggtagtgtgggagactggagaatagaagagatggaggctgcaaatggggatagaatgaggagtcgcatctaggcggcagtgagttaggaacagtgtcagaggactggtctgtcataattccagcgccccacccatgtacatgggtttcttttcccccacagtatttggaggtggggttggtgggtgactccatgtaactttcatactccatccccctgaagtggaagcggcaggaataccactgctcctcggcccatcactcccccagaggcagggacgtgaacacatagtcgtcattcttgctgcccctgcctgtgctcccttccatgaccgctagtgggagccaagggagataaggcccagcccttaggagttagggctgagaggggagcccacgctctcatacccagcaagctgcagagtgatcagacagcccattccctaggatcgcaagtcctacagctggaaacagcggctcttcatcatcaacttcatctccttcttctcggcgctggctgtctactttcggcacaacatgtattgtgaggctggagtgtacaccatctttgccatcctggagtacactgttgtcttaaccaacatggcgttccacatgacggcctggtgggacttcgggaacaaggagctgctcataacctctcagcctgaggaaaagcgattctgaacccttcagtcctgcttgggaggacgcagcccactgcccagaaacaagaaacacgataccattctggccttccccaccccacatcctctcttggccttactgaagatgggggaagggtaagaaggaagggtgtaggccaaggctcaccccagtgctgctggcttctcctctccacccctcatatgggcgtggggtcctcaaacatcacctttacctgagaggccccaagaagctgagctggcagagagctccaccatttggtgctaaaaaaaaaaacgtcctgaggttcatgaccaccatccagtttctggcctttacacagtcacctttcactgaggtcaggagcccctgagcagtggctgctccctgacaaccacagccatttctctgcacgggggtcattcataggactaatgtatttcatgatctactgtgcacatccaggcctgtggccacagtcccctgctaaagttgctcaggtgttctagtcctgacttcacctttttgatttggtgtgtgccctagggtatgtacccttccccatctgagcctcggtgtgtccatgtgtctggcgggggatgggtggactgtatgatttccaaggactctaccagtcagtggttctgatgtcatcgggtggaggtggtgttctatacctaaaggatgacctgctccagaaacagcaccagcacagcatgtattttcttctcttctgaaagttctggcttgtagacccctcccctcctttgcaaaggtatgggatagaggggtcagatgcagatctctactgtaaaatgggctccctggtatctcctgtcttccctactgctccaaaccctaaattttggttgtacattttatttgaaaggaaaataaattttttttttgggcc

SEQ ID NO: 4084 - DNA, 1419 bp, Homo sapiens
gggatgctctgatggccgggcctgcggcgctgagcgcggcggcggcggctgctctggcggccgccctgctcctgctgcgtcgtgaggacccggggccgggggctggccccagcatggccgaaacagaagccctgtcgaagcttcgggaagacttcaggatgcagaataaatccgtctttattttgggcgccagcggagaaaccggcagagtgctcttaaaggaaatcctggagcagggcctgttttccaaagtcacgctcattggccggaggaagctcaccttcgacgaggaagcttataaaaatgtgaatcaagaagtggtggactttgaaaagttggatgactacgcctctgcctttcaaggtcatgatgttggattctgttgcctgggtaccaccagagggaaagctggggcggagggatttgttcgtgttgaccgagattatgtgctgaagtctgcagagctggcaaaagctggagggtgcaaacatttcaacttgctatcctctaaaggagctgataaatcaagcaattttttatatctacaagttaagggagaagtagaagccaaggttgaagaattaaaatttgatcgttactctgtatttaggcctggagttctgttatgtgataggcaagaatctcgcccaggtgaatggctggttagaaagttctttggctccttaccagactcttgggccagtgggcattctgtgcctgtggtgaccgtggttagagcaatgctgaacaatgtggtgagaccaagagacaagcagatggaactgctggagaacaaggccatccatgacctggggaaagcgcatggctctctcaagccatgaccacattggagaaatggtttttattgtcaaccttaacacccatcaccaaatcggtaatttcagggtctaaaaaaagtcagcatgttttaactttgttgttttactatcctcaggcatccattccaatcaagaaatgatggtgctctgcatcagtggttcagagcctggttatacatatagatcactcagggagctttggaaaaataaagatttgtcagccctatctcaaacttgaatcaaaatttctggggtgtgggcacaataatctgtaattttctttgtttatacttcccctgatgccactggttccgatgccactggctggggggcctgctttgaaatgcttgtctgcagagtcacagcagccatgaaaaccttatgaccgtgcaaatgagctctgctctaaaattgttgacattcatgtctctgagttacaaaagtgctaattcactacatgtaattgtgtaagtaaacattgtgcctttactacttctttatgtaatagaagttatatacctaagcttatataatacatggggaggattaaataaaggaataaagatgaatggacaactcc

SEQ ID NO: 4085 - DNA, 2281 bp, Homo sapiens
  misc_feature (258)..(258): n is a, c, g, or t
gtttaggcccaaagtggtgtcggagcagcgcctattagtgtcatcctcaccgtcacggccggcgcctcctcctggattcattcactcgctcttttcattcacgaaggtagtgaggcctagtggaaagccatggagagcgctctccccgccgccggcttcctgtactgggtcggcgcgggcaccgtggcctacctagccctgcgtatttcgtactcgctcttcacggccctccgggtctggggagtggggaatgaggcngggggtcggcccggggctcggagaatgggcagttgtcacaggtagtactgatggaattggaaaatcatatgcagaagagttagcaaagcatggaatgaaggttgtccttatcagcagatcaaaggataaacttgaccaggtttccagtgaaataaaagaaaaattcaaagtggagacaagaaccattgctgttgactttgcatcagaagatatttatgataaaattaaaacaggcttggctggtcttgaaatcggcatcttagtgaacaacgtgggaatgtcgtatgagtatcctgaatactttttggatgttcctgacttggacaatgtgatcaagaaaatgataaatattaatattctttctgtttgtaagatgacacaattggtactgcctggcatggtggaaagatccaaaggggctattctgaacatttcatctggcagtggcatgctccctgtcccactcttgaccatctattctgcaaccaagacttttgtagatttcttctctcagtgcctccatgaggagtataggagcaagggcgtctttgtgcagtatgtaatagattagcacatatacattgtccagccatagtaacaagatatctatatcttgttataattataatggtcgtatacccaagaactttaaaatctacctataaataaaaacaacactataataaaacattaaatcatatgcttcaatttagcccaaattgtaggctataattacatatctctctcattctgtttccctagggctcgataatctcaaacctgccttcttggatttatttgaaaatagtcatgaatatgaacaagtctacacgggctcactatctgaagaaaaccaagaagaactaagcattgataactgcattgtaacttggccagatgctccagcatatgcacgttcactgcaaagcaccctactggttttgaaaatctgaccttgtcatttcaatagttattaacatgactaaatattatcttaattaagaggaaaatagaagttgcttttaggggtttctgacatatattctggatactatccgaggtaattttgaagtttaatataaatgctcatatcaaatgaatatagaactaatattgtcgggaacacctaatagaaaggaatactattatagcaaatcacagaatgatagactcaagcataaaacttggcagttttatctgcttcaaaatgccattgatcattattcctgtattttctctgaaactgattataaaaaccaatgtccagctactcttttgtttttgacacttgaagaaatggagatcgatttgatttgtttataagcagacacactgcaatttacaaagatctctttacggttttataaaattatcttccagtttgtacatttatatggaattgttctttatcaagggtagctaatgacatgaaaataattgtgaaatatggaattatttctgacacatgaagcccactaaactatgctttcttataatgcatatttcttctcagtttaaatgtatgtaaatatcgaagctatatggtatgatttataaagataaatgggccaaagtgtacattgagactggcagccatctatggtaccactgaaaccctgacccagaaaagtggcttgcttggacacccagctgcctttgtttctgcattaaaccaatattgatcacacatatgacacaggctagtcctataaaagtaatgacttcatagaaatggcattataatttttaagttgatactctacaggtagctattgatataattagttttaataaaacatgctgcaaccatggtatacaacaaaaatacatttctttggtgattgaaattaaggccgtatttacaatgacttaatataagactgacttttatcctgcttcataacttgtatggagaactcaccaagaaagaattcaatactgtgaaatatgcagcaagaagattggtctttacctaggctgtgtttcctaagctctgagttttcagcaccagtagatttgtatt

SEQ ID NO: 4086 - DNA, 976 bp, Homo sapiens
gcagcggaggcggaccgcagtcgagtctgcagagtgttgggtctgtagccagcaaattacttcatcatctagattatccattcagttgatcctaattagcaaggataacaagaatcgtccgcactaaagtcccctgcagcgtgaccatgtcgagaccccggaagaggctggctgggacttctggttcagacaagggactatcaggaaaacgcaccaaaactgagaactcaggtgaggcattagctaaagtggaggactccaaccctcagaagacttcagccactaaaaactgtttgaagaatctaagcagccactggctgatgaagtcagagccagagagccgcctagagaaaggtgtagatgtgaagttcagcattgaggatctcaaagcacagcccaaacagacaacatgctgggatggtgttcgtaactaccaggctcggaacttccttagagccatgaagctgggagaagaagccttcttctaccatagcaactgcaaagagccaggcatcgcaggactcatgaagatcgtgaaagaggcttacccagaccacacacagtttgagaaaaacaatccccattatgacccatctagcaaagaggacaaccctaagtggtccatggtggatgtacagtttgttcggatgatgaaacgtttcattcccctggctgagctcaaatcctatcatcaagctcacaaagctactggtggccccttaaaaaatatggttctcttcactcgccagagattatcaatccagcccctgacccaggaagagtttgattttgttttgagcctggaggaaaaggaaccaagttaactgagatactgctgctggaatgggcgagacattgctgcaaagaagtcaagcttttttcagacaaaaggtgtgagggggcttgcttggtatgcttacctgggcttgtgtacctcagtggtttttgtgtacttttttcaataaaatatcaaagt

SEQ ID NO: 4087 - DNA, 1465 bp, Homo sapiens
gacgcgaggctctgcggagaacaggagtcagactgtaggacgacctcgggtcccacgtgtccccggtactcgccggccggagcccccggcttcccggggccgggggaccttagtggcacccacacacagcctactttccaagcggagccatgtttggtaacggcaatgcggctgcaacggcggtgagtgctgagccggtgaccagcacactttgggcttctggacgatccgtgcagcgattggccccaggttgccatcctcagttgtttattggaagaaaacagcccaaagatgagagtgattcgcgtgggtacccgcaagagccagcttgctcgcatacagacggacagtgtggtggcaacattgaaagcctcgtaccctggcctgcagtttgaaatcattgctatgtccaccacaggggacaagattcttgatactgcactctctaagattggagagaaaagcctgtttaccaaggagcttgaacatgccctggagaagaatgaagtggacctggttgttcactccttgaaggacctgcccactgtgcttcctcctggcttcaccatcggagccatctgcaagcgggaaaaccctcatgatgctgttgtctttcacccaaaatttgttgggaagaccctagaaaccctgccagagaagagtgtggtgggaaccagctccctgcgaagagcagcccagctgcagagaaagttcccgcatctggagttcaggacgggggaaacctcaacacccggcttcggaagctggactattatctcgagttcagtgccatcatcctggcaacagctggcctgcagcgcatgggctggcacaaccgggtggggcagatcctgcaccctgaggaatgcatgtatgctgtgggccaggaaggaagctgcagtgtgccagtagccgtgcatacagctatgaaggatgggcaactgtacctgactggaggagtctggagtctagacggctcagatagcatacaagagaccatgcaggctaccatccatgtccctgcccagcatgaagatggccctgaggatgacccacagttggtaggcatcactgctcgtaacattccacgagggccccagttggctgcccagaacttgggcatcagcctggccaacttgttgctgagcaaaggagccaaaaacatcctggatgttgcacggcagcttaacgatgcccattaactggtttgtggggcacagatgcctgggttgctgctgtccagtgcctacatcccgggcctcagtgccccattctcactgctatctggggagtgattaccccgggagactgaactgcagggttcaagccttccagggatttgcctcaccttggggccttgatgactgccttgcctcctcagtatgtgggggcttcatctctttagagaagtccaagcaacagcctttgaatgtaaccaatcctactaataaaccagttctgaagg

SEQ ID NO: 4088 - DNA, 3403 bp, Homo sapiens
tccagcctgggtgacagaacgagactctgtctgaaaaaaaaaaaaggaggaatgatactacctgttaatgatactacctgttaggattattggggtattaaatgagatgatttgacaaagtgccatttaaagtatatagcattagataaatattttatcttttgtggactttaacaaatagtttattgatggaaattttttaaaaaagcttttaagttacacattttaagttcctgctactgaaagcaggattaactagtctgtagaataatagtaattttttaattttgtctccttagctcattacctaaaggacttattgtaaataagctatttaagatcttaagaaatactgtatttttttaaatggaaggctaagaaaaacataaacagcctaagcatgtgcattaaaactttgttgacttataagattattcaaaatatgttattttaattttggaattatattgtttactttaggcagcagaacttgctgaattcactgccaagattgcacttctagaggaagccaagaagaaaaaggaagaggaagctactgagtggcaacacaaagcttttgcagcccaggaagacttggaaaagaccaaagaagagttaaaaactgtgatgtctgccccccctccacctccaccaccaccagtcattcctccaacagaaaacgaacatgatgaacacgatgagaataatgctgaagctagtgctgaattatcaaatgaaggggtaatgaaccatagaagcgaggaagaacgtgtaaccgaaacacagaaaaatgagcgtgttaagaagcaacttcaggcattaagttcagaattagcccaagccagagatgaaaccaagaaaacacaaaatgatgttcttcatgctgagaatgttaaagcaggccgtgataagtacaagactctgcgacagattcgacaaggcaatacaaagcagcgtatcgatgagtttgaagcaatgtgagagctgttattttgcatatatgttcttcataagctgaaccaccaacagagaaaagcaggcctttgcagatatgatggaatgcatcccaccttgccaaagcacttacaccagtttgactgtgctagctaaaagacaaatttaaggggagctcttcaacattaaggcagtatgatatcatgcttggttttcttttttcttttggtccagggaatggagaatggtgttccattgcctcttttcacattttttttctttttcttttttttttctgttgaagattaacactaattatcacgtctgacaaatgtgtatgtgtggtttcagttctgtgtacattttaaaggataatggtgaacattttaatgggtttcccttgccctttccatatttaacctatttccacattctctctcactcacattttctcagtgtgcccttctcttatctgccatgtccatagccataattccaccatcatacagatcaggcagtgtttaaaatgatggtaggtagcacagtggacagtctttgatcatcatgtagaatatggctatgaatcaggaaagagattagaacatttaataatgtatgtacagctggtgcttagtttttttttaatctaaatttaattaccttattggatatttgatatttggttatttaatcacagtcatctttaacagcttacactgattggtgttttatctcctgtgatcctttgatggctttttttgcctaccatttcacagaggtttagacagcagtagtagctccctaggagagtttactgatgaaacagcctctgcaagattttaaaagttttgttcttttatagactgatttagaaaaacaaatgattagttaaaaaaagaaaatatacatttgttggtaactaatgttattttttaaaacctggaccttttctggaagggcagcatataaaaacatcagtcccgaggaggggacaacaatactacctcactactacatctgtgatgactggttgttcaaacacaatggagtgtgtaaggtatatgttttataattcataaccatagcctcgatcatcaagaaatactttcgaaatttcattttccttcagaatatcttaagagtgctaaatttttaactgcctttttgtcgagtcaaactgtgggattctgatttgtattaaaattgtaagctcctcactggtatactatcatcctggaggggtgttgtatggctgagcaagagagagagagaatgagagagagactgtgtgtgtgtgtgtgtgtgtgtgtgtgtgtactctgtgtgtgtatgagagagagaaatgctaaccttgtagcatgtgaagaatgtctgtaccttgatacgatagttacataatcagtatatttggtttctagatcactgtgcttattttgtttcaatctctgactaaaaatacttaaatttggtttgttaattcttattttagaaattataattttagtttatattaatttcggttatagcttactgaagaaatctttccagttagaaggaggttctaatattcacatgttctaatactttgtttattgtaaaacagctaaatttggagatacgtaaagccttgttttctctgtgtggttcagctactttccatttggtattacacagtcaaatttacatttatctattaaaattgccattttattaaacattttcatgcacagtagattcaagttgtgtctgaaaatatctcttgtgcttttttgattttgctgactttaaaaggattaatctgggcagacattatgtaaaagaaaggttgcgtttaatatattttttgaactttgtaggacaaaacatagctggttaaccttgaagtgactgttgtaccatggttgtgcacatgcttcagaatcctatggaagagaatattcctacttgcagtacatcaaaggaatggatggtggaccctactattcatgttttgagacataaatgttcactttaaagcaattgcataatagataaaaacctgaactttcattggatttttgttaattttcctcattttgaattatgtgcactaccatagctacatcagtttgatacagtattgaaaaattatcagttatattttgctgtttatgatctatttgtagattaggattaaaatggatttaatccatttttaaggctgtgtgaatttttctaaacaagaaccatttgcaatatggatttcttagagattaaaccaattataacttattagcagtcgcgagcacatgttcatatagtcaatgtaaaaatacactaatgagtatttggtaaatcccagtaggcttttaccattagcataattttgtgttgtacaattaagttacaattacatctctaattttggataatattcattggttaacaataaagtgacaaaagctcatgc

SEQ ID NO: 4089 - DNA, 1364 bp, Homo sapiens
gaggatccgaacccaggggtggggggtggaggcggctcctgcgatcgaaggggacttgagactcaccggccgcacgccatgagggccctgtgggtgctgggcctctgctgcgtcctgctgaccttcggggtcggtcagagctgacgatgaagttgatgtggatggtacagtagaagaggatctgggtaaaagtagagaaggatcaaggacggatgatgaagtagtacagagagaggaagaagctattcagttggatggattaaatgcatcacaaataagagaacttagagagaagtcggaaaagtttgccttccaagccgaagttaacagaatgatgaaacttatcatcaattcattgtataaaaataaagagattttcctgagagaactgatttcaaatgcttctgatgctttagataagataaggctaatatcactgactgatgaaaatgctctttctggaaatgaggaactaacagtcaaaattaagtgtgataaggagaagaacctgctgcatgtcacagacaccggtgtaggaatgaccagagaagagttggttaaaaaccttggtaccatagccaaatctgggacaagcgagtttttaaacaaaatgactgaagcacaggaagatggccagtcaacttctgaattgattggccagtttggtgtcggtttctattccgccttccttgtagcagataaggttattgtcacttcaaaacacaacaacgatacccagcacatctgggagtctgactccaatgaattttctgtaattgctgacccaagaggaaacactctaggacggggaacgacaattacccttgtcttaaaagaagaagcatctgattaccttgaattggatacaattaaaaatctcgtcaaaaaatattcacagttcataaactttcctatttatgtatggagcagcaagactgaaactgttgaggagcccatggaggaagaagaagcagccaaagaagagaaagaagaatctgatgatgaagctgcagcaagacgaagatgaagaaatggatgtgggaacagatgaagaagaagaaacagcaaaggaatctacagctgaaaaagatgaattgtaaattatactctcaccatttggatcctgtgtggagagggaatgtgaaatttacatcatttctttttgggagagacttgttttggatgccccctaatccccttctcccctgcactgtaaaatgtgggattatgggtcacaggaaaaagtgggttttttagttgaattttttttaacattcctcatgaatgtaaatttgtactatttaactgactattcttgatgtaaaatcttgtcatgtgtataaaaataaaaaagatcccaaata

SEQ ID NO: 4090 - DNA, 1740 bp, Homo sapiens
tttggttttctgtttctgtgttaactcacttaggatactggcctccagctgcatccatgttgctgcagaggacatgatttcattcttttttatggctgcataatacttcatgggtgctgtgccgttcctggtcagtgccacctctggcaccactgtgctaggggcctttgaccccctggaggcaattgctgatgtgtgccagcgtcatgggctatggctgcatgtggatgctgcctggggtgggagcgtcctgctgtcacagacacacaggcatctcctggatgggatccagagggctgactctgtggcctggaatccccacaagctcctcgcagcaggcctgcaatgctctgcacttcttctccaggatacctcgaacctgctcaagcgctgccatgggtcccaggccagctaccttttccagcaggacaagttctacgatgtggctctggacacgggagacaaggtggtgcagtgtggccgccgtgtggactgtctgaagctgtggctcatgtggaaggcacagggcgatcaagggctggagcggcgcatcgaccaggcctttgtccttgcccggtacctggtggaggaaatgaagaagcgggaagggtttgagctagtcatggagcctgagtttgtcaatgtgtgtttctggttcgtaccccccagcctgcgagggaagcaggagagtccagattaccacgaaaggctgtcaaaggtggcccccgtgctcaaggagcgcatggtgaaggagggctccatgatgattggctaccagccccacgggacccggggcaacttcttccgtgtggttgtggccaactctgcactgacctgtgctgatatggacttcctcctcaacgagctggagcggctaggccaggacctgtgagccttctctgtcttgctgccggccttgataccacccctcacccgcagagtcactgcattccctcccagcctttgaggccgggtgcagtggctcacgcctgtaatcccagcactttgggaggccgaggcgggtggatcacttgaggtcaggagttcgagaccagcctggccaataaggtgaaaccctgtctctactaaaaatacaaaaattagccgagcatggtggcctgtgcctgtaaacccagctactcaggaggttggggcagaattgcttgaacccagggggcagaggttgcagtgagccgagattgcacccctgcactccaggctgggcaacagtacgagactctgttccaaaaaaaataaaaaagaacagcctttttaggccacagtgacctgcgcaatgtttatatgctttgacctactaactttctcctaactaaatatttgattttaggagagtgtttaaataaattacagtatgtctatatgatgaaatgttattttgccattaaaattttgtttacaaagataatttttattgacataaaaataactttaatgtaatttatgttgaaaaagctgaatacaagtctttatatagagtaatatttgagctgtgttcaaaaatacataggaaaagactgataaaatgaaatatggcaaaatgttaatagttttccctggaataggataataggcaattttaaaacagactcctttaaaaaaacaaacaaacaaaaaaaacatagacttctttatatcttttgagctccctcccttttattatgtaatgaatatgtgttgcttttgtaataggaaaataataaagttaaaatttcaactgca

SEQ ID NO: 4091 - DNA, 6051 bp, Homo sapiens
gttctggcgcccggagcgcggccatgtgaaccgcttgtaccccggggagagacgagccccgagcccggctggacgccgctgcctcagaaatggaggcaaacgaccattttaactttactggccttccccctgcacctgctgcctcaggactgaaaccctctccttcctcaggggagggcctctacactaacgggtctcccatgaacttcccccagcaagggaaaagtttgaatggggatgtgaatgttaatggcttatctactgtatctcacactactacttcagggattttgaactctgctccccactcctccagcacctcacacctccatcaccccagcgtggcctacgactgtctctggaactactcacagtacccatctgccaatcctggcagcaacctcaaggacccaccccttctctcccagttctcggggggacaatacccactcaacggcatccttgggggcagccggcaaccttcatccccaagtcataacactaaccttcgggctgggagccaagagttctgggccaacggtacccagagtcccatggggcttaactttgattcacaagaactgtatgattcctttcctgaccagaattttgaggtgatgcccaatggaccccctagttttttcacctccccacagacttctcctatgttgggatctagcattcaaacctttgcaccctcccaggaggtaggcagtggtatccatcctgatgaggcagcagaaaaggagatgacttcagttgtggcagagaatggcactggcttggtaggcagcttggagctggaagaagagcagccagaactgaagatgtgtggctacaatggctctgtcccttctgtggaatcgttacaccaagaggtctcagtcctggtccctgaccccacagtgagctgtttagatgatccttcacatcttcctgatcaactggaagacactccaatcctcagtgaagactctctggagcccttcaactctctggcaccagagccagtgagtggaggactatatggtattgatgacacggagctgatgggtgcagaggacaagctgcctcttgaggacagccctgtgatttctgcccttgattgcccttccctcaataatgctactgccttcagtctcctggcagatgatagtcaaacatcaacctctatctttgccagtcccacctctccacctgtcctaggggagtctgtcctgcaagataacagctttgacctgaataatggtagtgacgctgaacaggaagaaatggaaactcaatcttcagacttcccaccatccctgacccagccagctcctgatcagtcatccactattcagctacatccagcaacctcaccagcagtctcgccaacaacctccccagcagtctccctagtggtttctccagcagcctccccagaaatctctccagaagtttgtcccgcagcttctacagttgtctctccagcagtcttctcagtggtctctccagcttcctcagcagtcctcccagcagtctccttagaagtcccgttgacggcttcagtgacatccccaaaagcctctcccgtaacttccccagcagctgcctttccaacagcctccccagcaaataaggatgtcagcagctttctagaaaccactgctgacgtggaagagatcactggagaaggactcactgcttctggtagtggtgatgtcatgaggagacgtattgctaccccagaagaagttcgtcttcccctccaacatgggtggcggagagaggtgcgcatcaagaagggcagccaccgatggcagggggagacctggtattatggcccctgtgggaagaggatgaagcaatttccagaagtgatcaagtacctgagccgcaacgtggtacacagtgtccgccgagagcacttcagcttcagtccccgtatgcctgttggagatttctttgaagaaagagacacgccagagggcttgcagtgggtgcagctctcagcagaggagatcccgtcgaggattcaggcaattactggcaaacggggtcgacctcgaaacactgagaaggctaagactaaggaagtccccaaggtgaaacggggtcgaggtcggccacctaaggtcaaaatcactgagctattgaacaagacagacaaccgccccctaaagaaactggaggcccaagaaacattgaatgaggaggataaagcaaagattgctaaaagcaagaagaagatgaggcagaaggttcaacggggagagtgtcagactactatccaagggcaggccagaaataagcggaaacaagagaccaagagcttaaagcagaaggaagctaagaagaaatccaaggctgagaaagaaaaaggaaagacaaagcaggaaaaactgaaggaaaaagtcaagagggaaaagaaggagaaggtaaaaatgaaggaaaaggaggaggtgaccaaagccaagccagcctgtaaagcagataagaccctggccacacagaggcgcttggaggaacggcagaggcagcagatgatcttggaggaaatgaagaagccgacagaggatatgtgtctgactgaccaccagcccctgcctgacttctcacgagtccctggtctgacattgcccagtggagccttctcagactgcttgaccattgtggagttcctgcatagctttggcaaggtgctgggctttgatcctgccaaagatgtgcctagcctgggggtcctgcaggagggactcctgtgtcaaggtgacagcttgggtgaggtgcaagacctgctggtcaggctgctgaaggctgcactccatgatcctggctttccctcctactgtcagtccctaaagatcttgggggagaaggtgtctgagatcccactgacaagagacaatgtgtcagagatcctgcgctgcttccttatggcatatggagtagagccagccctctgtgaccgcctgcgcacccagccttttcaggcccagccaccccagcagaaggctgctgtcctggccttccttgtgcatgagctcaatggctccaccctcatcatcaagtgagattgacaagactctggagagtatgtccagctacaggaaaaacaagtggattgttgaaggccggctccggaggctgaaaactgttctggccaagcgaactgggcggtctgaagtagagatggaagggccagaggaatgcctgggacggaggcgcagttctcggatcatggaggagaccagtggcatggaagaagaggaagaagaggagtctatagcagctgtccctggccgcaggggtcgaagagatggagaggttgatgccacagcatctagcatcccagagctagagcgccagatagaaaaactcagcaagcgtcagcttttctttcgcaaaaagctgcttcactcatcccagatgcttcgggcggtctccctgggtcaggaccgctacagacgtcgctactgggtattgccgtatttggctggtatctttgtagaaggaacagaggggaacttagttcctgaggaggtgataaagaaggaaactgactccttaaaagtggcagcccatgcgtcactcaaccctgccctcttctctatgaagatggagttagctggctccaacaccactgccagttctcctgcccgggcccgaggccgacctcgaaaaactaagcccgggtctatgcaacctaggcatcttaagtcccctgtcaggggtcaggattcagaacagccccaggcccagcttcagcctgaggctcagcttcatgctcctgcccagccccagcctcagcttcagcttcagcttcagtcccataaggggttcctggagcaagaaggctcccctttgtcactgggtcagagccagcatgacctcagccagtcagccttcctgtcttggctgagccagactcagagccatagctccctgttgagcagctcagtcctcacacctgatagcagtccgggaaaactagacccagctccatcacaacccccggaggagccagagcctgatgaggcagaatccagccctgatcctcaagcactctggtttaacatctcagcccagatgccctgcaatgctgcccccacaccgccccctgcagtttctgaggaccaacccactccctcccctcagcagcttgcctcctccaagccaatgaatagacctagtgctgccaacccttgttctccagtgcagttctcttccacgcccttggctgggttggcccctaagaggcgagcaggagaccctggagaaatgccacagagtcccacagggctgggacagcccaaacggagagggagacctcccagtaagttcttcaaacagatggaacagcgttacctaacccagctgacagcccagcctgtcccacctgagatgtgctcaggctggtggtggatacgagatcctgagatgttggatgccatgctcaaggccctacacccccgaggtatccgggagaaggcacttcacaaacaccttaacaagcacagggacttcttgcaggaagtctgcctgcggccctcagctgaccccatctttgagcccaggcaactacctgcctttcaagaagggattatgagctggtcccccaaagagaagacatacgagacagacctagcagtgcttcaatgggtagaggagctggagcagcgggttatcatgtctgatctgcagattcggggctggacatgtcctagcccagactctacccgtgaagacttggcctactgtgagcacctctccgactcccaggaggatatcacctggcgaggtcggggcagggagggactggcacctcagcgtaaaactaccaaccctttggacctggctgtgatgcggctggctgccctggaacagaatgtagaacggcggtacctgcgggagcccctctggccaactcatgaggttgtgctggagaaggccctgcttagcacacctaatggtgcccctgagggcaccactacagagatatcatatgagatcacccctcgcattcgtgtctggcgccagaccctcgagcggtgccggagcgcagcccaggtgtgcttgtgcctgggccagctggagaggtccattgcctgggagaagtctgtcaacaaagtgacatgtctagtctgccggaagggtgacaatgatgagtttcttctgctttgtgatgggtgtgaccgtggctgccacatttactgccatcgtcccaagatggaggctgtcccagaaggagattggttctgtactgtctgtttggctcagcaggtggagggagaattcactcagaagcctggtttcccaaagcgtggccagaagcggaaaagtggttattcgctgaacttctcagagggtgatggccgccgacgccgggtactgttgaggggccgagaaagcccagcagcagggcctcggtactcggaagaagggctctccccctccaagcggcggcgactctctatgcggaaccaccacagtgatctcacattttgcgagattatcctgatggagatggagtcccatgatgcagcctggcctttcctagagcctgtgaacccacgtttggtgagtgggtaccggcgcatcatcaaaaatcctatggatttttccaccatgcgggagcggctgctcaggggagggtacaccagctcagaggagtttgcggctgatgccctcctggtatttgacaactgccagactttcaacgaggatgactctgaagtaggcaaggctgggcacatcatgcgccgcttcttcgagagccgctgggaggagttttatcagggaaaacaggccaatctgtgaggcaagggaggtggggagtcaccttgtggcatctccccccaccttccaaacaaaaacctgccattttcacctgctgatgctgccctgggtccagactcaagtcagatacaaccctgatttttgaccttgcccttggcagtgccccacatcctcttattcctacatccctttctcccttccctcctcttgctcctcaagtaagaggtgcagagatgaggtccttctggactaaaagccaaaaaaagaaag

SEQ ID NO: 4092 - DNA, 2374 bp, Homo sapiens
agctcatcaacgcaattgcaactccggctggagccccggacctgcaagcctgggtgtccgtgggtccgtctgcccagccatctgctggtggcacctctccctcctgccgcctccctcggtgaaccccaccttgcagaagtgcagctcgcccggagcagcccaggagctcagcatgcgtcccccaggcttcaggaacttcttgctgctggcgtcctcccttctctttgctgggttgtcagctgttcctcaaagcttctcgccatctctgaggagctggccgggcgccgcctgcaggctgtcccgggccgagtcggagcggcgtctgcatctgccacgtgactgagccgggcatgttcttcgggcccctgtgtgagtgccatgagtgggtgtgcgagacctacgacgggagcacctgtgcaggccatggtaagtgtgactgtggcaagtgcaagtgtgaccagggatggtatggggatgcttgccagtacccaactaactgtgacttgacaaagaagaaaagtaaccaaatgtgcaagaattcacaagacatcatctgctctaatgcaggtacatgtcactgtggcaggtgtaagtgtgataattcagatggaagtggacttgtgtatggtaaattttgtgagtgtgacgatagagaatgcatagacgatgaaacagaagaaatatgtggaggccatgggaagtgttactgtggaaactgctactgcaaggctggttggcatggagataaatgtgaattccagtgcgatatcaccccctgggaaagcaagcgaagatgcacgtctccagatggcaaaatctgcagtaacagagggacttgtgtatgtggtgaatgtacctgtcacgatgttgatccgactggggactggggagatattcatggggacacctgtgaatgtgatgagagggactgtagagctgtctatgaccgatattctgatgacttctgttcaggtcatggacagtgtaattgcggaagatgtgactgcaaagcaggctggtatgggaagaagtgtgagcacccacagtcctgcacgctgtcagctgaggagagcatcaggaagtgccagggaagctcggatctgccttgctctgggaggggtaaatgtgaatgtggcaaatgcacctgctatcctccaggagatcgccgggtgtatggcaagacttgtgagtgtgatgatcgccgctgtgaagacctcgatggtgtggtctgtggaggccacggcacatgttcctgtggtcgctgtgtttgtgagagaggatggtttggaaagctctgccaacatccgcggaagtgtaacatgacggaagaacaaagcaagaatctgtgtgaatcagcagatggcatattgtgctcggggaagggttcttgtcattgtgggaagtgcatttgttctgctgaagagtggtatatttctggggagttctgtgactgtgatgacagagactgcgacaaacatgatggtctcatttgtacagggaatggaatatgtagctgtggaaactgtgaatgctgggatggatggaatggaaatgcatgtgaaatctggcttggctcagaatatccttaacaattacatgagagaggtctggattcttattttttctgggccattagaacagataaatgcgaaggaaaccatgtatattcaccactaggacaggttaaaaagaccattgtatgtttttctatttctgaattacgaatgaaatccgagtacctattagaaatgagttatgcaaatttagatgcaaataacattagaaaaaaaagattcttccataattaacataagtggttcctaacgagagcaatttttccacccaaaagtcatttggcaacatctacagacaattttgattgtcacactgggtcgggtaggaaggtatgctgcagacatttggtgggtagaggccagggatgctgctgagcatcccgcagtgtacaggacagcccccaaacaaggaattatccagccccaaatgccaatagggctcaaactgagaaacattgagttatatggctattagaaatccacattcttacacaagaaagaccatattagaatctaaggaaaacatgcatattcacattaattaatcgatcagatttttccagaattccgtatcagtcaccattttaatatggggacaatgaagacaagcacacaggaggtagaatatcagagtggggctggatcaagggcaaaaactggtcattaagtcatctgacattaaatcatttagccactaagttatttgtctactctcactttaaactcaccaaagaagattctcttaaagaaattatgaaaaatgtacaatttaacattttaaataaatagtgacagaagtt

SEQ ID NO: 4093 - DNA, 1629 bp, Homo sapiens
cagagccgacagaccggagcgacagggagttgccagaagccccgcccctaggagtgatcggaaagcctcacccatccgggtgaggaacccggagggaccgcctccgggcggagcccgccgaccatggctacgcccctggtggcgggtcccgcagctctacgcttcgccgccgcggctagctggcaggttgtgcgcggacgctgcgtggaacattttccgcgagtactggagtttctgcgatctctgcgcgctgttgcccctggcttggttcgctaccggcaccacgaacgcctttgtatgggcctaaaggccaaggtggtggtggagctgatcctgcagggccggccttgggcccaagtcctgaaagccctgaatcaccactttccagaatctggacctatagtgcgggatcccaaggctacaaagcaggatctgaggaagattttggaggcacaggaaactttttaccagcaggtgaagcagctgtcagaggctcctgtggatttggcctcgaagctgcaggaacttgaacaagagtatggggaaccctttctggctgccatggaaaagctgctttttgagtacttgtgtcagctggagaaagcactgcctacaccgcaggcacagcagcttcaggatgtgctgagttggatgcagcctggagtctctatcacctcttctcttgcctggagacaatatggtgtggacatggggtggctgcttccagagtgctctgttactgactcagtgaacctggctgagcccatggaacagaatcctcctcagcaacaaagactagcactccacaatcccctgccaaaagccaagcctggcacacatcttcctcagggaccatcttcaaggacgcacccagaacctctagctggccgacacttcaatctggcccctctaggccgacgaagagttcagtcccaatgggcctccactaggggaggccataaggagcgccccacagtcatgctgtttccctttaggaatctcggctcaccaacccaggtcatatctaagcctgagagcaaggaagaacatgcgatatacacagcagacctagccatgggcacaagagcagcctccactgggaagtctaagagtccatgccagaccctggggggaagggctctgaaggagaacccagttgacttgcctgccacagagcaaaaggagaattgcttggattgctacatggaccccctgagactatcattattacctcctagggccaggaagccagtgtgtcctccgtctctgtgcagctccgtcattaccataggggacttggttttagactctgatgaggaagaaaatggccagggggaaggaaaggaatctctggaaaactatcagaagacaaagtttgacaccttgatacccactctctgtgaatacctacccccttctggccacggtgccatacctgtttcttcctgtgactgtagagacagttctagacctttgtgatagaactaaaatgctctctgtactctagtctcctgcctcctcagctctgcaagtagtttagtaggaatgaagtggaagtccaggcttggattgcctaactacactgctaaaaatatttgtaatccttaataattaaactttggatttgtt

SEQ ID NO: 4094 - DNA, 1015 bp, Homo sapiens
gcgtggaggtcgacgactccgtcgcagactacggacctgtctgggtctcagccgccaaagaccccgtccggtaggtgagtggctcactttgagggcaagccttctcggatcgaggcttcttcatggccgctcagatcgtgagcggccggggctgctctctttgcggaggatggcgtctaatgagcgcagttgattcgaggaagtactagccggacatcatgagtggctgtcgggtattcatcgggagactaaatccagcggccagggagaaggacgtggaaagattcttcaagggatatggacggataagagatattgatctgaaaagaggctttggttttgtggaatttgaggatccaagggatgcagatgatgctgtgtatgagcttgatggaaaagaactctgtagtgaaagggttactattgaacatgctagggctcggtcacgaggtggaagaggtagaggacgatactctgaccgttttagtagtcgcagacctcgaaatgatagacggtatgtgaagggtggatggctgcattgaacaattattgtaggggtagcatttaagattcaggagtcattagcagtgatgattttgggtcctgccgtataatctgttcttctattcccacgttagccagttgttcttgatgaatctatatgagtcatagaacacaaatctattgacggaagtcattagaatggcttgtgatatctgatggcttgaacttgcccacagttgaacacaagtgctgtcattgcatttcttccattgtgaatacgaattttcttcctcagaaatgctccacctgtaagaacagaaaatcgtcttatagttgagaatttatcctcaagagtcagctggcaggtttgttgaaatacagttttgagttattttgatgtggctttttaaaaaagttaatgggtagctaatgttgtattgttttattaaaagtagttttaaattaatggatttaatggaattgtaattttaaacatttaattaaatgtaat

SEQ ID NO: 4095 - DNA, 1789 bp, Homo sapiens
aggagcttaagacactcctggagagtagtgcacaccctcccatttgggctcgcgctgctgccgttaaggcgggaaccggcgcgatctccattccagcgcgaacctcatcaaccaccgtgcgcgcggatccagaggctcgcgctggcggcctgagcgagctcgcgccgagcccggatactgcgcctgcgccgcggcagaggctcgtctctaccgggtccgctctcctccgacaccccagcaacgccgactcctcacccctttgagccgcttgaccagggcactcttctgcccgctcttggctaggcctcgctgctccagtgcggccttcaggtcggtcacccgcagcgcctgaagaggcttcccgtccagagtcacctcctccagctccgccatcttgcgtgaggtactcgggtccgtcccgacggcttcgggcatcttcggtaatttccgccaacgcccttcgaacgtaccgagatgaccccgcccactgccatactctacccctcgattaccactcagaactccccgggttcctccggatgtcctcggatgtttccgtctccacatcgttaccaatcaattctttccatccgccctgcagcgccccttttctcgccctgctttcaggctcggttttcttcgtcttgccgaagctttgaatcgaatatattcggaaaccctcgaccctggtataaccataatcggagatgttcgtttatttccggacctagagatgaggcgctggggcgcttgggtgtttggggcgggtccgaggccggaagtgcgtgggctgccgggctggcccagcttagggttttcaggaaatttggaagctgccgcagtagttggagtctaaggactcgtgacaatcttcgggtgcccttcgagagaaaaggggaggtaagcggggtagaagtacctctatgggccgggtcagactcggtgtttgcggattaccttaatagggcaagccccccactccttaacgcaaacagcttctgccctctgtcctctgaatcatagccactcccatcttaggctttttttggggaggggcggggggctggtgcggaatcggaataacaagctccgtgggggtgcgcaagaagcatcgccgtgtcttcggacccagactatgaactgatctatgacgctgaacttgagtttgagtttgccttggaagccatgtggcaagattctgggaaagttcttccttgctccgcagaagagagtaagttcccttggaggaactgcttcctgtagggcaagaactggaaaatgcaagcgccctgaacttttttggtacttgaactaatattaattgtttaggggcttctttctttgtcactaccaatcctccaacttgatgcagaagaaacacaaacagtaaaataggtcacagacaaatagtttagagatttaagagatacgttagagatttaagagactgaaaactattaaagtcaaattggctgatctttccgttgcattcatgatgcaaaatcagtggcaaggtgccgggcgcggtggcttacgcctataatcccagcactttgggaggccgaggcgggcggatcacttgaggtcaggagttggagaccagtctggccaatatggtgaaaccccgtctctactaaaaatacaaacaaattagccgggcgtggtggcgtacgcctatagtcccagctactcgggaggctgaggcaggagaatcgcttgaacccaggaagcagtggttgagatcacgccattgcactacagcctgggtgacagagcaagactccgtctc

SEQ ID NO: 4096 - DNA, 2293 bp, Homo sapiens
aagcagttgttttgctggaaggagggagtgcgcgggctgccccgggctcctccctgccgcctcctctcagtggatggttccaggcaccctgtctggggcagggagggcacaggcctgcacatcgaaggtggggtgggaccaggctgcccctcgccccagcatccaagtcctcccttgggcgcccgtggccctgcagactctcagggctaaggtcctctgttgctttttggttccaccttagaagaggctccgcttgactaagagtagcttgaaggaggcaccatgcaggagctgcatctgctctggtgggcgcttctcctgggcctggctcaggcctgccctgagccctgcgactgtggggaaaagtatggcttccagatcgccgactgtgcctaccgcgacctagaatccgtgccgcctggcttcccggccaatgtgactacactgagcctgtcagccaaccggctgccaggcttgccggagggtgccttcagggaggtgcccctgctgcagtcgctgtggctggcacacaatgagatccgcacggtggccgccggagccctggcctctctgagccatctcaagagcctggacctcagccacaatctcatctctgactttgcctggagcgacctgcacaacctcagtgccctccaattgctcaagatggacagcaacgagctgaccttcatcccccgcgacgccttccgcagcctccgtgctctgcgctcgctgcaactcaaccacaaccgcttgcacacattggccgagggcaccttcaccccgctcaccgcgctgtcccacctgcagatcaacgagaaccccttcgactgcacctgcggcatcgtgtggctcaagacatgggccctgaccacggccgtgtccatcccggagcaggacaacatcgcctgcacctcaccccatgtgctcaagggtacgccgctgagccgcctgccgccactgccatgctcggcgccctcagtgcagctcagctaccaacccagccaggatggtgccgagctgcggcctggttttgtgctggcactgcactgtgatgtggacgggcagccggcccctcagcttcactggcacatccagatacccagtggcattgtggagatcaccagccccaacgtgggcactgatgggcgtgccctgcctggcacccctgtggccagctcccagccgcgcttccaggcctttgccaatggcagcctgcttatccccgactttggcaagctggaggaaggcacctacagctgcctggccaccaatgagctgggcagtgctgagagctcagtggacgtggcactggccacgcccggtgagggtggtgaggacacactggggcgcaggttccatggcaaagcggttgagggaaagggctgctatacggttgacaacgaggtgcagccatcagggccggaggacaatgtggtcatcatctacctcagccgtgctgggaaccctgaggctgcagtcgcagaaggggtccctgggcagctgcccccaggcctgctcctgctgggccaaagcctcctcctcttcttcttcctcacctccttctagccccacccagggcttccctaactcctccccttgcccctaccaatgcccctttaagtgctgcaggggtctggggttggcaactcctgaggcctgcatgggtgacttcacattttcctacctctccttctaatctcttctagagcacctgctatccccaacttctagacctgctccaaactagtgactaggatagaatttgatcccctaactcactgtctgcggtgctcattgctgctaacagcattgcctgtgctctcctctcaggggcagcatgctaacggggcgacgtcctaatccaactgggagaagcctcagtggtggaattccaggcactgtgactgtcaagctggcaagggccaggattgggggaatggagctggggcttagctgggaggtggtctgaagcagacagggaatgggagaggaggatgggaagtagacagtggctggtatggctctgaggctccctggggcctgctcaagctcctcctgctccttgctgttttctgatgatttgggggcttgggagtccctttgtcctcatctgagactgaaatgtggggatccaggatggccttccttcctcttacccttcctccctcagcctgcaacctctatcctggaacctgtcctccctttctccccaactatgcatctgttgtctgctcctctgcaaaggccagccagcttgggagcagcagagaaataaacagcatttctgatg

SEQ ID NO: 4097 - DNA, 1761 bp, Homo sapiens
gagcagcccagcgtgcccattccagcgcccgcgtccccgcagcatgccgcgcccccgcctgctggccgcgctgtgcggcgcgctgctctgcgcccccagcctcctcgtcgccctggatatctgttccaaaaacccctgccacaacggtggtttatgcgaggagatttcccaagaagtgcgaggagatgtcttcccctcgtacacctgcacgtgccttaagggctacgcgggcaaccactgtgagacgaaatgtgtcgagccactgggcctggagaatgggaacattgccaactcacagatcgccgcctcgtctgtgcgtgtgaccttcttgggtttgcagcattgggtcccggagctggcccgcctgaaccgcgcaggcatggtcaatgcctggacacccagcagcaatgacgataacccctggatccaggtgaacctgctgcggaggatgtgggtaacaggtgtggtgacgcagggtgccagccgcttggccagtcatgagtacctgaaggccttcaaggtggcctacagccttaatggacacgaattcgatttcatccatgatgttaataaaaaacacaaggagtttgtgggtaactggaacaaaaacgcggtgcatgtcaacctgtttgagacccctgtggaggctcagtacgtgagattgtaccccacgagctgccacacggcctgcactctgcgctttgagctactgggctgtgagctgaacggatgcgccaatcccctgggcctgaagaataacagcatccctgacaagcagatcacggcctccagcagctacaagacctggggcttgcatctcttcagctggaacccctcctatgcacggctggacaagcagggcaacttcaacgcctgggttgcggggagctacggtaacgatcagtggctgcagatcttccctggcaactgggacaaccactcccacaagaagaacttgtttgagacgcccatcctggctcgctatgtgcgcatcctgcctgtagcctggcacaaccgcatcgccctgcgcctggagctgctgggctgttagtggccacctgccacccccaggtcttcctgctttccatgggcccgctgcctcttggcttctcagcccctttaaatcaccatagggctggggactggggaaggggagggtgttcagaggcagcaccaccacacagtcacccctccctccctctttcccaccctccacctctcacgggccctgccccagcccctaagccccgtcccctaacccccagtcctcactgtcctgttttcttaggcactgagggatctgagtaggtctgggatggacaggaaagggcaaagtagggcgtgtggtttccctgcccctgtccggaccgccgatcccaggtgcgtgtgtctctgtctctcctagcccctctctcacacatcacattcccatggtggcctcaagaaaggcccggaagcgccaggctggagataacagcctcttgcccgtcggccctgcgtcggccctggggtaccatgtggccacaactgctgtggccccctgtccccaagacacttccccttgtctccctggttgcctctcttgccccttgtcctgaagcccagcgacacagaagggggtggggcgggtctatggggagaaagggagcgaggtcagaggagggcatgggttggcagggtgggcgtttggggccctctatgctggcttttcaccccagaggacacaggcagcttccaaaatatatttatcttcttcacggg

SEQ ID NO: 4098 - DNA, 6380 bp, Homo sapiens
gacggcacggggcggggcctcggggaccccggcaagcccgcgcacttggcaggagctgtagctaccgccgtccgcgcctccaaggtttcacggcttcctcagcagagactcgggctcgtccgccatgtccgccgcagacgaggttgacgggctgggcgtggcccggccgcactatggctctgtcctggataatgaaagacttactgcagaggagatggatgaaaggagacgtcagaacgtggcttatgagtacctttgtcatttggaagaagcgaagaggtggatggaagcatgcctaggggaagatctgcctcccaccacagaactggaggaggggcttaggaatggggtctaccttgccaaactggggaacttcttctctcccaaagtagtgtccctgaaaaaaatctatgatcgagaacagaccagatacaaggcgactggcctccactttagacacactgataatgtgattcagtggttgaatgccatggatgagattggattgcctaagattttttacccagaaactacagatatctatgatcgaaagaacatgccaagatgtatctactgtatccatgcactcagtttgtacctgttcaagctaggcctggcccctcagattcaagacctatatggaaaggttgacttcacagaagaagaaatcaacaacatgaagactgagttggagaagtatggcatccagatgcctgcctttagcaagattgggggcatcttggctaatgaactgtcagtggatgaagccgcattacatgctgctgttattgctattaatgaagctattgaccgtagaattccagccgacacatttgcagctttgaaaaatccgaatgccatgcttgtaaatcttgaagagcccttggcatccacttaccaggatatactttaccaggctaagcaggacaaaatgacaaatgctaaaaacaggacagaaaactcagagagagaaagagatgtttatgaggagctgctcacgcaagctgaaattcaaggcaatataaacaaagtcaatacattttctgcattagcaaatatcgacctggctttagaacaaggagatgcactggccttgttcagggctctgcagtcaccagccctggggcttcgaggactgcagcaacagaatagcgactggtacttgaagcagctcctgagtgataaacagcagaagagacagagtggtcagactgaccccctgcagaaggaggagctgcagtctggagtggatgctgcaaacagtgctgcccagcaatatcagagaagattggcagcagtagcactgattaatgctgcaatccagaagggtgttgctgagaagactgttttggaactgatgaatcccgaagcccagctgccccaggtgtatccatttgccgccgatctctatcagaaggagctggctaccctgcagcgacaaagtcctgaacataatctcacccacccagagctctctgtcgcagtggagatgttgtcatcggtggccctgatcaacagggcattggaatcaggagatgtgaatacagtgtggaagcaattgagcagttcagttactggtcttaccaatattgaggaagaaaactgtcagaggtatctcgatgagttgatgaaactgaaggctcaggcacatgcagagaataatgaattcattacatggaatgatatccaagcttgcgtggaccatgtgaacctggtggtgcaagaggaacatgagaggattttagccattggtttaattaatgaagccctggatgaaggtgatgcccaaaagactctgcaggccctacagattcctgcagctaaacttgagggagtccttgcagaagtggcccagcattaccaagacacgctgattagagcgaagagagagaaagcccaggaaatccaggatgagtcagctgtgttatggttggatgaaattcaaggtggaatctggcagtccaacaaagacacccaagaagcacagaagtttgccttaggaatctttgccattaatgaggcagtagaaagtggtgatgttggcaaaacactgagtgcccttcgctcccctgatgttggcttgtatggagtcatccctgagtgtggtgaaacttaccacagtgatcttgctgaagccaagaagaaaaaactggcagtaggagataataacagcaagtgggtgaagcactgggtaaaaggtggatattattattaccacaatctggagacccaggaaggaggatgggatgaacctccaaattttgtgcaaaattctatgcagctttctcgggaggagatccagagttctatctctggggtgactgccgcatataaccgagaacagctgtggctggccaatgaaggcctgatcaccaggctgcaggctcgctgccgtggatacttagttcgacaggaattccgatccaggatgaatttcctgaagaaacaaatccctgccatcacctgcattcagtcacagtggagaggatacaagcagaagaaggcatatcaagatcggttagcttacctgcgctcccacaaagatgaagttgtaaagattcagtccctggcaaggatgcaccaagctcgaaagcgctatcgagatcgcctgcagtacttccgggaccatataaatgacattatcaaaatccaggcttttattcgggcaaacaaagctcgggatgactacaagactctcatcaatgctgaggatcctcctatggttgtggtccgaaaatttgtccacctgctggaccaaagtgaccaggattttcaggaggagcttgaccttatgaagatgcgggaagaggttatcaccctcattcgttctaaccagcagctggagaatgacctcaatctcatggatatcaaaattggactgctagtgaaaaataagattacgttgcaggatgtggtttcccacagtaaaaaacttaccaaaaaaaataaggaacagttgtctgatatgatgatgataaataaacagaagggaggtctcaaggctttgagcaaggagaagagagagaagttggaagcttaccagcacctgttttatttattgcaaaccaatcccacctatctggccaagctcatttttcagatgccccagaacaagtccaccaagttcatggactctgtaatcttcacactctacaactacgcgtccaaccagcgagaggagtacctgctcctgcggctctttaagacagcactccaagaggaaatcaagtcgaaggtagatcagattcaagagattgtgacaggaaatcctacggttattaaaatggttgtaagtttcaaccgtggtgcccgtggccagaatgccctgagacagatcttggccccagtcgtgaaggaaattatggatgacaaatctctcaacatcaaaactgaccctgtggatatttacaaatcttgggttaatcagatggagtctcagacaggagaggcaagcaaactgccctatgatgtgacccctgagcaggcgctagctcatgaagaagtgaagacacggctagacagctccatcaggaacatgcgggctgtgacagacaagtttctctcagccattgtcagctctgtggacaaaatcccttatgggatgcgcttcattgccaaagtgctgaaggactcgttgcatgagaagttccctgatgctggtgaggatgagctgctgaagattattggtaacttgctttattatcgatacatgaatccagccattgttgctcctgatgcctttgacatcattgacctgtcagcaggaggccagcttaccacagaccaacgccgaaatctgggctccattgcaaaaatgcttcagcatgctgcttccaataagatgtttctgggagataatgcccacttaagcatcattaatgaatatctttcccagtcctaccagaaattcagacggtttttccaaactgcttgtgatgtcccagagcttcaggataaatttaatgtggatgagtactctgatttagtaaccctcaccaaaccagtaatctacatttccattggtgaaatcatcaacacccacactctcctgttggatcaccaggatgccattgctccggagcacaatgatccaatccacgaactgctggacgacctcggcgaggtgcccaccatcgagtccctgataggggaaagctctggcaatttaaatgacccaaataaggaggcactggctaagacggaagtgtctctcaccctgaccaacaagttcgacgtgcctggagatgagaatgcagaaatggatgctcgaaccatcttactgaatacaaaacgtttaattgtggatgtcatccggttccagccaggagagaccttgactgaaatcctagaaacaccagccaccagtgaacaggaagcagaacatcagagagccatgcagagacgtgctatccgtgatgccaaaacacctgacaagatgaaaaagtcaaaatctgtaaaggaagacagcaacctcactcttcaagagaagaaagagaagatccagacaggtttaaagaagctaacagagcttggaaccgtggacccaaagaacaaataccaggaactgatcaacgacattgccagggatattcggaatcagcggaggtaccgacagaggagaaaggccgaactagtgaaactgcaacagacatacgctgctctgaactctaaggccaccttttatggggagcaggtggattactataaaagctatatcaaaacctgcttggataacttagccagcaagggcaaagtctccaaaaagcctagggaaatgaaaggaaagaaaagcaaaaagatttctctgaaatatacagcagcaagactacatgaaaaaggagttcttctggaaattgaggacctgcaagtgaatcagtttaaaaatgttatatttgaaatcagtccaacagaagaagttggagacttcgaagtgaaagccaaattcatgggagttcaaatggagacttttatgttacattatcaggacctgctgcagctacagtatgaaggagttgcagtcatgaaattatttgatagagctaaagtaaatgtcaacctcctgatcttccttctcaacaaaaagttctacgggaagtaattgatcgtttgctgccagcccagaaggatgaaggaaagaagcacctcacagctcctttctaggtccttctttcctcattggaagcaaagacctagccaacaacagcacctcaatctgatacactcccgatgccacatttttaactcctctcgctctgatgggacatttgttacccttttttcatagtgaaattgtgtttcaggcttagtctgacctttctggtttcttcattttcttccattacttaggaaagagtggaaactccactaaaatttctctgtgttgttacagtcttagaggttgcagtactatattgtaagctttggtgtttgtttaattagcaatagggatggtaggattcaaatgtgtgtcatttagaagtggaagctattagcaccaatgacataaatacatacaagacacagaactaaaatgtcatgttattaacagttattaggttgtcatttaaaaataaagttcctttatatttctgtcccatcaggaaaactgaaggatatggggaatcattggttatcttccattgtgtttttctttatggacaggagctaatggaagtgacagtcatgttcaaaggaagcatttctagaaaaaaggagataatgtttttaaatttcattatcaaacttgggcaattctgtttgtgtaactccccgactagtggatgggagagtcccattgctaaaattcagctactcagataaattcagaatgggtcaaggcacctgcctgtttttgttggtgcacagagattgacttgattcagagagacaattcactccatccctatggcagaggaatgggttagccctaatgtagaatgtcattgtttttaaaactgttttatatcttaagagtgccttattaaagtatagatgtatgtcttaaaatgtgggtgataggaattttaaagatttatataatgcatcaaaagccttagaataagaaaagctttttttaaattgctttatctgtatatctgaactcttgaaacttatagctaaaacactaggatttatctgcagtgttgcagggagataattctgccttaaattgtctaaaacaaaaacaaaaccagccaacctatgttacacgtgagattaaaaccaattttttccccattttttctccttttttctcttgctgcccacattgtgcctttattttatgagccccagttttctgggcttagtttaaaaaaaaaatcaagtctaaacattgcatttagaaagcttttgttcttggataaaaagtcatacacttt

SEQ ID NO: 4099 - DNA, 2949 bp, Homo sapiens
attttgcggggctcaacggctcgcggagcggctacgcggagtgacatcgccggtgtttgcgggtggttgttgctctcggggccgtgtggagtaggtctggacctggactcacggctgcttggagcgtccgccatgaggagaagtgaggtgctggcggaggagtccatagtatgtctgcagaaagccctaaatcaccttcgggaaatatgggagctaattgggattccagaggaccagcggttacaaagaactgaggtggtaaagaagcatatcaaggaactcctggatatgatgattgctgaagaggaaagcctgaaggaaagactcatcaaaagcatatccgtctgtcagaaagagctgaacactctgtgcagcgagttacatgttgagccatttcaggaagaaggagagacgaccatcttgcaactagaaaaagatttgcgcacccaagtggaattgatgcgaaaacagaaaaaggagagaaaacaggaactgaagctacttcaagagcaagatcaagaactgtgcgaaattctttgtatgccccactatgatattgacagtgcctcagtgcccagcttagaagagctgaaccagttcaggcaacatgtgacaactttgagggaaacaaaggcttctaggcgtgaggagtttgtcagtataaagagacagatcatactgtgtatggaagcattagaccacaccccagacacaagctttgaaagagatgtggtgtgtgaagacgaagatgccttttgtttgtctttggagaatattgcaacactacaaaagttgctacggcagctggaaatgcagaaatcacaaaatgaagcagtgtgtgaggggctgcgtactcaaatccgagagctctgggacaggttgcaaatacctgaagaagaaagagaagctgtggccaccattatgtctgggtcaaaggccaaggtccggaaagcgctgcaattagaagtggatcggttggaagaactgaaaatgcaaaacatgaagaaagtgattgaggcaattcgagtggagctggttcagtactgggaccagtgcttttatagccaggagcagagacaagcttttgcccctttctgtgctgaggactacacagaaagtctgctccagctccacgatgctgagattgtgcggttaaaaaactactatgaagttcacaaggaactctttgaaggtgtccagaagtgggaagaaacctggaggcttttcttagagtttgagagaaaagcttcagatccaaatcgatttacaaaccgaggaggaaatcttctaaaagaagaaaaacaacgagccaagctccagaaattcatggagtatgtggcagaacaatgggagatgcatcgattggagaaagagagagccaagcaggaaagacaactgaagaacaaaaaacagacagagacagagatgctgtatggcagcgctcctcgaacacctagcaagcggcgaggactggctcccaatacaccgggcaaagcacgtaagctgaacactaccaccatgtccaatgctacggccaatagtagcattcggcctatctttggagggacagtctaccactcccccgtgtctcgacttcctccttctggcagcaagccagtcgctgcttccacctgttcagggaagaaaacaccccgtactggcaggcatggagccaacaaggagaacctggagctcaacggcagcatcctgagtggtgggtaccctggctcggcccccctccagcgcaacttcagcattaattctgttgccagcacctattctgagtttgcgcgagaactttcaaaggcttccaaatctgatgctacttctggaatcctcaattcaaccaacatccagtcctgagaagccctgatcagtcaaccagctgtggcttcctgtgcctagactggacctaattatatgggggtgactttagtttttcttcagcttaggcgtgcttgaaaccttggccaggttccatgaccatgggcctaacttaaagatgtgaatgagtgttacagttgaaagcccatcataggtttagtggtcctaggagacttggttttgacttatatacatgaaaagtttatggcaagaagtgcaaattttagcatatggggcctgacttctctaccacataattctacttgctgaagcatgatcaaagcttgttttatttcaccactgtaggaaaatgattgactatgcccatccctgggggtaattttggcatgtatacctgtaactagtaattaacatcttttttgtttaggcatgttcaattaatgctgtagctatcatagctttgctcttacctgaagccttgtccccaccacacaggacagccttcctcctgaagagaatgtctttgtgtgtccgaagttgagatggcctgccctactgccaaagaggtgacaggaaggctgggagcagctttgttaaattgtgttcagttctgttacacagtgcattgccctttgttgggggtatgcatgtatgaacacacatgcttgtcggaacgctttctcggcgtttgtcccttggctctcatctcccccattcctgtgcctactttgcctgagttcttctacccccgcagttgccagccacattgggagtctgtttgttccaatgggttgagctgtctttgtcgtggagatctggaactttgcacatgtcactactggggaggtgttcctgctctagcttccacgatgaggcgccctctttacctatcctctcaatcactactcttcttgaagcactattatttattcttccgctgtctgcctgcagcagtactactgtcaacatagtgtaaatggttctcaaaagcttaccagtgtggacttggtgttagccacgctgtttactcatacagtacgtgtcctgtttttaaaatatacaattattcttaaaaataaattaaaatctgtatacttacatttc

SEQ ID NO: 4100 - DNA, 3691 bp, Homo sapiens
cagaaatcactgtgttttcagctcagcggccctgtgacattccttcgtgttgtcatttgttgagtgaccaatcagatgggtggagtgtgttacagaaattggcagcaagtatccaatgggtgaagaagaagctaactggggacgtgggcagccctgacgtgatgagctcaaccagcagagacattccatcccaagagaggtctgcgtgacgcgtccgggaggccaccctcagcaagaccaccgtacagttggtggaaggggtgacagctgcattctcctgtgcctaccacgtaaccaaaaatgaaggagaactactgtttacaagccgccctggtgtgcctgggcatgctgtgccacagccatgcctttgccccagagcggcgggggcacctgcggccctccttccatgggcaccatgagaagggcaaggaggggcaggtgctacagcgctccaagcgtggctgggtctggaaccagttcttcgtgatagaggagtacaccgggcctgaccccgtgcttgtgggcaggcttcattcagatattgactctggtgatgggaacattaaatacattctctcaggggaaggagctggaaccatttttgtgattgatgacaaatcagggaacattcatgccaccaagacgttggatcgagaagagagagcccagtacacgttgatggctcaggcggtggacagggacaccaatcggccactggagccaccgtcggaattcattgtcaaggtccaggacattaatgacaaccctccggagttcctgcacgagacctatcatgccaacgtgcctgagaggtccaatgtgggaacgtcagtaatccaggtgacagcttcagatgcagatgaccccacttatggaaatagcgccaagttagtgtacagtatcctcgaaggacaaccctatttttcggtggaagcacagacaggtatcatcagaacagccctacccaacatggacagggaggccaaggaggagtaccacgtggtgatccaggccaaggacatgggtggacatatgggcggactctcagggacaaccaaagtgacgatcacactgaccgatgtcaatgacaacccaccaaagtttccgcagagcgtataccagatgtctgtgtcagaagcagccgtccctggggaggaagtaggaagagtgaaagctaaagatccagacattggagaaaatggcttagtcacatacaatattgttgatggagatggtatggaatcgtttgaaatcacaacggactatgaaacacaggagggggtgataaagctgaaaaagcctgtagattttgaaaccaaaagagcctatagcttgaaggtagaggcagccaacgtgcacatcgacccgaagtttatcagcaatggccctttcaaggacactgtgaccgtcaagatctcagtagaagatgctgatgagccccctatgttcttggccccaagttacatccacgaagtccaagaaaatgcagctgctggcaccgtggttgggagagtgcatgccaaagaccctgatgctgccaacagcccgataaggtattccatcgatcgtcacactgacctcgacagatttttcactattaatccagaggatggttttattaaaactacaaaacctctggatagagaggaaacagcctggctcaacatcactgtctttgcagcagaaatccacaatcggcatcaggaagccaaagtcccagtggccattagggtccttgatgtcaacgataatgctcccaagtttgctgccccttatgaaggtttcatctgtgagagtgatcagaccaagccactttccaaccagccaattgttacaattagtgcagatgacaaggatgacacggccaatggaccaagatttatcttcagcctaccccctgaaatcattcacaatccaaatttcacagtcagagacaaccgagataacacagcaggcgtgtacgcccggcgtggagggttcagtcggcagaagcaggacttgtaccttctgcccatagtgatcagcgatggcggcatcccgcccatgagtagcaccaacaccctcaccatcaaagtctgcgggtgcgacgtgaacggggcactgctctcctgcaacgcagaggcctacattctgaacgccggcctgagcacaggcgccctgatcgccatcctcgcctgcatcgtcattctcctgggttgcccaagcttaatggaacccccctctcccagggaagacatgagattgctttatctgggcttccagctgatgctattttcctatgttaaagtaaacagaagattttgtcttctgggggtctttataaaacttcctttcctctatgtggtggctacagagagtccaaccacacttacgtcattgtagtattgtttgtgaccctgagaaggcaaaagaaagaaccactcattgtctttgaggaagaagatgtccgtgagaacatcattacttatgatgatgaagggggtggggaagaagacacagaagcctttgatattgccaccctccagaatcctgatggtatcaatggatttatcccccgcaaagacatcaaacctgagtatcagtacatgcctagacctgggctccggccagcgcccaacagcgtggatgtcgatgacttcatcaacacgagaatacaggaggcagacaatgaccccacggctcctccttatgactccattcaaatctacggttatgaaggcaggggctcagtggccgggtccctgagctccctagagtcggccaccacagattcagacttggactatgattatctacagaactggggacctcgttttaagaaactagcagatttgtatggttccaaagacacttttgatgacgattcttaacaataacgatacaaatttggccttaagaactgtgtctggcgttctcaagaatctagaagatgtgtaaacaggtatttttttaaatcaaggaaaggctcatttaaaacaggcaaagttttacagagaggatacatttaataaaactgcgaggacatcaaagtggtaaatactgtgaaataccttttctcacaaaaaggcaaatattgaagttgtttatcaacttcgctagaaaaaaaaaacacttggcatacaaaatatttaagtgaaggagaagtctaacgctgaactgacaatgaagggaaattgtttatgtgttatgaacatccaagtctttcttcttttttaagttgtcaaagaagcttccacaaaattagaaaggacaacagttctgagctgtaatttcgccttaaactctggacactctatatgtagtgcatttttaaacttgaaatatataatattcagccagcttaaacccatacaatgtatgtacaatacaatgtacaattatgtctcttgagcatcaatcttgttactgctgattcttgtaaatctttttgcttctactttcatcttaaactaatacgtgccagatataactgtcttgtttcagtgagagacgccctatttctatgtcatttttaatgtatctatttgtacaattttaaagttcttattttagtatacgtataaatatcagtattctgacatgtaagaaaatgttacggcatcacacttatattttatgaacattgtactgttgctttaatatgagcttcaatataagaagcaatctttgaaataaaaaaagattttttttt

SEQ ID NO: 4101 - DNA, 1872 bp, Homo sapiens
cagcttcacggtgatgatatggcatctgccagctctagccgggcaggagtggccctgccttttgagaagtctcagctcactttgaaagtggtgtccgcaaagcccaaggtgcataatcgtcaacctcgaattaactcctacgtggaggtggcggtggatggactccccagtgagaccaagaagactgggaagcgcattgggagctctgagcttctctggaatgagatcatcattttgaatgtcacggcacagagtcatttagatttaaaggtctggagctgccataccttgagaaatgaactgctaggcaccgcatctgtcaacctctccaacgtcttgaagaacaatgggggcaaaatggagaacatgcagctgaccctgaacctgcagacggagaacaaaggcagcgttgtctcaggcggagagctgacaattttcctggacgggccaactgttgatctgggaaatgtgcctaatggcagtgccctgacagatggatcacagctgccttcgagagactccagtggaacagcagtagctccagagaaccggcaccagccccccagcacaaactgctttggtggaagatcccggacgcacagacattcgggtgcttcagccagaacaaccccagcaaccggcgagcaaagccccggtgctcggagccggcaccgccagcccgtcaagaactcaggccacagtggcttggccaatggcacagtgaatgatgaacccacaacagccactgatcccgaagaaccttccgttgttggtgtgacgtccccacctgctgcacccttgagtgtgaccccgaatcccaacacgacttctctccctgccccagccacaccggctgaaggagaggaacccagcacttcgggtacacagcagctcccagcggctgcccaggcccccgacgctctgcctgctggatgggaacagcgagagctgcccaacggacgtgtctattatgttgaccacaataccaagaccaccacctgggagcggccccttcctccagggtaggtcatcaactgagaagacctgagactctggaactgacaccatgagtcacccaatggcttcttgaaacggtccctttctgcggaggtagcatagcacagtgacgtttattccgggtcacttgattgcttttcctatccacttaccttaatattgctcccatgtcttaggacatattagaattattagaagatctctgggaaacaaaaggcgcatgggaggccaagatttagagtgttgatgcattccgccgtaccctatgcccagcctgtccctaaaggcagagtgcttcttattcggcagggcttcgtgagaatgccgccaagttatccaaaaccaaaggatgagagaggcttccaagagagggaagactgtccaagttcaaggagaaggggtttggttccctgtctgccagggacagaaagttctttccacatgtgtctcctggtcccgagagctttcaaaaggggatgtattctgctccaagaaagaatcacctcccagtaaagtagccatgaagggctcctgtataaaatatgcacacttcccctgccctgagtttgtggagggaaaggctgtcggaagtagggactcttaggagagcccgtgtgccctgtttggttcagctgtcaggcgtgtgccacacacatcccacctcatcttctggtcccataattctccatggatgggctgcttttagctccagttttccagtagaatgcttgagttttccttttttccgtacctcctggaggatgaaactcataacctgtcatcatcagtactcactgtgttttccactttgacttgaagtcaaatgaagttaccaaagttaaacatggacttctc

SEQ ID NO: 4102 - DNA, 1715 bp, Homo sapiens
agtcatttcttctgcggaacctccacccctccagtgggtgcgggaccctaggcagcaggccaggcaccgccgctctgactgggggccccgaagcagttaacgggccggacagcaaagtggaaagttagaccagctgggaccaggggaggtgggcacccggctgcgggaggagcggccaggctggcactgcccccctaacttgctctcgatcctgccggtctcgtcccgcagagccggtgccatctgtgggggctttgggccaggggtctccggacagcatgagcgtgggcttcatcggcgctggccagctggcttttgccctggccaaggctttcacagcagcaggcgtcttggctgcccacaagataatggctagctccccagacatggacctggccacagtttctgctctcaggaagatgggggtgaagttgacaccccacaacaaggagacggtgcagcacagtgatgtgctcttcctggctgtgaagccacacatcatccccttcatcctggatgaaataggcgccgacattgaggacagacacattgtggtgtcctgcgcggccggcgtcaccatcagctccattgagaagaagctgtcagcgtttcggccagcccccagggtcatccgctgcatgaccaacactccagtcgtggtgcgggagggggccaccgtgtatgccacaggacgcacgcccaggtggaggacgggaggctcatggagcagctgctgagcagcgtgggcttctgcacggaggtggaagaggacctgattgatgccgtcacggggctcagtggcagcggccccgcctacgcattcacagccctggatgccctggctgatgggggtgtgaagatgggacttccaaggcgcctggcagtccgcctcggggcccaggccctcctgggggctgccaagatgctgctgcactcagaacagcacccaggccagctcaaggacaacgtcagctctcctggtggggccaccatccatgccttgcatgtgctggagagtgggggcttccgctccctgctcatcaacgctgtggaggcctcctgcatccgcacacgggagctgcagtccatggctgaccaggagcaggtgtcaccagccgccatcaagaagaccatcctggacaaggaccaccttcctctagagctcgggagcccggagggtcttcacccactcctactccagtatcagctggcacgggctccttcctgagagcaaaggtcaaggaccccctctgtgaaggctcagcagaggtgggatcccacgccccctcccggcccctccctgccctccattcagggagaaacctctccttcccgtgtgagaagggccagagggtccaggcatcccaagtccagcgtgaagggccacagcccctcttggctgccaagcacgcagatcccatggacatttggggaaagggctccttgggctgctggtgaacttctgtggccaccacctcctgctcctgacctccctgggagggtgctatcagttctgtcctggccctttcagttttataagttggtttccagcccccagtgtcctgacttctgtctgccacatgaggagggaggccctgcctgtgtgggagggtggttactgtgggtggaatagtggaggccttcaactgattagacaaggcccgcccacatcttggagggcatctgccttactgattaaaatgtcaatgtaatct

SEQ ID NO: 4103 - DNA, 2859 bp, Homo sapiens
gtgcacattcaggttcccgagcacaaacatcaagataacgttcactgccctgtccagcgagaagagagagaagcaggaggcgtctgagtctccagtgaaggccgtacagccacacatctcgcccctgaccatcaacattccagacaccatggcccacctcatcagccctctgccctcccccacgggaaccatcagcgctgcaaactcctgcccctccagcccccggggagcggggtcttcagggtacaaggtgggccgagtgatgccatctgacctcaatttaatggctgacaactcacagcctgaaaatgaaaaggaagcttcaggtggagacagcccgaaggatgattcaaagccgccttactcctacgcgcagctgatagttcaggcgattacgatggctcccgacaaacagctcaccctgaacgggatttatacacacatcactaaaaattatccctactacaggactgcggacaagggctggcagaattcaattcgccacaatctctctctgaatcgttatttcatcaaagtgccgcgttcccaggaagaaccaggcaaaggctcgttctggaggatagacccagcctctgaaagcaaattaatagaacaggcttttaggaaacgacggcctaggggcgtgccctgctttagaacccctctgggaccgctctcttctaggagtgccccagcctctcccaatcacgcgggagtgctgtctgctcactctagtggcgcccagacccctgagagcctgtcgagggaaggttcgccggcccccctggagcctgagcctggcgctgcacagcccaaactcgctgtcatccaggaagcccggtttgcccagagcgccccagggtcacctctgtccagtcagccagtcttaatcaccgtccagcggcacgtaccacaggccatcaagcctgtcacctacactgtggccaccccagtgaccacctcgacctcccagccacccgtcgtgcagacgtttcacgtcgtccaccagatcccagcggtgtcggtcaccagtgtggccggactggcccagcgaacacgtacactgtctctggacaagctgtggtcaccccggcagccgtgctggcccctcctaaggcagaggccaggagaatggagaccacagggaagtcaaagtgaaagtagagcctattcccgccattggccacgccacgctcggcactgccagccggatcattcagacggcacagaccaccccggtccagacggtgaccatagtacaacaggcacctctaggtcaacaccagctaccaataaaaactgtaacacaaaacggcactcacgtggcatcagtccccactgcggtccacggccaggtgaacaatgggccccttggcctcagaaggcccccatgtgccagctcagactggagttgcctcagttgacacagcaggccccatccagacagaccagcaggtgcttctggagacaagagcaaagccttttccggcagcccggaacctgggatgagaaacgacaggtggaaggttgtccagagacacctacagtgtggatgctgttccgagtcagcgtaggagaaaggccactggaaaccagagtcacactgcgcgtctgtgcatctctggcctaccgcagtggccccggctgtctgcacattttttgtagacacattagagtcggttgaggccacacctgcggccacagactgcgaccgcgattgcagggaggagcatctgaggtggtcacggggtttgcccagctcacaccaactgcagccgcggcgagtcctttgcacatgttggcaacacacgcatccgcatcggcctccctgcccacaaagcgccacaacggtgaccagccggagcagccggagctgaagcggatcaagacagaagacggcgagggcatcgtcattgccctgagcgtggacacgccaccggcagccgtaagggaaaagggtgtccagaactagcgaccgggagagcttttctttaacgatatcaactctgtggtgccaaaaggagacgcggcctcccgccagcactcgggggtgcagggccctgtggttggacttcacctctcagcactgaaaacccaaaacccagctggccttaacactccttaaagacagaagtcacacttgaacaaaacccacacacaacaaaacctgatttgggagacggtgtctccactgagcacctgctgggctgagcttctacctacgagtgaaactctgtcctcctgcgaggaccaggcatcgctgtgtgaggacggcacggccagcgcctgctgtgagtgggtctcccaagactaggcctcaggacgcggggggagccatccccgccgccctcacaggacccaccaggcagcggagacatgtggaattagagtattttgaggtgtcctttctttacaaaataatggggtcttgggcatttcacatcactccatttctactgagactttcagaatcacacaggccctttccgtggatttcatttggggcaaagaaacaacgtagttttgtttttgttttcagcctatggaatgatttccttttgtctgtcttgttcaagttcagacgaagctactctggcatctgcacatttccgtgttacagcagctgcctgatgaattttatccacctccatttcagcatgtggctcgcgtggacaggtggacggacgctgtggccgcatggaaccttgagaacccagggacgagccagtgccgggaaggaactgccgggactcaccgagctgcacttaactgttctctttctggctattttttgttgtttgtttctttgtgttgactttgtccctggcaaaattttccactctgagtaaaacaagtctc

SEQ ID NO: 4104 - DNA, 4743 bp, Homo sapiens
cgggcggcgtgcggctgctctgggtgtcgctattggtgctgctggcgcagctagggccgcagcctggactgggccggctcggagagcgtctccgcgtgcgcttcaccccggtcgtgtgcggcctgcgctgcgtccatgggccgaccggctcccgctgtaccccgacctgcgcgccccgcaacgccaccagcgtggacagcggcgctcccggcggggcggccccggggggacccggcttccgcgccttcctgtgtcccttgatctgtcacaatggcggtgtgtgcgtgaagcctgaccgctgcctctgtcccccggacttcgctggcaagttctgccagttgcactcctcgggcgcccggcccccggccccggctgtaccaggcctcacccgctccgtgtacactatgccactggccaaccaccgcgacgacgagcacggcgtggcatctatggtgagcgtccacgtggagcacccgcaggaggcgtcggtggtggtgcaccaggtggagcgtgtgtctggcccttgggaggaggcggacgctgaggcggtggcgcgggcggaagcggcggcgcgggcggaggcggcagcgccctacacggtgttggcacagagcgcgccgcgggaggacggctactcagatgcctcgggcttcggttactgctttcgggagctgcgcggaggcgaatgcgcgtccccgctgcccgggctccggacgcaggaggtctgctgccgaggggccggcttggcctggggcgttcacgactgtcagctgtgctccgagcgcctggggaactccgaaagagtgagcgccccagatggaccttgtccaaccggctttgaaagagttaatgggtcctgcgaagatgtggatgagtgcgcgactggcgggcgctgccagcacggcgagtgtgcaaacacgcgcggcgggtacacgtgtgtgtgccccgacggctttctgctcgactcgtcccgcagcagctgcatctcccaacacgtgatctcagaggccaaagggccctgcttccgcgtgctccgcgacggcggctgttcgctgcccattctgcggaacatcactaaacagatctgctgctgcagccgcgtaggcaaggcctggggccggggctgccagctctgcccacccttcggctcagagggtttccgggagatctgcccggctggtcctggttaccactactcggcctccgacctccgctacaacaccagacccctgggccaggagccaccccgagtgtcactcagccagcctcgtaccctgccagccacctctcggccatctgcaggctttctgcccacccatcgcctggagccccggcctgaaccccggcccgatccccggcccggccctgagcttcccttgcccagcatccctgcctggactggtcctgagattcctgaatcaggtccctcctccggcatgtgtcagcgcaacccccaggtctgcggcccaggacgctgcatttcccggcccagcggctacacctgcgcttgcgactctggcttccggctcagcccccagggcacccgatgcattgatgtggacgaatgtcgccgcgtgcccccgccctgtgctcccgggcgctgcgagaactcaccaggcagcttccgctgcgtgtgcggcccgggcttccgagccggcccacgggctgcggaatgcctggatgtggacgagtgccaccgcgtgccgccgccgtgtgacctcgggcgctgcgagaacacgccaggcagcttcctgtgcgtgtgccccgccgggtaccaggctgcaccgcacggagccagctgccaggatgtggatgaatgcacccagagcccaggcctgtgtggccgaggggcctgcaagaacctgcctggctctttccgctgtgtttgcccggctggcttccggggctcggcgtgtgaagaggatgtggatgagtgtgcccaggagccgccgccctgtgggcccggccgctgtgacaacacggcaggctcctttcactgtgcctgccctgctggcttccgctcccgagggcccggggccccctgccaagatgtggatgagtgtgcccgaagccccccaccctgcacctacggccggtgtgagaacacagaaggcagcttccagtgtgtctgccccatgggcttccaacccaacactgctggctccgagtgcgaggatgtggatgagtgtgagaaccacctcgcatgccctgggcaggagtgtgtgaactcgcccggctccttccagtgcaggacctgtccttctggccaccacctgcaccgtggcagatgcactgatgtggacgaatgcagttcgggtgcccctccctgtggtccccacggccactgcactaacaccgaaggctccttccgctgcagctgcgcgccaggctaccgggcgccgtcgggtcggcccgggccctgcgcagacgtgaacgagtgcctggagggcgatttctgcttccctcacggcgagtgcctcaacactgacggctcctttgcctgtacttgtgcccctggctaccgacccggaccccgcggagcctcttgcctcgacgttgacgagtgcagcgaggaggacctttgccagagcggcatctgtaccaacaccgacggctccttcgagtgcatctgtcctccgggacaccgcgctggcccggacctcgcctcctgcctcggacgtggacgaatgtcgcgagcgaggcccagccctgtgcgggtcgcagcgctgtgagaactctcccggctcctaccgctgtgtccgggactgcgatcctgggtaccacgcgggccccgagggcacctgtgacgatgtggatgagtgccaagaatatggtcccgagatttgtggagcccagcgttgtgagaacacccctggctcctaccgctgcacaccagcctgtgaccctggctatcagcccacgccagggggcggatgccaggatgtggacgaatgccggaaccggtccttctgcggtgcccacgccgtgtgccagaacctgcccggctccttccagtgcctctgtgaccaggttacgagggggcacgggatgggcgtcactgcgtggatgtgaacgagtgtgaaacactacagggtgtatgtggagctgccctgtgtgaaaatgtcgaaggctccttcctctgtgtctgccccaacagcccggaagagtttgaccccatgactggacgctgtgttcccccacgaacttctgctggcacgttcccaggctcgcagccccaggcacctgctagccccgttctgcccgccaggccacctccgccacccctgccccgccgacccagcacacctaggcagggccctgtggggagtgggcgccgggagtgctactttgacacagcggccccggatgcatgtgacaacatcctggctcggaatgtgacatggcaggagtgctgctgtactgtgggtgagggctggggcagcggctgccgcatccagcagtgcccgggcaccgagacagctgagtaccagtcattgtgccctcacggccggggctacctggcgcccagtggagacctgagcctccggagagacgtggacgaatgtcagctcttccgagaccaggtgtgcaagagtggcgtgtgtgtgaacacggccccgggctactcatgctattgcagcaacggctactactaccacacacagcggctggagtgcatcgacaatgacgagtgcgccgatgaggaaccggcctgtgagggcggccgctgtgtcaacactgtgggctcttatcactgtacctgcgagcccccactggtgctggatggctcgcagcgccgctgcgtctccaacgagagccagagcctcgatgacaatctgggagtgtgctggcaggaagtgggggctgacctcgtgtgcagccaccctcggctggaccgtcaggccacctacacagagtgctgctgcctgtatggagaggcctggggcatggactgcgccctctgccctgcgcaggactcagatgacttcgaggccctgtgcaatgtgctacgcccccccgcatatagccccccgcgaccaggtggctttggactcccctacgagtacggcccagacttaggtccaccttaccagggcctcccatatgggcctgagttgtacccaccacctgcgctaccctacgacccctacccaccgccacctgggcccttcgcccgccgggaggctccttatggggcaccccgcttcgacatgccagactttgaggacgatggtggcccctatggcgaatctgaggctcctgcgccacctggcccgggcacccgctggccctatcggtcccgggacacccgccgctccttcccagagcccgaggagcctcctgaaggtggaagctatgctggttccctggctgagccctacgaggagctggaggcggaggagtgcgggatcctggacggctgcaccaacggccgctgcgtgcgcgtccccgaaggcttcacctgccgttgcttcgacggctaccgcctggacatgacccgcatggcctgcgttgacatcaacgagtgtgatgaggccgaggctgcctccccgctgtgcgtcaacgcgcgttgcctcaacacggatggctccttccgctgcatctgccgcccgggattcgcacccacgcaccagccgcaccactgtgcgcccgcacggccccgggcctgagccctggcacccgctggccgcccacccgcgcccgccactcggggcccctgccgcgcatcctgcagcccgctta

SEQ ID NO: 4105 - DNA, 685 bp, Homo sapiens
gcttaggcgcagacgggttaggggagccaacatgccagtggcccggagctgggtttgtcgcaaaacttacgtgaccccgcggagatcctttgagaaatctcgtctcgaccaagagctgaagctgatcgaagagtatgggctccggaataaacgtgaggtctggagggtcaaatttaccctggccaagatccgcaaggccgcccgggaactgctgacgcttgatcagaaggacccacggcgtctgttcgaaggcaatgccctgctgtggcggctggtctgcattggggtgctggatgagggcaagatgaagctggattacatcctgggcctgaagatagaggatttcttagagagacgcctacagacccaggtcttcaagctgggcttggccaagtccatccaccacgctcgcgtgctgatccgccagcgccatttcagggtccgcaagcaggtggtgaacatcccgtccttcattgtccgcctggattcccagaagcacatcgacttctctctgtgctctccctatgggggtggccgcccgggccgcgtgaagaggaagaatgccaagaagggccagggtggggctggggctggagaccacaaggaggaggattaagcccacctgtccctcctgggctgctgcattgtctagttttcctgccaaataaacaggatcagcgcttta

SEQ ID NO: 4106 - DNA, 2002 bp, Homo sapiens
cgtggtgagcgagaagtgccgtatcgacacggagatcctgccctccctgttcatgcgctgcaccaccgacctcaaccgcaaggacaagttccccgccatcacccacctcaagttcctggcccgggacatgtcggagcaggtgcttttgtgcgcgtccagccagaccagcagcatcgtggagtgctggtccctgcgcaaggagggactccccgtgaacaacatcttccagcagatctcccccgtggttggcgacaaacagcccacaattctcaaatggcggatcctatcggccaccaacgatctggaccgtgtgtcggccgtggcgctgcccaagctgcccatctcgctcaccaacaccgacctcaaggtggccagcgacacacagttctaccctggcctcgggctggccctggccttccacgacggcagcgtccacatcgtgcaccggctctcactgcagaccatggccgtcttctacagctccgcggccccgaggcctgtggatgagccggccatgaagcgcccccgcaccgcgggccccgccgtccacttaaaggctatgcagctatcgtggacgtcactggccctggtggggattgacagccacgggaagctgagcgtgctccgcctctcaccttccatgggccacccgctggaggtggggctggcgctgcggcacctgctcttcctgctggagtactgcatggtgaccggctacgactggtgggacatcctgctgcacgtgcagcccagtatggtacagagcctggtggagaagctgcacgaggagtacacgcgccagaccgctgccctgcagcaggtcctctccacccggatcctggccatgaaggcctcgctctgcaagctgtcgccctgcacggtgactcgcgtgtgcgactaccacaccaagctcttcctcatcgccatcagctccaccctgaagtcgctgctgcgcccccactttctcaacacgcctgacaagagccccggcgaccggctgaccgagatctgcaccaagatcaccgacgtcgacattgacaaggtcatgatcaacctcaagacggaggaatttgtgctggacatgaacacactgcaggcgctgcagcagctcttgcagtgggtgggcgacttcgtgctgtacctgctggccagcctacccaaccaggtcgcgatgagggcccagcgagcgagccggacgaggcgctggtggatgaatgctgcctgctgcccagccagctgcttatccccagcctggactggctgccagccagcgacggcctggtcagccgcctgcagcccaagcagccccttcgtctgcagtttggccgggcgcccacgctgcctggcagtgctgccaccctgcagctcgacggcctcgccagggccccaggccagcccaagatcgaccacctgcggaggctgcaccttggcgcttgccccacggaggaatgcaaggcctgcaccaggtgcggctgtgtcaccatgctcaagtcgcccaacagaaccacggcggtgaagcagtgggagcagcgctggatcaagaactgcctgtgcggtgggctctggtggcgggtgcccctcagctacccctgagcccagctgcccctcagctactcctcagctacccctcagctgcccctgagcccggctgctgcaagagccaccgctcgccctggactctcctcggcgcggttaacctcagcccgccctgcagggctgttgaaggccgtgggccggacgcctgcgtgaccagcagagcttctgaggaagcccctgcctttgtccagctgggcccgcagtccacacaccactctcccaggacccccagatccctggaccatctgcatccaaaggaccgtccgtgacggccgggggtccaggcggaccttgtggtgacccggctcgggcgtctcctcggtttccttgcctcacccgcggagagcgctgaacctggacaagcagcggctgggaaggacaggtccaataaacgccctctgcgccc

SEQ ID NO: 4107 - DNA, 971 bp, Homo sapiens
cagggagcagccaatcttcagcacacgggcgcacgtgttccaaattgacccagccaccaagcgaaactggatcccagcgggcaagcacgcactcactgtctcctatttctacgatgccacccgcaatgtgtaccgcatcatcagcatcggaggcgccaaggccatcatcaacagcactgtcactcccaacatgaccttcaccaaaacttcccagaagttcgggcagtgggccgacagtcgcgccaacacagtctacggcctgggctttgcctctgaacagcatctgacacaggtgcccccgagccctctcgtcagtgccaacggccccggcgaggaaaaactgttccgcagccagagcgctgatgcccccggccccacagagcgcgagcggctaaagaagatgttgtctgagggctccgtgggcgaggtacagtgggaggccgagtttttcgcactgcaggacagcaacaacaagctggcaggcgccctgcgagaggccaacgccgccgcagcccagtggaggcagcagctggaggctcagcgtgcagaggccgagcggctgcggcagcgggtggctgagctggaggctcaggcagcttcagaggtgacccccaccggtgagaaggaggggctgggccagggccagtcgctggaacagctggaagctctggtgcaaaccaaggaccaggagattcagaccctgaagagtcagactggggggccccgcgaggccctggaggctgccgagcgtgaggagactcagcagaaggtgcaggacctggagacccgcaatgcggagttggagcaccagctgcgggcgatggagcgcagcctggaggaggcacgggcagagcgggagcgggcgcgggctgaggtgggccgggcagcgcagctgctggacgtcagcctgtttgagctgagtgagctgcgtgagggcctggcccgcctggctgaggctgcgccctgagccg

SEQ ID NO: 4108 - DNA, 2320 bp, Homo sapiens
ggggattcaacatggcggcgggagtgtccgcggtggtggcggtgcaagagagctgagggaggcgcgagggcgcggagttccaggtcgagcagttaggccgcgagcgactgcggcgccgagccgatgagtaacccgaagcccctagaggagtggtcacctgcctgagggcacttctgtcccaccagcatcagaccaggccgcaccgagtccccggcaccatgtttgggaagaggaagaagcgggtggagatctccgcgccgtccaacttcgagcaccgcgtgcacacgggcttcgaccagcacgagcagaagttcacggggctgccccgccagtggcagagcctgatcgaggagtcggctcgccggcccaagcccctcgtcgaccccgcctgcatcacctccatccagcccggggcccccaagaccatcgtgcggggcagcaaaggtgccaaagatggggccctcacgctgctgctggacgagtttgagaacatgtcggtgacacgctccaactccctgcggagagacagcccgccgccgcccgcccgtgcccgccaggaaaatgggatgccagaggagccccctggcccccgctcaccacagcgggagccacagcgagtatcccatgagcagttccgggctgccctgcagctggtggtggacccaggcgacccccgctcctacctggacaacttcatcaagattggcgagggctccacgggcatcgtgtgcatcgccaccgtgcgcagctcgggcaagctggtggccgtcaagaagatggacctgcgcaagcagcagaggcgcgagctgctcttcaacgaggtggtaatcatgagggactaccagcacgagaatgtggtggagatgtacaacagctacctggtgggggacgagctctgggtggtcatggagttcctggaaggaggcgccctcaccgacatcgtcacccacaccaggatgaacgaggagcagatcgcggccgtgtgccttgcagtgctgcaggccctgtcggtgctccacgcccagggcgtcatccaccgggacatcaagagcgactcgatcctgctgacccatgatggcagggtgaagctgtcagactttgggttctgcgcccaggtgagcaaggaagtgccccgaaggaagtcgctggtcggcacgccctactggatggccccagagctcatctcccgccttccctacgggccagaggtagacatctggtcgctggggataatggtgattgagatggtggacggagagcccccctacttcaacgagccacccctcaaagccatgaagatgattcgggacaacctgccaccccgactgaagaacctgcacaaggtgtcgccatccctgaagggcttcctggaccgcctgctggtgcgagaccctgcccagcgggccacggcagccgagctgctgaagcacccattcctggccaaggcagggccgcctgccagcatcgtgcccctcatgcgccagaaccgcaccagatgaggcccagcgcccttcccctcaaccaaagagccccccgggtcacccccgccccactgaggccagtagggggccaggcctcccactcctcccagcccgggagatgctccgcgtggcaccaccctccttgctgggggtagatgagaccctactactgaactccagttttgatctcgtgacttttagaaaaacacagggactcgtgggagcaagcgaggctcccaggacccccaccctctgggacaggccctcccccatgttcttctgtctccaggaagggcagcggccctcccatcactggaagtctgcagtgggggtcgctgggggtggagagaacactaagaggtgaacatgtatgagtgtgtgcacgcgtgtgagtgtgcatgtgtgtgtgtgcaaaggtccagccaccccgtcctccagcctgcaaggggtgtctggcgccttgcctgacacccagccccctctccccctgagccattgtgggggtcgatcatgaatgtccgaagagtggccttttcccgtagccctgcgccccctttctgtggctggatggggagacaggtcagggccccccaccctctccagcccctgcagcaaatgactactgcacctggacagcctcctcttttctagaagtctatttatattgtcattttataacactctagcccctgcccttattgggggacagatggtccctgtcctgcggggtggccctggcagaaccactgcctgaagaaccaggttcctgcccggtcagcgcagccccagcccgcccacccctgcctcgagttagttttacaattaaaacattgtcttgt

SEQ ID NO: 4109 - DNA, 3818 bp, Homo sapiens
gagcagctgcaccatcccggcgttcgcgtgtgccgccgctttcctcctccatctcttttcctccgcctccgccggcgcgatggcgaagccgctgacggacagcgagaagcggaagcagatcagcgtgcgcggcctggcggggctaggcgacgtggccgaggtgcggaagagcttcaaccggcacttgcacttcacgctggtcaaggaccgcaatgtggccacgccccgcgactacttcttcgcgctggcgcacacggtgcgcgaccacctcgtgggccgctggatccgcacgcagcagcactactacgagcgcgaccccaagcgcatttattatctttccctggaattctacatgggtcgcacgctgcagaacacgatggtgaacctgggccttcagaatgcctgcgatgaagccatctatcagttggggttagacttggaggaactcgaggagatagaagaagatgctggccttgggaatggaggcctggggaggctggcagcgtgtttccttgactcaatggctaccttgggcctggcagcatacggctatggaatccgctatgaatttgggatttttaaccagaagattgtcaatggctggcaggtagaggaggccgatgactggctgcgctacggcaacccctgggagaaagcgcggcctgagtatatgcttcccgtgcacttctacggacgcgtggagcacacccccgacggcgtgaagtggctggacacacaggtggtgctggccatgccctacgacaccccagtgcccggctacaagaacaacaccgtcaacaccatgcggctgtggtccgccaaggctcccaacgacttcaagctgcaggacttcaacgtgggagactacatcgaggcggtcctggaccggaacttggctgagaacatctccagggtcctgtatccaaatgataacttctttgaggggaaggagctgcggctgaagcaggagtacttcgtggtggccgccacgctccaggacatcatccgccgcttcaagtcgtccaagttcggctgccgggaccctgtgagaacctgtttcgagacgttcccagacaaggtggccatccagctgaacgacacccaccccgccctctccatccctgagctcatgcggatcctggtggacgtggagaaggtggactgggacaaggcctgggaaatcacgaagaagacctgtgcatacaccaaccacactgtgctgcctgaggccttggagcgctggcccgtgtccatgtttgagaagctgctgccgcggcacctggagataatctatgccatcaaccagcggcacctggaccacgtggccgcgctgtttcccggcgatgtggaccgcctgcgcaggatgtctgtgatcgaggagggggactgcaagcggatcaacatggcccacctgtgtgtgattgggtcccatgctgtcaatggtgtggcgaggatccactcggagatcgtgaaacagtcggtctttaaggatttttatgaactggagccagagaagttccagaataagaccaatggcatcaccccccgccggtggctgctgctgtgcaacccggggctggccgataccatcgtggagaaaattggggaggagttcctgactgacctgagccagctgaagaagctgctgccgctggtcagtgacgaggtgttcatcagggacgtggccaaggtcaaacaggagaacaagctcaagttctcggccttcctggagaaggagtacaaggtgaagatcaacccctcctccatgttcgatgtgcatgtgaagaggatccacgagtacaagcggcagctgctcaactgcctgcacgtcgtcaccctgtacaatcgaatcaagagagacccggccaaggcttttgtgcccaggactgttatgattgggggcaaggcagcgcccggttaccacatggccaagctgatcatcaagttggtcacctccatcggcgacgtcgtcaatcatgacccagttgtgggtgacaggttgaaagtgatcttcctggagaactaccgtgtgtccttggctgagaaagtgatcccggccgctgatctgtcgcagcagatctccactgcaggcaccgaggcctcaggcacaggcaacatgaagttcatgctcaacggggccctcaccatcggcaccatggacggcgccaacgtggagatggccgaggaggccggggccgagaacctcttcatcttcggcctgcgggtggaggatgtcgaggccttggaccggaaagggtacaatgccagggagtactacgaccacctgcccgagctgaagcaggccgtggaccagatcagcagtggctttttttctcccaaggagccagactgcttcaaggacatcgtgaacatgctgatgcaccatgacaggttcaaggtgtttgcagactatgaagcctacatgcagtgccaggcacaggtggaccagctgtaccggaaccccaaggagtggaccaagaaggtcatcaggaacatcgcctgctcgggcaagttctccagtgaccggaccatcacggagtatgcacgggagatctggggtgtggagccctccgacctgcagcttcagcacctgccccacccagagtgggagtcaggtggagccacctgctgggctcccccagaactttgcacacatcttgctatgtattagccgatgtctttagtgttgagcctctggattctggggtctgggccagtggccatagtgaagcctgggaatgagtgttactgcagcatctgggctgccagccacagggaagggccaagccccatgtagccccagtcatcctgcccagccctgcctcctggccatgccgggaggggtcggatcctctaggcatcgccttcacagccccctgccccctgccctctgtcctggctctgcacctggtatatgggtcatggacccagatggggctttccctttgtagccatccaatgggcattgtgtgggtgcttggaacccgggatgactgagggggacactggagtgggtgcttgtgtctgctgtctcagaggccttggtcaggatgaagttggctgacacagcttagcttggttttgcttattcaaaagagaaaataactacacatggaaatgaaactagctgaagccttttcttgttttagcaactgaaaattgtacttggtcacttttgtgcttgaggaggcccattttctgcctggcagggggcaggtctgtgccctcccgctgactcctgctgtgtcctgaggtgcatttcctgttgtacacacaagggccaggctccattctccctccctttccaccagtgccacagcctcgtctggaaaaaggaccaggggtcccggaggaacccatttgtgctctgcttggacagcaggcctggcactgggaggtgggggtgagcccctcacagccttgcccctccccaaggctggcaacctgcctcccattgcccaagagagagggcagggaacaggctactgtccttccctgtggaattgccgagaaatctagcaccttgcatgctggatctgggctgcggggaggctctttttctccctggcctccagtgcccaccaggaggatctgcgcacggtgcacagcccaccagagcactacagccttttattgagtggggcaagtgctgggctgtggtcgtgccctgacagcatcttccccaggcagcggctctgtggaggaggccatactcccctagttggccactggggccaccaccctgaccaccactgtgcccctcattgttactgccttgtgagataaaaactgattaaacctttgtggctgtggttggc

SEQ ID NO: 4110 - DNA, 988 bp, Homo sapiens
gtggagctaccgccaccgccgccgccgattccggagccggggtagtcgccgccgccgccgccgctgcagccactgcaggcaccgctgccgccgcctgagtagtgggcttaggaaggaagaggtcatctcgctcggagcttcgctcggaagggtctttgttccctgcagccctcccacgggaatgacaatggataaaagtgagctggtacagaaagccaaactcgctgagcaggctgagcgatatgatgatatggctgcagccatgaaggcagtcacagaacaggggcatgaactctccaacgaagagagaaatctgctctctgttgcctacaagaatgtggtaggcgcccgccgctcttcctggcgtgtcatctccagcattgagcagaaaacagagaggaatgagaagaagcagcagatgggcaaagagtaccgtgagaagatagaggcagaactgcaggacatctgcaatgatgttctggagctgttggacaaatatcttattcccaatgctacacaaccagaaagtaaggtgttctacttgaaaatgaaaggagattattttaggtatctttctgaagtggcatctggagacaacaaacaaaccactgtgtcgaactcccagcaggcttaccaggaagcatttgaaattagtaagaaagaaatgcagcctacacacccaattcgtcttggtctggcactaaatttctcagtcttttactatgagattctaaactctcctgaaaaggcctgtagcctggcaaaaacggcatttgatgaagcaattgctgaattggatacgctgaatgaagagtcttataaagacagcactctgatcatgcagttacttagggacaatctcactctgtggacatcggaaaaccagggagacgaaggagacgctggggagggagagaactaatgtttctcgtgctttgtgatctgttcagtgtcactctgtaccctcaacatatatcccttgtgcgat

SEQ ID NO: 4111 - DNA, 1966 bp, Homo sapiens
ggtcccggcggcggctggaggaggaagccaggcggctggcggaggaggagagacggaggaggccgagaccggagcgccgctcgccgcagacttacttccccggctcagcagggaaaggttcctagaaggtgagcgcggacggtatgcaaagttgtgaatccagtggtgacagtgcggatgaccctctcagtcgcggcctacggagaaggggacagcctcgtgtggtggtgatcggcgccggcttggctggcctggctgcagccaaagcacttcttgagcagggtttcacggatgtcactgtgcttgaggcttccagccacatcggaggccgtgtgcagagtgtgaaacttggacacgccacctttgagctgggagccacctggatccatggctcccatgggaaccctatctatcatctagcagaagccaacggcctcctggaagagacaaccgatggggaacgcagcgtgggccgcatcagcctctattccaagaatggcgtggcctgctaccttaccaaccacggccgcaggatccccaaggacgtggttgaggaattcagcgatttatacaacgaggtctataacttgacccaggagttcttccggcacgataaaccagtcaatgctgaaagtcaaaatagcgtgggggtgttcacccgagaggaggtgcgtaaccgcatcaggaatgaccctgacgacccagaggctaccaagcgcctgaagctcgccatgatccagcagtacctgaaggtggagagctgtgagagcagctcacacagcatggacgaggtgtccctgagcgccttcggggagtggaccgagatccccggcgctcaccacatcatcccctcgggcttcatgcgggttgtggagctgctggcggagggcatccctgcccacgtcatccagctagggaaacctgtccgctgcattcactgggaccaggcctcagcccgccccagaggccctgagattgagccccggggtgtgctaaagaggcagtacaccagtttcttccggccaggcctgcccacagagaaggtggctgccatccaccgcctgggcattggcaccaccgacaagatctttctggaattcgaggagcccttctggggccctgagtgcaacagcctacagtttgtgtgggaggacgaagcagagagccacaccctcacctacccacctgagctctggtaccgcaagatctgcggctttgatgtcctctacccgcctgagcgctacggccatgtgctgagcggctggatctgcggggaggaggccctcgtcatggagaagtgtgatgacgaggcagtggccgagatctgcacggagatgctgcgtcagttcacagggaaccccaacattccaaaacctcggcgaatcttgcgctcggcctggggcagcaacccttacttccgcggctcctattcatacacgcaggtgggctccagcggggcggatgtggagaagctggccaagcccctgccgtacacagagagctcaaagacagcgcccatgcaggtgctgttttccggtgaggccacccaccgcaagtactattccaccacccacggtgctctgctgtccggccagcgtgaggctgcccgcctcattgagatgtaccgagacctcttccagcaggggacctgagggctgtcctcgctgctgagaagagccactaactcgtgacctccagcctgccccttgctgccgtgtgctcctgccttcctgatcctctgtagaaaggatttttatcttctgtagagctagccgccctgactgccttcagacctggccctgtagcttttctttttctccaggctgggccgtgagcaggtgggccgttgagttacctctgtgctggatcccgtgcccccacttgcctaccctctgtcctgccttgttattgtaagtgccttcaatactttgcattttgggataataaaaaaggctccctcccctgc

SEQ ID NO: 4112 - DNA, 1622 bp, Homo sapiens
aaacatggcggcattgagcggagtccgctggctgacccgagcgctggtctccgccgggaaccctggggcatggagaggtctgagtacctcggccgcggcgcacgctgcatcgcggagccaggccgaggacgtgagggtggagggctcctttcccgtgaccatgcttccgggagacggtgtggggcctgagctgatgcacgccgtcaaggaggtgttcaaggctgccgctgtcccagtggagttccaggagcaccacctgagtgaggtgcagaatatggcatctgaggagaagctggagcaggtgctgagttccatgaaggagaacaaagtggccatcattggaaagattcataccccgatggagtataagggggagctagcctcctatgatatgcggctgaggcgtaagttggacttatttgccaacgtagtccatgtgaagtcacttcctgggtatatgactcggcacaacaatctagacctggtgatcattcgagagcagacagaaggggagtacagctctctggaacatgaggtgaggccccagaaactgggggagggcaaggatgaagatgggagagaggtggagctccttgtttcccttcccagtgtcacctagctgctgctttcttcttacccagagtgcaaggggtgtgattgagtgtttgaagattgtcacacgagccaagtctcagcggattgcaaagttcgcctttgactatgccaccaagaaggggcggggcaaggtcactgctgtccacaaggccaacatcatgaaacttggggatgggttgttcctgcagtgctgtgaggaagttgctgaactgtaccccaaaatcaaatttgagacaatgatcatagacaactgctgcatgcagctggtgcagaatccttaccagtttgatgtgcttgtgatgcccaatctctatgggaacattattgacaatctggctgctggcctggttgggggagctggtgtggtccctggtgagagctatagtgcagaatacgcagtctttgagacgggtgcccggcacccatttgcccaggcagtgggcaggaatatagccaatcccacggccatgctgctgtcggcttccaacatgctgcggcatcttaatcttgagtatcactccagcatgatcgcagatgcggtgaagaaggtgatcaaagttggcaaggtgcggactcgagacatgggcggctacagcaccacaaccgacttcatcaagtctgtcatcggtcacctgcagactaaagggagctagagccctttatttcttccaaccttgcaaggaccacactccccatacccttcagtgcagtgtaccagggaagagaccttgtgcctctaagcagtggaccatggtcaccttgctgggtagagcctaggttgtccttgggccggcttccttaggggacagactgttgggtggtgatggggattgttaggatggagcccaggccacatggatgatgatgattctcccccacaggttcgaacctctgacatgggtggctatgctacttgccatgacttcactgaggctgtcattgctgccttgccccacccataggccctgtccatacccatgtaaggtgttcaataaagaacatgaacc

SEQ ID NO: 4113 - DNA, 1516 bp, Homo sapiens
gccgccgccgccatgggctgcctcgggaacagtaagaccgaggaccagcgcaacgaggagaaggcgcagcgtgaggccaacaaaaagatcgagaagcagctgcagaaggacaagcaggtctaccgggccacgcaccgcctgctgctgctgggtgctggagaatctggtaaaagcaccattgtgaagcagatgaggatcctgcatgttaatgggtttaatggagacagtgagaaggcaaccaaagtgcaggacatcaaaaacaacctgaaagaggcgattgaaaccattgtggccgccatgagcaacctggtgccccccgtggagctggccaaccccgagaaccagttcagagtggactacatcctgagtgtgatgaacgtgcctgactttgacttccctcccgaattctatgagcatgccaaggctctgtgggaggatgaaggagtgcgtgcctgctacgaacgctccaacgagtaccagctgattgactgtgcccagtacttcctggacaagatcgacgtgatcaagcaggctgactatgtgccgagcgatcaggacctgcttcgctgccgtgtcctgacttctggaatctttgagaccaagttccaggtggacaaagtcaacttccacatgtttgacgtgggtggccagcgcgatgaacgccgcaagtggatccagtgcttcaacgatgtgactgccatcatcttcgtggtggccagcagcagctacaacatggtcatccgggaggacaaccagaccaaccgcctgcaggaggctctgaacctcttcaagagcatctggaacaacagatggctgcgcaccatctctgtgatcctgttcctcaacaagcaagatctgctcgctgagaaagtccttgctgggaaatcgaagattgaggactactttccagaatttgctcgctacactactcctgaggatgctactcccgagcccggagaggacccacgcgtgacccgggccaagtacttcattcgagatgagtttctgaggatcagcactgccagtggagatgggcgtcactactgctaccctcatttcacctgcgctgtggacactgagaacatccgccgtgtgttcaacgactgccgtgacatcattcagcgcatgcaccttcgtcagtacgagctgctctaagaagggaacccccaaatttaattaaagccttaagcacaattaattaaaagtgaaacgtaattgtacaagcagttaatcacccaccatagggcatgattaacaaagcaacctttcccttcccccgagtgattttgcgaaacccccttttcccttcagcttgcttagatgttccaaatttagaaagcttaaggcggcctacagaaaaaggaaaaaaggccacaaaagttccctctcactttcagtaaaaataaataaaacagcagcagcaaacaaataaaatgaaataaaagaaacaaatgaaataaatattgtgttgtgcagcattaaaaaaaatcaaaataaaaattaaatgtgagcaaag

SEQ ID NO: 4114 - DNA, 759 bp, Homo sapiens
tggtcctgccgcctggtctcacctcgctatggttcgtctgcctctgcagtgcgtcctctggggctgcttgctgaccgctgtccatccagaaccacccactgcatgcagagaaaaacagtacctaataaacagtcagtgctgttctttgtgccagccaggacagaaactggtgagtgactgcacagagttcactgaaacggaatgccttccttgcggtgaaagcgaattcctagacacctggaacagagagacacactgccaccagcacaaatactgcgaccccaacctagggcttcgggtccagcagaagggcacctcagaaacagacaccatctgcacctgtgaagaaggctggcactgtacgagtgaggcctgtgagagctgtgtcctgcaccgctcatgctcgcccggctttggggtcaagcagattgctacaggggtttctgataccatctgcgagccctgcccagtcggcttcttctccaatgtgtcatctgctttcgaaaaatgtcacccttggacaaggtccccaggatcggctgagagccctggtggtgatccccatcatcttcgggatcctgtttgccatcctcttggtgctggtctttatcaaaaaggtggccaagaagccaaccaataaggccccccaccccaagcaggaaccccaggagatcaattttcccgacgatcttcctggctccaacactgctgctccagtgcaggagactttacatggatgccaaccggtcacccaggagg

SEQ ID NO: 4115 - DNA, 5962 bp, Homo sapiens
gaagaggaggaggaagaggaagaggaagaggaggaggaggaggcagctcctgatgtgatctttcaggaagacacctctcacacctctgcccagaaggcccctgagctccggggcccagaatcacccagtcccaagcctgagtactctgttattgtggaggtccgctcggatgatgacaaggacgaggacacccactcccggaagtcaacagtcactgacgagtcggagatgcaggacatgatgacccggggaaacctgggcctcctggagcaggccatcgccctgaaggctgaacaggtgcgcacagtctgcgagccgggctgcccgcctgccgagcagagccagctgggcctgggagagccagggaaggcagcaaagcccctggacactgtgcggaagagttactacagtaaagatccttcaagagctgagaagcgtgagatcaagtgtccaacaccaggctgtgatggcactggccacgttaccgggttgtaccctcaccaccgcagcctttctggctgtccccacaaggataggatccccccagagatcttagccatgcatgagaacgtgctgaagtgccccactcctggctgcacaggccagggtcacgtgaacagcaaccgcaacacgcacagaagtttgtctgggtgtcccattgctgccgccgaaaaattagccaaatcccatgagaagcagcagccgcagacaggagatccttccaagagtagctccaattccgatcggatcctcaggcccatgtgcttcgtgaagcagctcgaggtccctccatatgggagctaccggcccaacgtggcccccgccacacccagggccaacttggccaaggagctggagaagttctccaaggtcacctttgactacgcaagtttcgatgctcaggtttttggcaaacgcatgcttgccccaaagattcagaccagcgaaacctcacctaaagcctttcaatgctttgactactcgcaggacgccgaggctgcacacatggctgccactgccatcctgaacctctccacgcgctgctgggagatgcctgagaacctcagcacgaagccacaggacctccccagcaagtctgtggatatcgaggtagacgaaaatggaaccctggacttgagcatgcacaaacaccgcaaacgagaaaatgctttccccagcagcagcagctgcagcagcagccccggtgtgaagtctcccgacgcctcccagcgccacagcagcaccagcgcccccagcagctccatgacctctccccagtccagccaggcctcccgccaggacgagtgggaccggcccctggactacaccaagcctagccgcctgagagaggaggaacctgaggagtcagagccagcagcccattcttttgcttcttctgaagcagatgaccaggaagtgtcggaagagaattttgaggagcggaagtatccgggggaagtcaccctgaccaactttaagctgaagtttctctccaaggacataaagaaggagctgctcacctgtcccacccctggctgtgacggcagcggccacatcaccgggaactacgcctcccaccgcagcctctctggttgccctcttgctgacaagagcctcagaaacctcatggctgcccactctgctgacctcaagtgccccacgcccggctgtgacggctctggccacatcacagggaactacgcttcacaccggagcttgtccggctgccctcgtgcaaagaaaagtggagtcaaggtggcacccaccaaggacgacaaggaggaccccgagctgatgaagtgcccagttccaggctgtgtggggctcggtcacatcagcgggaaatacgcctctcacaggagcgcatccggctgcccactggccgcccgcaggcagaaggaagggtccctcaatggctcgtcattctcctggaagtccctgaagaatgaaggaccgacctgccccaccccgggctgtgacggctctggccacgccaatgggagtttcctcacccaccggagtttgtcaggctgtcccagagcaacctttgctggaaagaagggaaaactgtcaggggatgaggtcctcagtccaaagttcaagactagcgacgtgttggagaatgatgaggagatcaagcagctgaaccaggagatccgagacctgaacgagtccaactcggagatggaggctgccatggtgcagctgcagtcccagatctcctccatggagaagaacctgaagaacatcgaggaggagaacaagctcattgaggagcagaatgaagccctgtttctggagctgtccggcctgagccaggccctcatccaaagtctcgccaatatccgccttccgcacatggagccaatatgcgaacagaatttcgatgcctatgtgagcaccctcaccgacatgtactccaaccaggacccggagaacaaggacctcctggagagcatcaagcaggctgtgaggggcatccaggtctaggccgtgtggtacccagaagtgtcccagcccaccacaccgtttacctccctcgccctgccccgcaccgtggggatgcccaactcacagtgacttcccgtttggggcccggtgtggccgcgggcgggtttatccaaagggatggctggaaattggccgctcccacgaggctccctccaggcttggggccgtggtggccctatctgtgtgcataggggcactgaagaattacaaagtgatttatttttgttttctgaaagaaatctgaagagcagctcaaagtctccagtggaagctcatggacaaggttctcagtattgcctaagtgtaatcttgaacatgggcggtgctgtgagtgctggtgaagacaatgatgagctgatagataatttgaaagaagcacagtatatccggactgagctggtagagcaggctttcagagctatcgatcgtgcagactattatcttgaagaatttaaagaaaatgcttataaagacttggcatggaagcatggaaacattcacctctcagccccgtgcatctactcggaggtgatggaagccctagatctgcagcctggactctcgtttctgaacctgggcagtggcactgggtatctcagctccatggtgggcctcattctaggtccttttggtgtgaaccatggggtggaacttcactcagatgtgatagagtatgcaaagcagaaactggacttcttcatcagaacaagtgatagttttgacaagtttgacttctgtgaaccttcctttgttactgggaattgcctggagatttctccggattgttctcagtatgatcgtgtatactgtggggctggcgtgcagaaagagcatgaagagtacatgaagaatcttctcaaagtgggagggatccttgtcatgccactggaagagaagttgactaagataacacgcacaggtccttcagcttgggaaaccaaaaagattcttgctgtttcttttgctcctctgatccagccctgccattcagagtcaggaaaatcaagacttgtccagttaccaccagtggcagttcgcagcctccaggacttggctcgcatcgccatccggggcaccattaaaaagattattcatcaggaaactgtgagcaaaaacggaaacggactaaagaacacccccaggtttaaacgaaggagagttcgccgccgtcgaatggaaacgattgtctttttggacaaagaagtctttgccagtcggatttccaacccctcagatgacaacagctgtgaagacttggaagaggaacggagggaagaagaagagaagaccccgccggaaacaaagccagaccccccagtgaacttcctacgccagaaggtcctgagcctccctctgccagatcccctgaaatactacttgctttattacagagaaaaataagtctcctgtttgaaagggggaaataggaagagcagattgctgagtgtgaagttcgtgctgcctgtgtgctgttgaagggtcacctggaggcagacgttgtggggaagggaactgctgggctcatccacaccatggttttcttctagttcctgattgacctctaaaattctattcagttgtatgatttgtttacatagttccacaagaccttcattgcatagaagattgttttcccaaagtggagagaatcttcatagagaaaaagagaaggctgtttctttttcggctctgacgaaacactgaagtctgcgtaagagagactgtttgatgaccgtccctcatgcaacatgcacggtactcactaaaaatgaaaactgaagtggaaactaacctgtgttgcttataaagtgtgaaagcacaagcttataaatgtataaaatcttttctgggtgtgacgcacctgcgtccaagtttgaatttttatgatatgtaccacttaattactggcactgagtatcactgaatttcttagttttctagtggggaaacattattgagaagccctcccttattttaagtaagttgattaaatcttatgtgagttgccagttgtaatttttcaaaggaaaaattttgatggggtggaggaatgaattgccagataatctttctggaattccgagagaattccaaagagggtttttttttttttttttaggacatcttttgatacctttaaaagaaccactgtcaagtaatccttaaaagaatatcttggaaaaggaaacagattttttcctgtgtgtaagcaataagtgaagttacatttgccctaaccctagggatgattctttacccagttttaaagcccatcatggtattctaaggtgttgacaccctccatcctcagagcaggtcgaaaatattaaatagactggggactctatgatgggcagcctgtgctttttgacttcagtttgctatttttctgtgatcacattagtactgattcatagattctatcttttataattctggagaaaaagatttgttagttttgtaatttttttgtaagaccaaatgtatgtattttagtagctccattgcatgagaagagtgtaactcacactgacttgtgatatcagccttctctgggccttgtgtgtggagagctttctatcttaccaagtggtagggctaaaagaacaacagcctttttggtagtcacatagcagaatgatcagagttacattgcttattccaaaacattggttctttttaaaacatttttttttacccaaagaaaagaataatagaaattactaacaataaatataaattcagagtgttgatataggattcagtatccagagtttatttttaatcttaatcctcagcttcttgggagttgctgggcttcagtgtctctgtggtttcaccagcttagcttgagctctggttattttggatcttttctgctttttttaagtaactgagtcatttttaccacacagtccagtttgcatgtatagctaggaaacatgtattgctctagattgggcagtttaagtcattttaaagaaagttagttcatagttgttgccttttaactcatagtcaagcttcagtctttcaaagagaaatgtgtgattttcatttacttgctgatattttgtagtttggagatccttgtgggcattattctaactgatacgtagacacttacttggaaatttttggacattatattaaatgagtgctatctgtgaaattggttatattaggtggcttgactaatgttttttctataattgtatatggactgcatttttaaaaaaaccgcatttgcctttatgctagattgtaaaaaattatattagaatgcataagacatgtttttccttcatatgctagacttttcctagcatttcgtatttctgtgttgtcagtgtgtgatttttaaaccggaatttggtttaaaaaaaatctggtggtaatatatgtgagaaatactttggtgtttaccttatgaaaataaaggattgtaagt

SEQ ID NO: 4116 - DNA, 2108 bp, Homo sapiens
gctgtcccactgggcaggtgcctctgacggagaggaggcgtcgtcgggaagtatgtggccgtggctgctctggcatgatcctgaagactggcacgaaggggaatggagccgcacagagaatttcaggcatcagaggggaagcgcaggtttgtctacagattttgagcgttcgaagttgacccctgactaagtatactttgctgctccctcagcctttgaaaaaatgtctgtcacatatgatgattccgttggagtagaagtgtccagcgacagcttctgggaggtcgggaactacaagcggactgtgaagcggatcgacgatggccaccgcctgtgcagcgacctcatgaactgcctgcatgagcgggcgcgcatcgagaaggcgtatgcgcagcagctcactgagtgggcccggcgctggaggcagctcgtggagaaagggccccagtacgggaccgtggagaaggcctggatggccttcatgtccgaggcagagagggtgagcgagctgcacctcgaggtgaaggcctcactgatgaacgatgacttcgagaagatcaagaactggcagaaggaagcctttcacaagcagatgatgggcggcttcaaggagaccaaggaagctgaggacggctttcggaaggcacagaagccctgggccaagaagctgaaagaggtagaagcagcaaagaaagcccaccatgcagcgtgcaaagaggagaagctggctatctcacgagaagccaacagcaaggcagacccatccctcaaccctgaacagctcaagaaattgcaagacaaaatagaaaagtgcaagcaagatgttcttaagaccaaagagaagtatgagaagtccctgaaggaactcgaccagggcacaccccagtacatggagaacatggagcaggtgtttgagcagtgccagcagttcgaggagaaacgccttcgcttcttccgggaggttctgctggaggttcagaagcacctagacctgtccaatgtggctggctacaaagccatttaccatgacctggagcagagcatcagagcagctgatgcagtggaggacctgaggtggttccgagccaatcacgggccgggcatggccatgaactggccgcagtttgaggagtggtccgcagacctgaatcgaaccctcagccggagagagaagaagaaggccactgacggcgtcaccctgacgggcatcaaccagacaggcgaccagtctctgccgagtaagcccagcagcacccttaatgtcccgagcaaccccgcccagtctgcgcagtcacagtccagctacaaccccttcgaggatgaggacgacacgggcagcaccgtcagtgagaaggacgacactaaggccaaaaatgtgagcagctacgagaagacccagagctatcccaccgactggtcagacgatgagtctaacaaccccttctcctccacggatgccaatggggactcgaatccattcgacgacgacgccacctcggggacggaagtgcgagtccgggccctgtatgactatgaggggcaggagcatgatgagctgagcttcaaggctggggatgagctgaccaagatggaggacgaggatgagcagggctggtgcaagggacgcttggacaacgggcaagttggcctatacccggcaaattatgtggaggcgatccagtgatgagtcggggacaggccagcggggggacggaggcggcgggcccaggagcctcagccagccacgtgggcatccactccttttcctgcaagagatgatggttccattgctcttggcttcatggtgttcctggaaggcagatgagctggtcatttcgcctgggactcggcacctttccgagtgcagctggagggatctgagcgcaggaagacgcagaacaacagaaatagccgcccctccccgcccactgtgcctgttggcctatcatagatctctatgttcttgactttgtctctcctttccgagtcaatggtgggttacactgatcttgttccactgattactctctctgacgagtccatcacctgcaacttaaatgaacaagcttacatcccattttgagtgaagattttgaggtttttaattt

SEQ ID NO: 4117 - DNA, 1939 bp, Homo sapiens
aaactttctctgatctcctctctctctgtgtctgctccaaatgtagacagcaattgtctgggtaggaccagcttataaagaagcatggctttgttaaggaagtcgtattcagagcctcagcttaagggtatagttaccaagctatacagccgacaaggctaccacttgcagctgcaggcggatggaaccattgatggcaccaaagatgaggacagcacttacactctgtttaacctcatccctgtgggtctgcgagtggtggctatccaaggagttcaaaccaagctgtacttggcaatgaacagtgagggatacttgtacacctcggaacttttcacacctgagtgcaaattcaaagaatcagtgtttgaaaattattatgtgacatattcatcaatgatataccgtcagcagcagtcaggccgagggtggtatctgggtctgaacaaagaaggagagatcatgaaaggcaaccatgtgaagaagaacaagcctgcagctcattttctgcctaaaccactgaaagtggccatgtacaaggagccatcactgcacgatctcacggagttctcccgatctggaagcgggaccccaaccaagagcagaagtgtctctggcgtgctgaacggaggcaaatccatgagccacaatgaatcaacgtagccagtgagggcaaaagaagggctctgtaacagaaccttacctccaggtgctgttgaattcttctagcagtccttcacccaaaagttcaaatttgtcagtgacatttaccaaacaaacaggcagagttcactattctatctgccattagaccttcttatcatccatactaaagccccattatttagattgagcttgtgcataagaatgccaagcattttagtgaactaaatctgagagaaggactgccaaattttctcatgatctcacctatactttggggatgataatccaaaagtatttcacagcactaatgctgatcaaaatttgctctcccaccaagaaaatgtaaaagaccacaattgttcttcaaaaacaaacaaaacaaaacaaaacaaaattaactgcttaaatgttttgtcggggcaaacaaaattatgtgaattgtgttgttttcttggcttgatgttttctatctacgcttgattcacatgtactcttttctttggcatagtgcaactttatgatttctgaaattcaatggttctattgactttttgcgtcacttaatccaaatcaaccaaattcagggttgaatctgaattggcttctcaggctcaaggtaacagtgttcttgtggtttgaccaattgtttttctttctttttttttttttttagatttgtggtattctggtcaagttattgtgctgtactttgtgcgtagaaattgagttgtattgtcaaccccagtcagtaaagagaacttcaaaaaattatcctcaagtgtagatttctcttaattccatttgtgtatcatgttaaactattgttgtggcttcttgtgtaaagacaggaactgtggaactgtgatgttgtcttttgtgttgttaaaataagaaatgtcttatctgtatatgtatgagtcttcctgtcattgtatttggcacatgaatattgtgtacaaggaattgttaagactggttttccctcaacaacatatattatacttgctactggaaaagtgtttaagacttagctaggtttccatttagatcttcatatctgttgcatggaagaaagttgggttcttggcatagagttgcatgatatgtaagattttgtgcattcataattgttaaaaatctgtgttccaaaagtggacatagcatgtacaggcagttttctgtcctgtgcacaaaaagtttaaaaaagttgtttaatatttgttgttgtatacccaaatacgcaccgaataaactctttatattcattcaaaga

SEQ ID NO: 4118 - DNA, 1930 bp, Homo sapiens
ggtttgctggttggctcccgagcagacagcaggaaagaagaagcccttcgtgtacacccagggccaggctgtcctaaaccgggccttcttcccttgcttcgacacgcctgctgttaaatacaagtattcagctcttattgaggagccgggtgtgggctgagccctgcctgattgatgctgccaaggaggagtacaacggggtgatagaagaatttttggcaacaggagagaagctttttggaccttatgtttggggaaggtgtggtatcacattgactctagtgtctcctgttaaactgagtcactggcttccattcttcctcttcgtgtggcttttccacctcctgcctcccagagcaaagtttccctgatcccagaagtgaaggagaggaggaagagaggagggtatgacttgctcttcatgccaccgtcctttccatttggaggaatggagaacccttgtctgacctttgtcaccccctgcctgctagctggggaccgctccttggcagatgtcatcatccatgagatctcccacagttggtttgggaacctggtcaccaacgccaactggggtgaattctggctcaatgaaggtttcaccatgtacgcccagaggaggatctccaccatcctctttggcgctgcgtacacctgcttggaggctgcaacggggcgggctctgctgcgtcagcacatggacatcactggagaggaaaacccactcaacaagctccgcgtgaagattgaaccaggcgttgacccggacgacacctataatgagaccccctacgagaaaggtttctgctttgtttcatacctggcccacttggtgggtgatcaggatcagtttgacagttttctcaagggcctatgtgcatgaattcaaattccgaagcatcttagccgatgactttctggacttctacttggaatatttccctgagcttaagaaaaagagagtggatatcattccaggttttgagtttgatcgatggctgaatacccccggctggcccccgtacctccctgatctctcccctggggactcactcatgaagcctgctgaagagctagcccaactgtgggcagccgaggagctggacatgaaggccattgaagccgtggccatctctccctggaagacctaccagctggtctacttcctggataagatcctccagaaatcccctctccctcctgggaatgtgaaaaaacttggagacacatacccaagtatctcaaatgcccggaatgcagagctccggctgcgatggggccaaatcgtccttaagaacgaccaccaggaagatttctggaaagtgaaggagttcctgcataaccaggggaagcagaagtatacacttccgctgtaccacgcaatgatgggtggcagtgaggtggcccagaccctcgccaaggagacttttgcatccaccgcctcccagctccacagcaatgttgtcaactatgtccagcagatcgtggcacccaagggcagttagaggctcgtgtgcatggcccctgcctcttcaggctctccaggctttcagaataattgtttgttcccaaattcctgttccctgatcaacttcctggagtttatatcccctcaggataatctattctctagcttaggtatctgtgactcttgggcctctgctctggtgggaacttacttctctatagcccactgagccccgagacagagaacctgcccacagctctccccgctacaggctgcaggcactgcagggcagcgggtattctcctccccacctaagtctctgggaagaagtggagaggactgatgctcttcttttttctctttctgtcctttttcttgctgattttatgcaaagggctggcattctgattgttcttttttcaggtttaatccttattttaataaagttttcaagcaaaaatt

SEQ ID NO: 4119 - DNA, 1677 bp, Homo sapiens
  misc_feature (305)..(493): n is a, c, g, or t
  misc_feature (554)..(1144): n is a, c, g, or t
ggctgcggtacggcgtgttggtcccagcggttcagctgaggtagggacgtgctgtaggccggaatgttaccggctgttggatctgcggatgaggaggatgatcctgcggaggaggattgtcctgaattggttcccatggagacgacgcaaagcgaggaggaggaaaagtctggcctcggcgccaagatcccagtcacaattatcactgggtatttaggtgctgggaagacaacacttctgaactatattttgacagagcaacatagtaaaagagtagcggtcattttaaatgaatttggggaagnnnnnnnnnnnnnnnnnnnnnnnnnnnnnnnnnnnnnnnnnnnnnnnnnnnnnnnnnnnnnnnnnnnnnnnnnnnnnnnnnnnnnnnnnnnnnnnnnnnnnnnnnnnnnnnnnnnnnnnnnnnnnnnnnnnnnnnnnnnnnnnnnnnnnnnnnnnnnnnnnnnnnnnnnnnnnnnnnnnnnnnnnnnnngtgcagtggcttctatgttttgggttgatgctgaattagggagtgatatttaccttgatgnnnnnnnnnnnnnnnnnnnnnnnnnnnnnnnnnnnnnnnnnnnnnnnnnnnnnnnnnnnnnnnnnnnnnnnnnnnnnnnnnnnnnnnnnnnnnnnnnnnnnnnnnnnnnnnnnnnnnnnnnnnnnnnnnnnnnnnnnnnnnnnnnnnnnnnnnnnnnnnnnnnnnnnnnnnnnnnnnnnnnnnnnnnnnnnnnnnnnnnnnnnnnnnnnnnnnnnnnnnnnnnnnnnnnnnnnnnnnnnnnnnnnnnnnnnnnnnnnnnnnnnnnnnnnnnnnnnnnnnnnnnnnnnnnnnnnnnnnnnnnnnnnnnnnnnnnnnnnnnnnnnnnnnnnnnnnnnnnnnnnnnnnnnnnnnnnnnnnnnnnnnnnnnnnnnnnnnnnnnnnnnnnnnnnnnnnnnnnnnnnnnnnnnnnnnnnnnnnnnnnnnnnnnnnnnnnnnnnnnnnnnnnnnnnnnnnnnnnnnnnnnnnnnnnnnnnnnnnnnnnnnnnnnnnnnnnnnnnnnnnnnnnnnnnnnnnnnnnnnnnnnnnnnnnnnnnnnnnnnnnnnnnnnnnnnnnnnnnnnnnnnnnnnnnnnnnnnnnnnnnnnnnnnnnnngcagaaatttagataaggatatccttaaacagctgtttatagctactgtgacagaaacagaaaagcagtggacaacacgtttccaagaagatcaagtttgtacataacactagaggcatttcttatcaaaaggattggataataaaaataagtttctactgggtatatttcaagcatttatttattactttagttacgaattccaatatactttaaaatggtatttgttttacagcatacataaaatgtagcaaatcagtactgtaaaacatttaacattcatacagttatatataatatccttttttttaaagaatggtatttcacaaaaatatcttttgaaattggctttggagtttacatatactgaacatgaaagtttataataatgatgatacaactttcaacattgtcattttttcttagaacttcagctgattgcagagatataatgattacattgttattaaatttttttaacacaagtaagtgtcaccattttatgacatgaaataaaaggttatgactgttat

SEQ ID NO: 4120 - DNA, 2165 bp, Homo sapiens
agagcggggtcccggcaccgcggcgctcgggtgtttttgggggcccgggtggagggcccgggtgccggggcccaaggtgcggcctcgctagcgggagagggagcgggatcaccggcccggagagagctctcagggccagagcggggcaggaggatgctttcccagccccaccatggagctgcgctgtgggggattgctgttcagttctcgctttgattcagggaatctagcccacgtggagaaggtggaatctttgtccagtgatggggaaggggtaggaggtggggcgtcagccctgaccagtggcattgcctcttcccctgactatgaattcaacgtgtggacccgaccagactgtgctgaaacggaatttgagaatgggaacaggtcatggttctacttcagcgtccggggaggaatgccaggaaaactcatcaagatcaacattatgaacatgaacaagcagagcaagctgtattcccagggcatggccccctttgtgcgcacactgcccacccggccacgctgggaacgcattcgagaccggcccacctttgagatgacagagacgcagtttgtgttatcctttgttcatcgtttcgtggagggccgtggggccaccaccttcttcgccttctgctaccccttctcctacagtgactgccaggaactgctaaaccagctagaccagcgctttccggagaaccaccctacccatagcagccccctggataccatctattaccatcgggagctcctttgctattctctggatggacttcgtgtagatctgctgacgatcacttcctgccatgggcttcgagaagatcgagagccccgtctagagcagctatttcctgataccagcacccctcgaccattccgtttcgcaggcaagaggatattcttcttaagcagtagagtacacccaggggagactccatctagctttgtcttcaatggctttctggacttcatcctccgacctgatgatccccgggcccaaaccctccgtcgcctcttcgtctttaagctgattcccatgttgaaccccgatggtgtggtccggggacactaccggtaagtggcttccccagcctgtctggactgttcccatttcccctcatgccctgcatctcagtgaaattctgtcagccttctggcttctgtgttcccagtcctcttgcaccctaataaaggcaagcccatctcatcttcctgagaaagcatgagatcatatctagtggcactcccagaaaggaaccaaactaggatgactgcaggcccatctgggtggaggcagctaccctgaggaagctccttagggttctatgcacagactcacgtggagtgaatctgaaccgtcagtacctgaagcctgatgccgtcctgcacccggccatctatggggccaaagctgtgcttctctaccaccatgtgcactctcgtctgaactcccagagttcctctgagcaccagcccagttcctgtctccctcctgatgctcctgtttctgacctggagaaagccaacaatctccaaaatgaagctcagtgtgggcactcagctgacaggcataacgctgaagcctggaaacaaacagagccagcagaacagaagctcaacagtgtgtggattatgccacaacagtctgcggggcttgaagagtcagcccctgataccatcccccccaaagagagtggcgttgcttactatgtggacctgcatggacatgcttccaaaaggggctgcttcatgtacggaaacagctttagtgatgagagcacccaggtggaaaacatgctatatccaaagctcatctccttgaattcagcccacttcgacttccagggctgcaatttctcagagaagaatatgtatgcccgagaccgtagagatggccagtctaaagagggaagcggccgtgttgcaatctacaaagcctcagggataatccacaggttgggtggaagctgagatatagttgatgaaatagcttccctaaagaaaacaccgtagctgggtgtggtggtgcatgcttgtaatcccagctactgaggaggctgaggcaggagaatcgcttgaacctgggaggcagaggttgtggcgagccgagatcgtgccattgcactccagcctgggcaacaagagcgaaactccgtctc

SEQ ID NO: 4121 - DNA, 1673 bp, Homo sapiens
gctcagaaacgccaaaatctacgtggagagagctgtcaagcagaagaagatctttacaatccaaggctgctacccggtgatccggtgtctcttgcgccggaggggctgggtggagaagaagatggtccatcgctcaggccccaccctgctgccaccccagaaggatctggatagctcagcgatgggtgacagtgacaccactgaggatgaggatgaagatgaggacgaggagttccagccatcacagctgttcgacttcgatgatttactgaaatttgatgacctagatggaacacatgctctgatgcgaaggggcagaactcaggcacctcgacactcaggtccagcgctgtgaggacatcctgcagcagctgcaggccgtggtaccccagatagacatggaaggggatcgcaacatctggatcgtgaagccaggagccaagtcccgcggacgaggcatcatgtgcatggaccacctggaggagatgctgaagctggtgaacggcaaccccgtggtgatgaaggacggcaagtgggtggtgcagaagtatattgagcggcccctcctcatctttggcaccaagtttgacctcagacagtggttcctggtaactgactggaacccacttaccgtgtggttctaccgcgacagctatatccgcttttccacgcagcccttctccctgaagaacctggacaactcagtgcacctgtgcaacaactccatccagaagcacctggagaactcatgccatcggcatccactgcttccgccagacaacatgtggtctagccagaggttccaggcccacctgcaggagatgggtgccccaaatgcttggtccaccatcatcgtgcctggcatgaaggatgctgtgatccacgcacttcagacctcccaggacaccgtgcagtgtcggaaggccagctttgagctctatggcgctgacttcgtgttcggggaggacttccagccctggctgattgagatcaacgccagccccacgatggcaccctccacagcagtcactgcccggctctgtgctggcgtgcaagctgacaccctgcgcgtggtcattgaccggatgctggaccgcaactgtgacacaggagcctttgagctcatctataagcagcccgtcaccacttccccagcctccacaccaaggcccagctgccttctccccatgtactccgacaccagggccaggtcctcagacgacagcacagcaagctggtgggcactaaggccctgtcgaccacaggcaaggccttgaggactctacccacggctaaggtcttcatttccctcccaccgaaccttgatttcaaggtggcacccagcatcctgaagccaagaaaggctcctgctctcctgtgcctccgaggcccccagctggaagtgccttgttgcctctgccctttgaagtcggaacaattcctagcacctgtcggaaggtcaaggccaaaggcaaattcaaggccagactgtgacaaacccagggctgaggcctgccccatgaagaggctgagccccctgaaacccctgccccttgttggtacattccagaggcgcaggggcctgggggatatgaagctagggaagcccctgcttcgattccccactgcccttgtcctggatccaacaccaaataaaaagaaacaagtgaagt

SEQ ID NO: 4122 - DNA, 1424 bp, Homo sapiens
gaccagactcgtctcaggccagttgcagccttctcagccaaacgccgaccaaggaaaactcactaccatgagaattgcagtgatttgcttttgcctcctaggcatcacctgtgccataccagttaaacaggctgattctggaagttctgaggaaaagcagctttacaacaaatacccagatgctgtggccacatggctaaaccctgacccatctcagaagcagaatctcctagccccacagaatgctgtgtcctctgaagaaaccaatgactttaaacaagagacccttccaagtaagtccaacgaaagccatgaccacatggatgatatggatgatgaagatgatgatgaccatgtggacagccaggactccattgactcgaacgactctgatgatgtagatgacactgatgattctcaccagtctgatgagtctcaccattctgatgaatctgatgaactggtcactgattttcccacggacctgccagcaaccgaagttttcactccagttgtccccacagtagacacatatgatggccgaggtgatagtgtggtttatggactgaggtcaaaatctaagaagtttcgcagacctgacatccagtaccctgatgctacagacgaggacatcacctcacacatggaaagcgaggagttgaatggtgcatacaaggccatccccgttgcccaggacctgaacgcgccttctgattgggacagccgtgggaaggacagttatgaaacgagtcagctggatgaccagagtgctgaaacccacagccacaagcagtccagattatataagcggaaagccaatgatgagagcaatgagcattccgatgtgattgatagtcaggaactttccaaagtcagccgtgaattccacagccatgaatttcacagccatgaagatatgctggttgtagaccccaaaagtaaggaagaagataaacacctgaaatttcgtatttctcatgaattagatagtgcatcttctgaggtcaattaaaaggagaaaaaatacaatttctcactttgcatttagtcaaaagaaaaaatgctttatagcaaaatgaaagagaacatgaaatgcttctttctcagtttattggttgaatgtgtatctatttgagtctggaaataactaatgtgtttgataattagtttagtttgtggcttcatggaaactccctgtaaactaaaagcttcagggttatgtctatgttcattctatagaagaaatgcaaactatcactgtattttaatatttgttattctctcatgaatagaaatttatgtagaagcaaacaaaatacttttacccacttaaaaagagaatataacattttatgtcactataatcttttgttttttaagttagtgtatattttgttgtgattatctttttgtggtgtgaataa

SEQ ID NO: 4123 - DNA, 3789 bp, Homo sapiens
tttttagaaaaaaaaaatatatttccctcctgctccttctgcgttcacaagctaagttgtttatctcggctgcggcgggaactgcggacggtggcgggcgagcggctcctctgccagagttgatattcactgatggactccaaagaatcattaactcctggtagagaagaaaaccccagcagtgtgcttgctcaggagaggggagatgtgatggacttctataaaaccctaagaggaggagctactgtgaaggtttctgcgtcttcaccctcactggctgtcgcttctcaatcagactccaagcagcgaagacttttggttgattttccaaaaggctcagtaagcaatgcgcagcagccagatctgtccaaagcagtttcactctcaatgggactgtatatgggagagacagaaacaaaagtgatgggaaatgacctgggattcccacagcagggccaaatcagcctttcctcgggggaaacagacttaaagcttttggaagaaagcattgcaaacctcaataggtcgaccagtgttccagagaaccccaagagttcagcatccactgctgtgtctgctgcccccacagagaaggagtttccaaaaactcactctgatgtatcttcagaacagcaacatttgaagggccagactggcaccaacggtggcaatgtgaaattgtataccacagaccaaagcacctttgacattttgcaggatttggagttttcttctgggtccccaggtaaagagacgaatgagagtccttggagatcagacctgttgatagatgaaaactgtttgctttctcctctggcgggagaagacgattcattccttttggaaggaaactcgaatgaggactgcaagcctctcattttaccggacactaaacccaaaattaaggataatggagatctggttttgtcaagccccagtaatgtaacactgccccaagtgaaaacagaaaaagaagatttcatcgaactctgcacccctggggtaattaagcaagagaaactgggcacagtttactgtcaggcaagctttcctggagcaaatataattggtaataaaatgtctgccatttctgttcatggtgtgagtacctctggaggacagatgtaccactatgacatgaatacagcatccctttctcaacagcaggatcagaagcctatttttaatgtcattccaccaattcccgttggttccgaaaattggaataggtgccaaggatctggagatgacaacttgacttctctggggactctgaacttccctggtcgaacagttttttctaatggctattcaagccccagcatgagaccagatgtaagctctcctccatccagctcctcaacagcaacaacaggaccacctcccaaactctgcctggtgtgctctgatgaagcttcaggatgtcattatggagtcttaacttgtggaagctgtaaagttttcttcaaaagagcagtggaaggacagcacaattacctatgtgctggaaggaatgattgcatcatcgataaaattcgaagaaaaaactgcccagcatgccgctatcgaaaatgtcttcaggctggaatgaacctggaagctcgaaaaacaaagaaaaaaataaaaggaattcagcaggccactacaggagtctcacaagaaacctctgaaaatcctggtaacaaaacaatagttcctgcaacgttaccacaactcacccctaccctggtgtcactgttggaggttattgaacctgaagtgttatatgcaggatatgatagctctgttccagactcaacttggaggatcatgactacgctcaacatgttaggagggcggcaagtgattgcagcagtgaaatgggcaaaggcaataccaggtttcaggaacttacacctggatgaccaaatgaccctactgcagtactcctggatgtttcttatggcatttgctctggggtggagatcatatagacaatcaagtgcaaacctgctgtgttttgctcctgatctgattattaatgagcagagaatgactctaccctgcatgtacgaccaatgtaaacacatgctgtatgtttcctctgagttacacaggcttcaggtatcttatgaagagtatctctgtatgaaaaccttactgcttctctcttcagttcctaaggacggtctgaagagccaagagctatttgatgaaattagaatgacctacatcaaagagctaggaaaagccattgtcaagagggaaggaaactccagccagaactggcagcggttttatcaactgacaaaactcttggattctatgcatgaaaatgttatgtggttaaaaccagaaagcacatctcacacattaatctgattttcatcccaacaatcttggcgctcaaaaaatagaactcaatgagaaaaagaagattatgtgcacttcgttgtcaataataagtcaactgatgctcatcgacaactataggaggcttttcattaaatgggaaaagaagctgtgcccttttaggatacgtgggggaaaagaaagtcatcttaattatgtttaattgtggatttaagtgctatatggtggtgctgtttgaaagcagatttatttcctatgtatgtgttatctggccatcccaacccaaactgttgaagtttgtagtaacttcagtgagagttggttactcacaacaaatcctgaaaagtatttttagtgtttgtaggtattctgtgggatactatacaagcagaactgaggcacttaggacataacacttttggggtatatatatccaaatgcctaaaactatgggaggaaaccttggccaccccaaaaggaaaactaacatgatttgtgtctatgaagtgctggataattagcatgggatgagctctgggcatgccatgaaggaaagccacgctcccttcagaattcagaggcagggagcaattccagtttcacctaagtctcataattttagttcccttttaaaaaccctgaaaactacatcaccatggaatgaaaaatattgttatacaatacattgatctgtcaaacttccagaaccatggtagccttcagtgagatttccatcttggctggtcactccctgactgtagctgtaggtgaatgtgtttttgtgtgtgtgtgtctggttttagtgtcagaagggaaataaaagtgtaaggaggacactttaaaccctttgggtggagtttcgtaatttcccagactattttcaagcaacctggtccacccaggattagtgaccaggttttcaggaaaggatttgcttctctctagaaaatgtctgaaaggattttattttctgatgaaaggctgtatgaaaataccctcctcaaataacttgcttaactacatatagattcaagtgtgtcaatattctattttgtatattaaatgctatataatggggacaaatctatattatactgtgtatggcattattaagaagctttttcattattttttatcacagtaattttaaaatgtgtaaaaattaaaaccagtgactcctgtttaaaaataaaagttgtagttttttattcatgctgaataataatctgtagttaaaaaaaaagtgtctttttacctacgcagtgaaatgtcagactgtaaaaccttgtgtggaaatgtttaacttttattttttcatttaaatttgctgttctggtattaccaaaccacacatttgtaccgaattggcagtaaatgttagccatttacagcaatgccaaatatggagaaacatcataataaaaaaatctgcttttt

SEQ ID NO: 4124 - DNA, 1967 bp, Homo sapiens
  misc_feature (392)..(494): n is a, c, g, or t
ctctgtcattctactgcggccgccctggcttccttctacctgtgcggccctcaacgtctccttggtgcgggacacgcttcactttcggctcccggagtctccctccactgctcagacctctggacctgacaggagacgcctacttggctctgacgcggcgccccagcccggctgtgtccccggcgccccggaccaccctccctgccggctttgggtgcgttgtggggtccgaggattcgcgagatttgttgaaagacattcaagattacgaagtttagatgaccaaaatggatatccgaggtgctgtggatgctgctgtccccaccaatattattgctgccaaggctgcagaagttcgtgcaaacaaagtcaactggcaatcctatcttcannnnnnnnnnnnnnnnnnnnnnnnnnnnnnnnnnnnnnnnnnnnnnnnnnnnnnnnnnnnnnnnnnnnnnnnnnnnnnnnnnnnnnnnnnnnnnnnnnnnnnntgtgctaaaacatttataaatctgatgactcatatctgcaaagaacagaccgttcagtatatactaactatggtggatgatatgctgcaggaaaatcatcagcgtgttagcattttctttgactatgcaagatgtagcaagaacactgcgtggccctactttctgccaatgttgaatcgccaggatcccttcactgttcatatggcagcaagaattattgccaagttagcagcttggggaaaagaactgatggaaggcagtgacttaaattactatttcaattggataaaaactcagctgagttcacagagttcgcagtatgtgcagtgcgtggccgggtgtttgcagctgatgctccgggtcaatgagtaccgctttgcttgggtggaagcagatggggtaaattgcataatgggagtgttgagtaacaagtgtggctttcagctccagtatcaaatgattttttcaatatggctcctggcattcagtcctcaaatgtgtgaacacctgcggcgctataatatcattccagttctgtctgatatccttcaggagtctgtcaaagagaaagtaacaagaatcattcttgcagcatttcgtaactttttagaaaaatcaactgaaagagaaactcgccaagaatatgccctggctatgattcagtgcaaagttctgaaacagttggagaacttggaacagcagaagtacgatgatgaagatatcagcgaagatatcaaatttcttttggaaaaacttggagagagtgtccaggaccttagttcatttgatgaatacagttcagaacttaaatctggaaggttggaatggagtcctgtgcacaaatctgagaaattttggagagagaatgctgtgaggttaaatgagaagaattatgaactcttgaaaatcttgacaaaacttttggaagtgtcagatgatccccaagtcttagctgttgctgctcacgatgttggagaatatgtgcggcattatccacgaggcaaacgggtcatcgagcagctcggtgggaagcagctggtcatgaaccacatgcatcatgaagaccagcaggtccgctataatgctctgctggccgtgcagaagctcatggtgcacaactgggaataccttggcaagcagctccagtccgagcagccccagaccgctgccgcccgaagctaagcctgcctctggccttcccctccgcctcaatgcagaaccagtagtgggagcactgtgtttagagttaagagtgaacactgtttgattttacttggaatttcctctgttatatagcttttcccaatgctaatttccaaacaacaacaacaaaataacatgtttgcctgttaagttgtataaaagtaggtgattctgtatttaaagaaaatattactgttacatatactgcttgcaatttctgtatttattgttctctggaaataaatatagttattaaaggattctcactcc

SEQ ID NO: 4125 - DNA, 1844 bp, Homo sapiens
agagtcgggtagacggcagcgggagcggtggcgtctccccgccttccctccctcccgggcctgggcgcccagccggacaggtgagcggcagccaggtgagcgcgcccacctgcgcctctccgcgcggcccgccctccccggcgccgggctcctctccgcgcccctgtcggcgcggaaccctggcctcgtccgcggcccagctccctggagcctcgcatcagcgggggcgcccccgcgagctgcgctctccccggccggagcgctcctcctccagcccccagcccgcagggtactttgccctcggagcgaaggaggctccagaactggtagagccgggccatcgggctgggcacctccccgcggcgcccgcagcgcggagtccactgaccggctcaaaggtatggcgttgacggtggatgtggccgggccagcgccctggggcttccgtatcacagggggcagggatttccacacgcccatcatggtgactaaggtggccgagcggggcaaagccaaggacgctgacctccggcctggagacataatcgtggccatcaacggggaaagcgcggagggcatgctgcatgccgaggcccagagcaagatccgccagagcccctcgcccctgcggctgcagctggaccggtctcaggctacgtctccagggcagaccaatggggacagctccttggaagtgctggcgactcgcttccagggctccgtgaggacatacactgagagtcagtcctccttaaggtcctcctactccagcccaacctccctcagcccgagggccggcagccccttctcaccaccaccctctagcagctccctcactggagaggcagccatcagccgcagcttccagagtctggcatgttccccgggcctccccgctgctgaccgcctgtcctactcaggccgccctggaagccgacaggccggcctcggccgcgctggcgactcggcggtgctggtgctgccgccttccccgggccctcgttcctccaggcccagcatggactcggaagggggaagcctcctcctggacgaggactcggaagtcttcaagatgctgcaggaaaatcgcgagggacgggcggccccccgacagtccagctcctttcggctcttgcaggaagccctggaggctgaggagagaggtggcacgccagccttcttgcccagctcactgagcccccagtcctccctgcccgcctccagggccctggccacccctcccaagctccacacttgtgagaagtgcagtaccagcatcgcgaaccaggctgtgcgcatccaggagggccggtaccgccaccccggctgctacacctgtgccgactgtgggctgaacctgaagatgcgcgggcacttctgggtgggtgacgagctgtactgtgagaagcatgcccgccagcgctactccgcacctgccaccctcagctctcgggcctgagcccgccatgccctcagcctgcctcactgctgggccagggtcatgcctatataagttggcatggcagggacaatggtgggcagttgctcttacatgagctaagtttggagacctgaggcccctttgtcctcgctgggtgggccaaggtctgggacctgtcttggactgtgggagactcaccctcaccttgccaggcctctcccctgcaggactggcattgcactagtctgaggtggccactgcctttgatcaacctttgtgtgcgagggtctaagtagggtcgaacacagaagtgggaaggagaggggtgggccaggggctaatggtgtcactgtgtaaagtttttgacatactagctctataaatatatgaatatggacaaaat

SEQ ID NO: 4126 - DNA, 2643 bp, Homo sapiens
accatgttcagccagcagcagcagcagcagctccagcaacagcagcaggccccgttgcccatggctgtcagccgggggctccccccgcagcagccacagcagccgcttctgaatctccagggcaccaactcagcctccctcctcaacggctccatgctgcagagagctttgcttttacagcagttgcaaggactggaccagtttgcaatgccaccagccacgtatgacactgccggtctcaccatgcccacagcaacactgggtaacctccgaggctatggcatggcatccccaggcctcgcagcccccagcctcacacccccacaactggccactccaaatttgcaacagttctttccccaggccactcgccagtccttgctgggacctcctcctgttggggtccccatgaacccttcccagttcaacctttcaggacggaacccccagaaacaggcccggacctcctcctctaccacccccaatcgaaaggattcttcttctcagacaatgcctgtggaagacaagtcagaccccccagaggggtctgaggaagccgcagagccccggatggacacaccagaagaccaagatttaccgccctgcccagaggacatcgccaaggaaaaacgcactccagcacctgagcctgagccttgtgaggcgtccgagctgccagcaaagagattgaggagctcagaagagcccacagagaaggaacctccagggcagttacaggtgaaggcccagccgcaggcccggatgacagtaccgaaacagacacagacaccagacctgctgcctgaggccctggaagcccaagtgctgccacgattccagccacgggtcctgcaggtccaggcccaggtgcagtcacagactcagccgcggataccatccacagacacccaggtgcagccaaagctgcagaagcaggcgcaaacacagacctctccagagcacttagtgctgcaacagaagcaggtgcagccacagctgcagcaggaggcagagccacagaagcaggtgcagccacaggtacagccacaggcacattcacagggcccaaggcaggtgcagctgcagcaggaggcagagccgctgaagcaggtgcagccacaggtgcagccccaggcacagccaagcgtccagccacaggagcatcctccagcgcaggtgtcagtacagccaccagagcagacccatgagcagcctcacacccagccgcaggtgtcgttgctggctccagagcaaacaccagttgtggttcatgtctgcgggctggagatgccacctgatgcagtagaagctggtggaggcatggaaaagaccttgccagagcctgtgggcacccaagtcagcatggaagagattcagaatgagtcggcctgtggcctagatgtgggagaatgtgaaaacagagcgagagagatgccaggggtatggggcgccgggggctccctgaaggtcaccattctgcagagcagtgacagccgggcctttagcactgtacccctgacacctgtcccccgccccagtgactccgtctcctccacccctgcggctaccagcactccctctaagcaggccctccagttcttctgctacatctgcaaggccagctgctccagccagcaggagttccaggaccacatgtcggagcctcagcaccagcagcggctaggggagatccagcacatgagccaagcctgcctcctgtccctgctgcccgtgccccgggacgtcctggagacagaggatgaggagcctccaccaaggcgctggtgcaacacctgccagctctactacatgggggacctgatccaacaccgcaggacacaggaccacaagattgccaaacaatccttgcgacccttctgcaccgtttgcaaccgctacttcaaaacccctcgcaagtttgtggagcacgtgaagtcccaggggcataaggacaaagccaaggagctgaagtcgcttgagaaagaaattgctggccaagatgaggaccacttcattacagtggacgctgtgggttgcttcgagggtgatgaagaagaggaagaggatgatgaggatgaagaagagatcgaggttgaggaggaactctgcaagcaggtgaggtccagagatatatccagagaggagtggaagggctcggagacctacagccccaatactgcatatggtgtggacttcctggtgcccgtgatgggctatatctgccgcatctgccacaagttctatcacagcaactcaggggcacagctctcccactgcaagtccctgggccactttgagaacctgcagaaatacaaggcggccaagaaccccagccccaccacccgacctgtgagccgccggtgcgcaatcaacgcccggaacgctttgacagccctgttcacctccagcggccgcccaccctcccagcccaacacccaggacaaaacacccagcaaggtgacggctcgaccctcccagcccccactacctcggcgctcaacccgcctcaaaacctgatagagggacctccctgtccctggcctgcctgggtccagatctgctaatgctttttaggagtctgcctggaaactttgacatggttcatgtttttactcaaaatccaataaaacaaggtagtttggc

SEQ ID NO: 4127 - DNA, 3854 bp, Homo sapiens
gggtgaggtcgctgagggcccgccggagatgttttccttgtcgagcacggtgcaaccccaggttacagttcctctgagtcatctcatcaatgccttccatacaccaaaaaacacttctgtttctctcagtggagtgtcagtttctcaaaaccagcatcgagatgtagttcctgagcatgaggctcccagcagtgagtgtatgttcagtgacttcctgacgaagcttaacattgtttcaattggcaaaggaaaaatattcgaagggtacagatccatgttcatggagccagcaaaaaggatgaagaagagcttggacacaaccgataactggcacatccgtccagaacccttctccctctcaatccctccttcacttaacttaagggaccttggattatctgaactaaaaattggacagattgatcagctggtagaaaatctacttcctggattttgtaaaggcaaaaacatttcttcccattggcatacatcccatgtctctgcacaatccttctttgaaaataaatatggtaacttagatatatttagtacattacgttcctcttgcttgtatcgacatcattcaagagctcttcaaagcatttgttcagatcttcagtactggccagttttcatacagtctcggggttttaaaactttgaaatcaaggacacgacgtctccagtctacctccgagagattagctgaaacacagaatatagcgccatcattcgtgaaggggtttcttttgcgggacagaggatcagatgttgagagtttggacaaactcatgaaaaccaaaaatatacctgaagctcaccaagatgcatttaaaactggttttgcggaaggttttctgaaagctcaagcactcacacaaaaaaccaatgattccctaaggcgaacccgtctgattctcttcgttctgctgctattcggcatttatggacttctaaaaaacccatttttatctgtccgcttccggacaacaacagggcttgattctgcagtagatcctgtccagatgaaaaatgtcacctttgaacatgttaaaggggtggaggaagctaaacaagaattacaggaagttgttgaattcttgaaaaatccacaaaaatttactattcttggaggtaaacttccaaaaggaattcttttagttggacccccagggactggaaagacacttcttgcccgagctgtggcgggagaagctgatgttcctttttattatgcttctggatccgaatttgatgagatgtttgtgggtgtgggagccagccgtatcagaaatctttttagggaagcaaaggcgaatgctccttgtgttatatttattgatgaattagattctgttggtgggaagagaattgaatctccaatgcatccatattcaaggcagaccataaatcaacttcttgctgaaatggatggttttaaacccaatgaaggagttatcataataggagccacaaacttcccagaggcattagataatgccttaatacgtcctggtcgttttgacatgcaagttacagttccaaggccagatgtaaaaggtcgaacagaaattttgaaatggtatctcaataaaataaagtttgatcaatccgttgatccagaaattatagctcgaggtactgttggcttttccggagcagagttggagaatcttgtgaaccaggctgcattaaaagcagctgttgatggaaaagaaatggttaccatgaaggagctggagttttccaaagacaaaattctaatggggcctgaaagaagaagtgtggaaattgataacaaaaacaaaaccatcacagcatatcatgaatctggtcatgccattattgcatattacacaaaagatgcaatgcctatcaacaaagctacaatcatgccacgggggccaacacttggacatgtgtccctgttacctgagaatgacagatggaatgaaactagagcccagctgcttgcacaaatggatgttagtatgggaggaagagtggcagaggagcttatatttggaaccgaccatattacaacaggtgcttccagtgattttgataatgccactaaaatagcaaagcggatggttaccaaatttggaatgagtgaaaagcttggagttatgacctacagtgatacagggaaactaagtccagaaacccaatctgccatcgaacaagaaataagaatccttctaagggactcatatgaacgagcaaaacatatcttgaaaactcatgcaaaggagcataagaatctcgcagaagctttattgacctatgagactttggatgccaaagagattcaaattgttcttgaggggaaaaagttggaagtgagatgataactctcttgatatggatgcttgctggttttattgcaagaatacaagtagcattgcagtagtctacttttacaacgctttcccctcattcttgatgtggtgtaattgaagggtgtgaaatgctttgtcaatcatttgtcacatttatccagtttgggttattctcattatgacacctattgcaaattagcatcccatggcaaatatattttgaaaaaataaagaactatcaggattgaaaacagctcttttgaggaatgtcaattagttattaagttgaaagtaattaatgattttatgtttggttactctactagatttgataaaaattgtgcctttagccttctatatacatcagtggaaacttaagatgcagtaattatgttccagattgaccatgaataaaatattttttaatctaaatgtagagaagttgggattaaaagcagtctcggaaacacagagccaggaatatagccttttggcatggtgccatggctcacatctgtaatcccagcacttttggaggctgaggcgggtggattgcttgaggccaggagttcgagaccagcctggccaacgtggtgaaacgctgtctctactaaaatacaaaaaaatagggctgggcgcggttgctcacgcctgtaatcccagcacttttcagaggccaaggcgggcaaatcacctgaggtcaagagtttgagaccagcctggccaacatggtgaaaccccatctctactaaacatgcaaaaattacctgggcatggtggcaggtgcttataatcccagctactctgggggccaaggcaggagaattgcttgagcctgggagatggaggttgcagtgagctgagatcatgccactgcactccagcctgggcaacagagcaagactctgcctcaaaaaaaaattaaaataaatttaaatacaaaaaaaaatagccaggtgtggggtgcatgcctggaatcccagctacttgagaggctgaggcacgagaattgcttgaacccaggaggtggaggttgcagtgagccaagatcacaggagccactgcactccagcctgggtgacagagtgagactctgtctcaaaaaaaaattaaataaattattataacctttcagaaatgctgtgtgcattttcatgttcttttttttagcattactgtcactctccctaatgaaatgtacttcagagaagcagtattttgttaaataaatacataacctcattctgaataatgtccctcattttgactataactgtgcttggtttcaaaagcaaaattaaacaaaaatctcagtcccctccgaagtgaactttgtgttaccctgcgtcagaaatgccaagttgtgtttacttttcattcagattttgtgaatatgaacatgctgttataggatctacagatgaatatttaactcaatagaaaaattattttagaacacattgtattggtattacaaccagattatattcttgacgttgacttcattaaaatt

SEQ ID NO: 4128 - DNA, 4102 bp, Homo sapiens
gttcggggagcccacttccgagcagacggggacagctgctgggaaaactattgctcaaaccacagcccccgtgtcctggaagccccaggattcttcggaacagccacaggagaagctctgcaagaatccatgtgcgatgtttgctgctggagagatcaaaacgccgacaggggagggccttcttgactcacccagcaaaaccatgtctattaaagaaagattggcactgttgaagaaaagcggggaggaagattggagaaacagactcagcaggaggcaggagggcggcaaggcgccggccagcagcctgcacacccaggaagcagggcggtccctcatcaagaagcgggtcacagaaagtcgagagagccaaatgacgattgaggagaggaagcagctcatcactgtgagagaggaggcctggaagacgagaggcagaggagcggccaacgactcgacccagttcactgtggctggcaggatggtgaagaaaggtttggcgtcacctactgccataaccccagtagcctcacccatttgcggtaaaacaagaggcaccacacccgtttccaaacccctggaagatatcgaagccagaccagatatgcagttagaatcggacctgaagttggacaggctggaaacctttctaagaaggctgaataacaaagttggcgggatgcacgaaacggtgctcactgtcaccggcaaatctgtgaaggaggtgatgaagccagatgatgatgaaacctttgccaaattttaccgcagcgtggattataatatgccaagaagtcctgtggagatggatgaggacttcgatgtcattttcgatccttatgcacccaaattgacgtcttccgtggccgagcacaagcgggcagttaggcccaagcgccgggttcaggcctccaaaaaccccctgaaaatgctggcggcaagagaagatctccttcaggaatacactgagcagagattaaacgttgccttcatggagtcaaagcggatgaaagtagaaaagatgtcttccaactccaacttctcagaagtcaccctggcgggtttagccagtaaagaaaacttcagcaacgtcagcctgcggagcgtcaacctgacggaacagaactctaacaacagcgccgtgccctacaagaggctgatgctgttgcagattaaaggaagaagacatgtgcagaccaggctggtggaacctcgagcttcggcgctcaacagtggggactgcttcctcctgctctctccccactgctgcttcctgtgggtaggagagtttgcaaacgtcatagaaaaggcgaaggcctcagaacttgcaactttaattcagacaaagagggaacttggttgtagagctacttatatccaaaccattgaagaaggaattaatacacacactcatgcagccaaagacttctggaagcttctgggtggccaaaccagttaccaatctgctggagacccaaaagaagatgaactctatgaagcagccataatagaaactaactgcatttaccgtctcatggatgacaaacttgttcctgatgacgactactgggggaaaattccgaagtgctcccttctgcaacccaaagaggtactggtgtttgattttggtagtgaagtttacgtatggcatgggaaagaagtcacattagcacaacgaaaaatagcatttcagctggcaaagcacttatggaatggaacctttgactatgagaactgtgacatcaatcccctggatcctggagaatgcaatccgcttatccccagaaaaggacaggggcggcccgactgggcgatatttgggagacttactgaacacaatgagacgattttgttcaaagagaagtttctggattggacggaactgaagagatcgaatgagaagaaccccggggaacttgcccagcacaaggaagaccccaggactgatgtcaaggcatacgatgtgacacggatggtgtccatgccccagacgacagcaggcaccatcctggacggagtgaacgtcggccgtggctatggcctggtggaaggacacgacaggaggcagtttgagatcaccagcgtttccgtggatgtctggcacatcctggaattcgactatagcaggctccccaaacaaagcatcgggcagttccatgagggggatgcctatgtggtcaagtggaagttcatggtgagcacggctgtactgcgtgcgtggagaggtgcccgtggaagggaatttgctggaagtggcctgtcactgtagcagcctgaggtccagaacttccatggtggtgcttaacgtcaacaaggccctcatctacctgtggcacggatgcaaagcccaggcccacacgaaggaggtcggaaggaccgctgcgaacaagatcaaggaacaatgtcccctggaagcaggactgcatagtagcagcaaagtcacaatacacgagtgtgatgaaggctccgagccactcggattctgggatgccttaggaaggagagacaggaaagcctacgattgcatgcttcaagatcctggaagttttaacttcgcgccccgcctgttcatcctcagcagctcctctggggattttgcagccacagagtttgtgtaccctgcccgagccccctctgtggtcagttccatgcccttcctgcaggaagatctgtacagcgcgccccagccagcacttttccttgttgacaatcaccacgaggtgtacctctggcaaggctggtggcccatcgagaacaagatcactggttccgcccgcatccgctgggcctccgaccggaagagtgcgatggagactgtgctccagtactgcaaaggaaaaaatctcaagaaaccagcccccaagtcttaccttatccacgctggtctggagcccctgacattcaccaatatgtttcccagctgggagcacagagaggacatcgctgagatcacagagatggacacggaagtttccaatcagatcaccctcgtggaagacgtcttagccaagctctgtaaaaccatttacccgctggccgacctcctggccaggccactcccggagggggtcgatcctctgaagcttgagatctatctcaccgacgaagacttcgagtttgcactagacatgacgagggatgaatacaacgccctgcccgcctggaagcaggtgaacctgaagaaagcaaaaggcctgttctgagtggggagacgccagaggagcctcacggtcacgtccaacaacaccactgcaccagggaaatggatatatatttttggactggtgtttttcacaaagtatttttcaatcagagttttcagaacctgacattgttaaagatactgcttgtcccggagttgtgtattttgtaaatgttcaagggaactgtttggaaacttctttccaccattcaggaggttatcagaattaataaaagtatctgttatgtgcacttaagccgcagctgctatagatagcactgccttcttgttccagctaggcaatgccttttttttttttttttgaagcagttctctttataaagtgttattttgatagtttgtggattctaaaatatatatatatttatataaacaccatataagtcaaatatgtatttaacaaagcaatatgtattcattcactttcaagatttgttttggtgtcaaaataacatgaaaaggtagatggagttgcttctgttgaattagctctgccaccaatatgtatcttcatacacgtttggaaatgtttcctgcagcattaggtatgacttgttctgagtactgcttccggtgctaaaatgaacaaagaatttgtacttaatggcatggactctggagaatctatgcgaatcaacctttctaccttaatatctccccaaaaatgtatagtgccttgtttttatgtacagtttatatacagaaaagtttgctctgcatttttgatgatggtttggaacattatctacaattttactctcaaatagtcaaaataaaaacatctcaatttctaataccggttgtaaacagtacacatgtcattttgtgatataggactcccaaataaaagtatcagaataaacacaacaattaactggt

SEQ ID NO: 4129 - DNA, 3078 bp, Homo sapiens
ggagtttggattcctgcccaatccagtagctgttaaacccctaactgagtccccattcaaagttcacttagaaaaactcagtttgagacaaagaaagccagatgaagacatgaaattatatcagacacctctggagctcaaattaaaacacagcactgtccatgtggatgaactgtgtcctctcattgtccccaatctgggagttgctgtcattcatgactatgcagattgggttaaagaagcatcaggagacttaccagaagcacaaattgtgaagcactggagcctgacatggacactatgtgaagccctatggggccacctgaaggagcttgacagccagctaaatgaaccccgtgaatacattcaaattctggagcgaagaagagctttctcccgctggctatcctgtactgccacacctcagattgaagaggaagtctccttaacccaaaaaaacagccctgtggaggctgtattcagctacctcacaggcaaaaggatcagtgaggcctgctctctggcccagcagtcaggggatcatcgtcttgctcttcttttatctcagtttgtgggtagccagtcagtccgggagctgctcaccatgcagttggtggactggcatcagctccaagcagactccttcatccaggatgagagactgcgcatctttgctctgttggctggaaaaccggtgtggcagctctcagaaaagaagcaaataaacgtgtgctcccagttggattggaaacgctccctggctatccatctttggtatttgcttccaccaacagcctccatttttagggcgctcagcatgtatgaagaagcatttcagaatacctctgacagtgacagatatgcctgctccccacttccttcgtatctggagggttctggctgtgtgatagcggaggagcaaaactcacagacaccacttcgagatgtctgctttcaccttctaaaactctacagtgacagacattatgatctcaaccagctgctggagcctcgaagcataacagcagatcctttggactaccgcctaagctggcacttgtgggaagtgctgagggctcttaactacacccatctctcagcgcagtgtgaaggtgtgctacaggccagttacgctggccagcttgaaagtgaggggctctgggagtgggccatctttgtcctcctgcacattgacaactcaggcatacgtgagaaggctgttcgagagctgcttacccggcactgccagctgttggagacccctgaatcttgggctaaagagactttccttacccagaagctccgtgtacctgccaaatggatccacgaggccaaagctgtgcgagcacacatggaatctgacaagcacttagaggccctttgcttatttaaggctgagcactggaaccgctgccacaagctcatcatccgacacttagcttctgatgccatcattaatgagaactatgactacctgaaggggttcttggaagacctggcacctccagagcgcagcagcctaattcaggattgggaaacatctgggcttgtttacctggactatattagagtcattgaaatgctccgccatatacagcaggtggattgctcaggtaatgacctggagcagttacacatcaaagtgacttcactgtgcagtcggatagagcagattcagtgttacagtgctaaagatcgcctggctcagtcagacatggccaaacgtgtagccaacctgctgcgcgtggtgctgagtctgcatcatcctcctgatagaacctccgactcaacaccagaccctcagcgagtccctttgcgcctcttggctccccacattggccggcttcccatgcctgaggactatgccatggacgaactgcgcagccttacccagtcctatctgcgagaactggctgttgggagcctgtgagccccaggcactttgcatcacagtcacatgcccattcacaccacacagaggttccctgccttgtttggattggcactgtttgccattctctgggttggctgtggcatctaccctccctccctgctgccagaagcagcatcctccacttgttcagggcttttcttaatactgaacgtagcataagggcttctggaacccagaagaggagacagtttaccatcctcaagatcattcagtgtttttcctttaaaaaaatggtcaataaagctcctttggcagaatcccccaaagaaccagggtattctttttccatccctagccattctggatcttgtgaccctccatgccaaccagcttccctactcctaccctggcccttttatactaggactccttaggaggagtgagacaggtgataatggatccttaacagatgaactatccacagaaggaagagggatccgtctcttaagtaattggttagttaacactgaattttggaggcaaaggagggttggcctgagttaggaaacaaaatgggatctttctgacacacttagggcagaagtgaatgcctgtcacggagggattgatcttcagggctgtttttgttcctgcctttagagttccatgaacaccatacctttgctactactatgtgcaggaacccttggtcacatgtgacatgtctgtgggaagctcccagagtttggtttggtccctggttttcagtcttgctgagactctgtctggatttgcctgcagagtttggataaaaaatggcaggttgggtaaccctccctgttcatcccatgttagctccaaagcatttcccaccctccatctaccccttccagaagcaaaaacaaaccatgactgaggcaggcatggagttgggcgttaggggcaggcagagggcctttgctacactgctgacagctatagggagccccaggtaatggcatgagatagctggtgttagggctatctcaggcaatatggccacacctgggtctttatgcatgaagataatgtaaaggtttttattaaaaaatatatatatgtataaataaatgatctagatattttcctctttttctgaagctactttcttaaaaaataaataaaatgtttatagcattcctggt

SEQ ID NO: 4130 - DNA, 2706 bp, Homo sapiens
aggccgcggtcgcgattacgctctctacggcctgcgaccgcagggccgttgcgggctggagacacggcgccgactggaaccggaggagctctaggccaaatggttgggccagccaggatcccaggacccttcgccgctcgagaccggagagaggaaacgaaacaggcgggaacccgtgggggaggggagggaactagcggaaggtgtcatggcggccgcgctcttgagtcacgtgcccagggcccgccttgctacttccggtcacgtgccctcagactcctcgcagccagcgatggaggcgagaccccctagtacagaggcggtggctactgctgcggccactgggtttcggcctcttcccagcagcggctctaagaagcgcagcggaactcgaccggatccaacccagttagttacttcctgtctagagttgtagcttccacctgagttctcctgggaagaagtgtttgccactcaaggaatacactcaagaaaaacctggaaatcacagaaggcattgtaagatagctacagtgattctgttaaacctcctgaaattggtccttgaacaattaagaggtgctacagatgaccaggaaaatttaccaggcaaattagctgtgagacaattgaccatttgtgcccaatgttcgcaccttctagccaccatggcaacctcatctgaagaagttttgctgattgtaaagaaagtgcgtcaaaagaagcaggatggagctctgtacctcatggcagaaagaattgcttgggcacctgaaggcaaagatagatttacaatcagccatatgtatgcagatattaaatgccagaaaattagtccagaaggaaaagctaaaattcagcttcagctggtcctacatgcaggggacacaactaacttccatttttccaatgaaagcacagcagtgaaagagcgagatgcagtaaaagaccttcttcagcagctgctgcccaaattcaagaggaaagcaaataaagaactggaagagaagaacagaatgctgcaagaagatcctgttttgtttcagctttataaagaccttgttgtgagtcaagtgatcagtgctgaggaattctgggccaatcgtttaaatgtgaatgcaacagatagttcttccacatccaatcataagcaggatgttggcatttctgctgcatttctggctgatgtccggccccaaactgatggctgtaacggtctaagatataatttaacttctgatatcattgagtccatatttaggacctatccagcagaaaaatgaaatatgcagaaaatgttccccacaacatgacagagaaggaattctggacacgttttttccagtcccattattttcacagggatcggctgaatacagggtcaaaggatctctttgcagaatgtgccaaaatagatgaaaaaggcctaaaaacaatggtttcattaggagtgaaaaacccactactagatttaacagctttggaagataaaccattagatgagggctatggcatttcctctgtgccatctgcttccaattctaaatccataaaagagaatagtaatgctgccatcatcaagagatttaaccatcacagtgccatggtcctggcagctggactcagaaaacaagaagcacaaaatgaacaaactagtgagcccagcaacatggatggaaattccggagatgcagactgctttcagccagcagtcaaaagggcgaaattacaagagtccattgaatatgaagacttggggaaaaataattctgtaaaaacgattgcactaaacctcaagaagtcagataggtattatcatggtccaactccaatccagtcactacagtatgcaacaagtcaggacattattaattcttttcaaagtattagacaagaaatggaagcttatacacccaagttaactcaggttctctcaagtagtgctgccagtagtaccatcacagcactgtcacctggaggggcacttatgcagggaggaacacagcaagccataaaccagatggtgccaaatgatattcaatctgaattgaaacacttatatgtagctgttggagaacttctacgacatttctggtcctgctttcctgttaatacgccattcctagaagaaaaggtagtgaaaatgaaaagtaatttggaacgattccaagttacgaagctctgtccattccaagaaaagattcggagacagtatttaagcacaaatttggtaagtcacatagaagagatgctccagacagcctacaacaagctccacacatggcagtcacggcgtctgatgaagaaaacgtgaggtggccatgatgcttacaggttttgtgagattgagagaactatgacctgcagcaactctggaaacctggcctgacagacaagcagatgacctcacaggagtgataagaaacatctgctccacgccaactcccagagctgatgctattgtacttgcacattggagactgaaaggaaagaagggactaaatgctggggaggtaaattaagacagaaccaaatgagctaagttgcaaatatatatatatacacacacacacatatatgtacatgtgtatgtacatatatattttaaaagactgtttactgcagttgctcaggaactgcttttgattcacattaagctgctttcagaaattaaaaaaacactttttaaagggtgcattgataaaa

SEQ ID NO: 4131 - DNA, 1198 bp, Homo sapiens
ttaaagtctctcttcaccctgccgtcatgtctaagtcagagtctcctaaagagcccgaacagctgaggaagctcttcattggagggttgagctttgaaacaactgatgagagcctgaggagccattttgagcaatggggaacgctcacggactgtgtggtaatgagagatccaaacaccaagcgctccaggggctttgggtttgtcacatatgccactgtggaggaggtggatgcagctatgaatgcaaggccacacaaggtggatggaagagttgtggaaccaaagagagctgtctccagagaagattctcaaagaccaggtgcccacttaactgtgaaaaagatatttgttggtggcattaaagaagacactgaagaacatcacctaagagattattttgaacagtatggaaaaattgaagtgattgaaatcatgactgaccgaggcagtggcaagaaaaggggctttgcctttgtaacctttgacgaccatgactccgtggataagattgtcattcagaaataccatactgtgaatggccacaactgtgaagttagaaaagccctgtcaaagcaagagatggctagtgcttcatccagccaaagaggtcgaagtggttctggaaactttggtggtggtcgtggaggtggtttcggtgggaatgacaacttcggtcgtggaggaaacttcagtggtcgtggtggctttggtggcagccgtggtggtggtggatatggtggcagtggggatggctataatggatttggtaatgatggaagcaattttggaggtggtggaagctacaatgattttgggaattacaacaatcagtcttcaaattttggacccatgaagggaggaaattttggaggcagaagctctggcccctatggcggtggaggccaatactttgcaaaaccacgaaaccaaggtggctatggcggttccagcagcagcagtagctatggcagtggcagaagattttaattagggaggagtctgctactagtcttatcagctcttaaaaacagaaactcatctgtccaagttcgtggcagaaaggaacgtccttgtgaagacctttatctgagccactgtacttcgttatcactgccatgcagtttacatgagctgttctgcagctcaaattccattttgtgaatgggtttttttttttaataaactgtatttaactt

SEQ ID NO: 4132 - DNA, 2061 bp, Homo sapiens
gggacggggtccgactcagaaatggcggcctccatgttctacggcaggctagtggccgtggccacccttcggaaccaccggcctcggacggcccagcaacagcaaaggaatctctcactacatgaatacatgagtatggaattattgcaagaagctggtgtctccgttcccaaaggatatgtggcaaagtcaccagatgaagcttatgcaattgccaaaaaattaggttcaaaagatgtcgtgataaaggcacaggttttagctggtggtagaggaaaaggaacatttgaaagtggcctcaaaggaggagtgaagatagttttctctccagaagaagcaaaagctgtttcttcacaaatgattgggaaaaaattgtttaccaagcaaacgggagaaaagggcagaatatgcaatcaagtattggtctgtgagcgaaaatatcccaggagagaatactactttgcaataacaatggaaaggtcatttcaaggtcctgtattaataggaagttcacatggtggtgtcaacattgaagatgttgctgctgagtctcctgaagcaataattaaagaacctattgatattgaagaaggcatcaaaaaggaacaagctctccagcttgcacagaagatgggatttccacctaatattgtggaatcagcagcagaaaacatggtcaagctttacagcctttttctgaaatacgatgcaaccatgatagaaataaatccaatggtggaagattcagatggagctgtattgtgtatggatgcaaagatcaattttgactctaattcagcctatcgccaaaagaaaatctttgatctacaggactggacccaggaagatgaaagggacaaagatgctgctaaggcaaatctcaactacattggcctcgatggaaatataggctgcctagtaaatggtgctggtttggctatggccacaatggatataataaaacttcatggagggactccagccaacttccttgatgttggtggtggtgctacagtccatcaagtaacagaagcatttaagcttatcacttcagataaaaaggtactggctattctggtcaacatttttggaggaatcatgcgctgtgatgttattgcacagggtatagtcatggcagtaaaagacttggaaattaaaatacctgttgtggtacggttacaaggtacacgagtcgatgatgctaaggcactgatagcggacagtggacttaaaatacttgcttgtgatgacttggatgaagctgctagaatggttgtaaagctctctgaaatagtgaccttagcgaagcaagcacatgtggatgtgaaatttcagttgccaatatgatctgaaaacccagtggatggctgaaggtgttaaatgtgctataatcattaagaatactgtgttctgtgttattgttctttttctttttagtgtgtggagattgtaattgccatctaggcacacaaacatttaaaaggatttggactgcatttaattgtaccattcagaatggactgtttgtacgaagcatgtataatgcagttatcttctttcttttgtcgcagccagtcttttttgcttctcctacaaaacgtaacttgcaatttgccagtttattattgttggatacaaagttcttcattgataagagtcctataaataagataaatacgaagataaagctttattctttagtgttaaaatacagtatatctaataactagcctcattagtagagcagtatattaaaacaatgttttatgtaaaaagtgtttatcttcagcaccaaatacatgataaatgtatcaatcactatttataaacagagctttcaaacactcctcagaatattcttctaagtattttgatgaagtaactttgtaattatttgaacattgttttaatcattaggaaacactgattaactgcaagtcttcatgattctgtcatattaagaaacacctgtaggtttgcttcaaataaaggcatatataccaaggacttacagacaaaattaagaatgtcaatttaagttaataaaaatctcccaatatg

SEQ ID NO: 4133 - DNA, 2247 bp, Homo sapiens
agatgttagagtatgcattaaaacaagaaagggcaaaatatcacaaattaaaatatggcacggaactgaaccaaggtgacttgaaaatgccaacctttgagtcagaagaaaccaaagacacagaggctcccacagcacctcagaatagccagttaacgtggaagcaaggcagacagcttttaagacagtatcttcaggaagtaggttatacagatacaatattagatgtacggtctcagcgggtaaggtcattacttggactatctaattcagaaccaaatggatcagtagaaacaaagaatttagaacagatcctgaatggaggtgaatctcctaagcaaaagggacaagaaataaaaaggtcctctggtgatgttcttgagacgttcaatttcttagaaaatgccgatgacagtgatgaagatgaggaaaatgacatgatcgaaggcatcccagaaggaaaagacaaacatcggatgaataaacataaaataggtaatgaaggtttagctgctgacctaactgacgatcctgatactgaggaagcactgaaagaatttgattttttagtgactgctgaagatggtgaaggagctggagaagcacggagttcgggggatggcacagaatgggataaagatgacctctccccaactgctgaggtttgggatgtagaccagggactaataagtaaactgaaggaacagtacaagaaggaacgaaaggggaagaaaggggtgaagagggccaacaggacaaaactctacgacatgatagctgatctgggagatgatgagctgccccacatcccttcaggaatcattaatcagtctaggtcagcctctactagaatgactgatcatgaaggtgcaagagcagaggaagctgaaccaataacgtttccatctggaggaggcaagtcatttattatgggttctgatgatgttttgttaagtgtactgggccttggagaccttgcagacttgacggtaacaaatgatgcagactatagttatgatttgcctgctaataaagatgcctttcgaaagacatggaatcccaagtatacactacgtagccattttgatggagtacgggcattagcttttcatcctgtagaacctgtgctggttactgcttctgaggaccataccctgaaactttggaacctgcaaaaaacagttcctgccaaaaagagtgcctctttagatgtagagcctatctacacatttagggcccacatcggccctgttctgtcattagctattagttctaatggagaacagtgttttagtggtggtattgatgcaaccatccagtggtggaatatgccgagtcccagtgtagatccatatgatacatatgagccaaatgttctagctggcactttagttggtcatacagatgcagtttggggtcttgcttatagtggcataaaaaatcaattactgtcttgttcagcagatggcactgttaggttatggaatccacaagaaaaattgccatgtatttgcacttacaatggagataaaaagcatggaatacctacatcagttgactttataggctgtgatccagctcatatggtaacctctttcaacactggtagtgcagtaatttatgatttagaaacatcacagtcattggtgatactttcatcacaggtagattctggtttacaatctaataatcatatcaacagagtagtaagtcatcccacacttcctgttacaataactgctcatgaagatagacacatcaaattttttgacaataaaacgggtaaaatgatccattctatggtagctcacttggatgctgttacaagtctagcagtagatcctaatggaatctatttgatgtctggaagccatgactgttccatcagattatggaatttagacagcaagacatgtgtgcaagaaataacagctcacagaaagaaattggatgaatcaatttatgatgttgctttccactcgtcaaaagcatatatagctagtgcaggagctgatgctcttgccaaagtatttgtatgaatcaacaaaaacttgcatcgtaacaagatttgcttggacagaaagagggtctgcatcactgccatcagaaaggttactgatatgacactacatgtgatctgcctggtgaaggctatctggggcaggcacaaattggtggaaatcacatcttaatgtcaagctcattaagttaactgtaattactgtattttgtgggacaaagaaaaaa

SEQ ID NO: 4134 - DNA, 1973 bp, Homo sapiens
ggcggctcctttaggcagctgaaaggggatttaggcccggaagatccgagtccatccgcggcggggagagggcaagcgggaccggtagggcatgcagcggcggcgccgatcggacatgtcccatccgccccgtattgaggcgctgggagcgcggtgcgcgacaggaaagcgatggtgaaagcggggccgtgaggtgggcggcaggaacggccggacccgcagtagcgcagcagcggcgccgcctcccagagttcagacccaggaagcggccgggaggcaggagcgaatcgggccgccgccgccatggagctgagagtcgggaacaggtaccggctgggccggaagcatcggcagcggctccttcggagacatctatctcggtacggacattgctgcaggagaagaggttgccatcaagcttgaatgtgtcaaaaccaaacaccctcagctccacattgagagcaaaatctacaagatgatgcagggaggagtgggcatccccaccatcagatggtgcggggcagagggggactacaacgtcatggtgatggagctgctggggccaagcctggaggacctcttcaacttctgctccaggaaattcagcctcaaaaccgtcctgctgcttgctgaccaaatgatcagtcgcatcgaatacattcattcaaagaacttcatccaccgggatgtgaagccagacaacttcctcatgggcctggggaagaagggcaacctggtgtacatcatcgacttcgggctggccaagaagtaccgggatgcacgcacccaccagcacatcccctatcgtgagaacaagaacctcacggggacggcgcggtacgcctccatcaacacgcaccttggaattgaacaatcccgaagagatgacttggagtctctgggctacgtgctaatgtacttcaacctgggctctctcccctggcaggggctgaaggctgccaccaagagacagaaatacgaaaggattagcgagaagaaaatgtccacccccatcgaagtgttgtgtaaaggctacccttccgaatttgccacatacctgaatttctgccgttccttgcgttttgacgacaagcctgactactcgtacctgcggcagcttttccggaatctgttccatcgccagggcttctcctatgactacgtgttcgactggaacatgctcaaatttggtgccagccgggccgccgatgacgccgagcgggagcgcagggaccgagaggagcggctgagacactcgcggaacccggctacccgcggcctcccttccacagcctccaggccgtctgcgggggacgcagggaatgtggctccccccacacccctcacccctacctcacacacggctaacacctccccccggcccgtctccggcatggagagagagcggaaagtgagtatgcggctgcacccggggcccccgtcaacatctcctcgtccgacctcacaggccgacaagatacctctcgcatgtccacctcacagattcctggtcgggtggcttccagtggtcttcagtctgtcgtgcaccgatgagaactctccttattgctgtgaagggcagacaatgcatggctgatctactctgttaccaatggctttactagtgacacgtcccccggtctaggatcgaaatgttaacaccgggagctctccaggccactcacccagcgacgctcgtgggggaaacatactaaacggacagactccaagagctgccaccgctggggctgcactgcggccccccacgtgaactcggttgtaacggggctgggaagaaaagcagagagagaattgcagagaatcagactccttttccagggcctcagctccctccagtggtggccgccctgtactccctgacgattccactgtaactaccaatcttctacttggttaagacagttttgtatcattttgctaaaaattattggcttaaatctgtgtaaagaaaa

SEQ ID NO: 4135 - DNA, 1928 bp, Homo sapiens
gtatgaacgcagcggcggacctgtgaggggatccgacttgccggcagaacttacgctgcgggaccccgggcactgttgctgctgcgggagtccagagaggcaggaggatggagctcggaaggatttcagctccaggctggctgctggaccgacttttcaacattttttaaaaagtgcctcagctcctcaggagaagctgtcttcagaagtggaagacccacctccctatctcatgatggatgaacttcttggaaggcagagaaaagtctacctcgagacctatggctgccagatgaatgtgaatgacacagagatagcctggtccatcttacagaagagtggctacctgcggaccagtaacctccaagaggcagatgtgattctccttgtcacatgctctatcagggagaaggctgagcagaccatctggaaccgtttacatcagcttaaagccttgaagacaaggcggccccgctcccgggttcctctgaggattggaattctaggctgcatggctgagaggttgaaggaggagattctcaacagagagaaaatggtagatattttggctggtcctgatgcctaccgggaccttccccggctgctggctgttgctgagtcgggccagcaagctgccaacgtgctgctctctctggacgagacctatgctgatgtcatgccagtccagacaagcgccagtgccacgtctgcctttgtgtcaatcatgcgaggctgtgacaacatgtgtagctactgcattgttcctttcacccggggcagggagaggagtcggcctattgcctccattctagaggaagtgaagaagctttctgagcaggggctgaaagaagtgacacttcttggtcagaatgttaatagttttcgggacaattcggaggtccagttcaacagtgcagtgcctaccaatctcagtcgtggctttaccaccaactataaaaccaagcaaggaggacttcgttttgctcatcttctggatcaggtctccagagtagatcctgaaatgaggatccgttttacctctccccaccccaaggattttcctgatgaggttctgcagctgattcatgagagagataacatctgtaaacagatccacctgccagcccagagtggaagcagccgtgtgttggaggccatgcggaggggatattcaagagaagcttatgtggagttagttcaccatattagagaatctattccaggtgtgagcctcagcagcgatttcattgctggcttttgtggtgagacggaggaagatcacgtccagacagtctctttgctccgggaagttcagtacaacatgggcttcctctttgcctacagcatgagacagaagacacgggcatatcataggctgaaggatgatgtcccggaagaggtaaaattaaggcgtttggaggaactcatcactatcttccgagaagaagcaacaaaagccaatcagacctctgtgggctgtacccagttggtgctagtggaagggctcagtaaacgctctgccactgacctgtgtggcaggaatgatggaaaccttaaggtgatcttccctgatgcagagatggaggatgtcaataaccctgggctcagggtcagagcccagcctggggactatgtgctggtgaagatcacctcagccagttctcagacacttaggggacatgttctctgcaggaccactctgagggactcttctgcatattgctgacctgagaggatggcctcagagctgacttgggcaatcctccccaacaggaaggggagacattgcctgccactgaggaaacaggtcatgaaggtggagataagctgcaaggggcgaagcaactttatgtcagtggaaaacgtgtctctttaaagctgctatgtgaacagcttttacagtcattaaatttacctaaactaaggtt

SEQ ID NO: 4136 - DNA, 2716 bp, Homo sapiens
tcctcagatgcaccgatcttcccgatactgcctttggagcggctagattgctagccttggctgctccattggcctgccttgccccttacctgccgattgcatatgaactcttcttctgtctgtacatcgttgtcgtcggagtcgtcgcgatcgtcgtggcgctcgtgtgatggccttcgtccgtttagagtagtgtagttagttaggggccaacgaagaagaaagaagacgcgattagtgcagagatgctggaggtggtcagttactaagctagagtaagatagcggagcgaaaagagccaaacctagccggggggcgcacggtcacccaaaggaggtcgactcgccggcgcttcctatcgcgccgagctccctccattcctctccctccgccgaggcgcgaggttgcggcgcgcagcgcagcgcagctcagcgcaccgactgccgcgggctccgctgggcgattgcagccgagtccgtttctcgtctagctgccgccgcggcgaccgctgcctggtcttcctcccggacgctagtgggttatcagctaacacccgcgagcatctataacataggccaactgacgccatccttcaaaaacaactgtctgggaaaaaaagaataaaaagtagtgtgagagcagaaaacgtgattgaaacacgaccaatctttcttcagtgccaaagggtggaaaagaaaggatgatatgatgaacctagcctgttaatttcgtcttctcaattttaaactttggttgcttaagactgaagcaatcatggtgaacctgaggaatgcggtgcattcattccttgtgcacctaattggcctattggtttggcaatgtgatatttctgtgagcccagtagcagctatagtaactgacattttcaatacctccgatggtggacgcttcaaattcccagacggggtacaaaactggccagcactttcaatcgtcatcataataatcatgacaataggtggcaacatccttgtgatcatggcagtaagcatggaaaagaaactgcacaatgccaccaattacttcttaatgtccctagccattgctgatatgctagtgggactacttgtcatgcccctgtctctcctggcaatcctttatgattatgtctggccactacctagatatttgtgccccgtctggatttctttagatgttttattttcaacagcgtccatcatgcacctctgcgctatatcgctggatcggtatgtagcaatacgtaatcctattgagcatagccgtttcaattcgcggactaaggccatcatgaagattgctattgtttgggcaatttctataggtgtatcagttcctatccctgtgattggactgagggacgaagaaaaggtgttcgtgaacaacacgacgtgcgtgctcaacgacccaaatttcgttcttattgggtccttcgtagctttcttcataccgctgacgattatggtgattacgtattgcctgaccatctacgttctgcgccgacaagctttgatgttactgcacggccacaccgaggaaccgcctggactaagtctggatttcctgaagtgctgcaagaggaatacggccgaggaagagaactctgcaaaccctaaccaagaccagaacgcacgccgaagaaagaagaaggagagacgtcctaggggcaccatgcaggctatcaacaatgaaagaaaagcttcgaaagtccttgggattgttttctttgtgtttctgatcatgtggtgcccatttttcattaccaatattctgtctgttctttgtgagaagtcctgtaaccaaaagctcatggaaaagcttctgaatgtgtttgtttggattggctatgtttgttcaggaatcaatcctctggtgtatactctgttcaacaaaatttaccgaagggcattctccaactatttgcgttgcaattataaggtagagaaaaagcctcctgtcaggcagattccaagagttgccgccactgctttgtctgggagggagcttaatgttaacatttatcggcataccaatgaaccggtgatcgagaaagccagtgacaatgagcccggtatagagatgcaagttgagaatttagagttaccagtaaatccctccagtgtggttagcgaaaggattagcagtgtgtgagaaagaacagcacagtcttttcctacggtacaagctacatatgtaggaaaattttcttctttaatttttctgttggtcttaactaatgtaaatattgctgtctgaaaaagtgtttttacatatagctttgcaaccttgtactttacaatcatgcctacattagtgagatttagggttctatatttactgtttataataggtggagactaacttattttgattgtttgatgaataaaatgtttatttttgctctccctcccttctttccttccttttttcctttcttccttcctttctctctttcttttgtgcatatggcaacgttcatgttcatctcaggtggcatttgcaggtgaccagaatgaggcacatgacagtggttatatttcaaccacacctaaattaacaaattcagtggacatttgttctgggttaacagtaaatatacactttacattcttgctctgctcatctacacatataaacacagtaagataggttctgctttctgatacatctgtcagtgagtcagaggcagaacctagtcttgttgttcatatagggg

SEQ ID NO: 4137 - DNA, 5856 bp, Homo sapiens
tgcaggtttgcagggtctgagattacttgggcttttcctgcctttttcttttgcttaagggatggacaaggagctgagatttatgacccttattagagaaaaaaatgtgccttgctagggtggggacacttggttgatgcagtctctctctctctttctcggtgtttataacaaaacaaaaccaaaatgaactgaggggtttgtaatggtagtttgtttgttgctggagaatgctactttgcatgctttttttctcttgcagggtatgttctgtcttgtgctttttcttttagaagctactaaagggtgttggggatgcttctgactattatgaaggccaaaaggcctgttgactggggctgcttttaaccctttcctatttgctgagaatgcagccgtgtgacagtaactg[450 bp omitted]cgatctccagtgctgaagagtttgatgacgacgagaagattgaggtggatgacccccctgacaaggaggacatgcgatcaagcttcaggtcgaatgtgttgacggggtcggctccccagcaggactacgataagctgaaggcactcggaggggaaaactccagcaaaactggactctctacgtcaggcaatgtggagaaaaacaaagctgttaagagagaaacagaagccagttctataaacctgagtgtttatgaaccttttaaagtcagaaaagcagaggataaattgaaggaaagctctgacaaggtgctggaaaacagagtcctagatgggaagctgagctccgagaagaatgacaccagcctccccagcgttgcgccatcaaagacaaagtcgtcctccaagctctcgtcctgcatcgctgccatcgcggctctcagcgctaaaaaggcggcttcagactcctgcaaagaaccagtggccaattcgagggaatcctccccgttaccaaaagaagtaaatgacagtccgagagccgctgacaagtctcctgaatcccagaatctcatcgacgggaccaaaaaaccatccctgaagcaaccggatagtcccagaagcatctcaagtgagaacagcagcaaaggatccccgtcctctcccgcagggtccacaccagcaatccccaaagtccgcataaaaaccattaagacatcttctggggaaatcaagagaacagtgaccagggtattgccagaagtggatcttgactctggaaagaaaccttccgagcagacagcgtccgtgatggcctctgtgacatcccttctgtcgtctccagcatcagccgccgtcctttcctctccccccagggcgcctctccagtctgcggtcgtgaccaatgcagtttcccctgcagagctcacccccaaacaggtcacaatcaagcctgtggctactgctttcctcccagtgtctgctgtgaagacggcaggatcccaagtcattaatttgaagctcgctaacaacaccacggtgaaagccacggtcatatctgctgcctctgtccagagtgccagcagcgccatcattaaagctgccaacgccatccagcagcaaactgtcgtggtgccggcatccagcctggccaatgccaaactcgtgccaaagactgtgcaccttgccaaccttaaccttttgcctcagggtgcccaggccacctctgaactccgccaagtgctaaccaaacctcagcaacaaataaagcaggcaataatcaatgcagcagcctcgcaaccccccaaaaaggtgtctcgagtccaggtggtgtcgtccttgcagagttctgtggtggaagctttcaacaaggtgctgagcagtgtcaatccagtccctgtttacatcccaaacctcagtcctcccgccaatgcagggatcacgttaccgacgcgtgggtacaagtgcttggagtgtggggactcctttgcacttgaaaagagtctgacccagcactacgacagacggagcgtgcgcatcgaagtaacgtgcaaccattgtacaaagaacctcgttttttacaacaaatgcagcctcctttcccatgcccgtgggcataaggagaaaggggtggtaatgcaatgctcccacttaattttaaagccagtcccagcagatcaaatgatagtttctccgtcaagcaatacttccacttcaacttccactcttcagagccctgtgggagctggcacacacactgtcacaaaaattcagtctggcataactgggacagtcatatcggctccttcaagcactcccatcaccccagccatgcccctagatgaagacccctccaaactgtgtagacatagtctaaaatgtttggagtgtaatgaagtcttccaggacgagacatcactggctacacatttccagcaggctgcagatacgagtggacaaaagacttgcactatctgccagatgctgcttcctaaccagtgcagttatgcatcacaccagagaatccatcagcacaaatctccctacacctgccctgagtgtggggccatctgcaggtcggtgcacttccagacccacgtcaccaagaactgtctgcactacacgaggagagttggttttcgatgctgtgcattgcaatgttgtgtactctgatgtggctgctctgaagtctcacattcaaggttctcactgtgaagtcttctacaagtgtcctatttgtccaatggcgtttaagtctgccccaagcacacattcccacgcctacacacagcatcctggcatcaagataggagaaccaaaaataatatataagtgttccatgtgcgacactgtgttcaccctgcaaaccttgctgtatcgccactttgaccaacacattgaaaaccagaaggtgtctgttttcaagtgtccagactgttctcttttatatgcacagaagcaacttatgatggaccatatcaagtctatgcatggaacattgaaaagtattgaagggcctccaaacttgggtataaacttgcctttgagcattaagcctgcaactcaaaattcagcaaatcagaacaaagaggacaccaaatccatgaatgggaaagagaaattggaaaagaaatctccatctcctgtgaaaaaatcaatggaaaccaagaaagtggccagtcctgggtggacgtgttgggagtgtgactgcctgttcatgcagagagatgtgtacatatcccacgtgaggaaggagcacgggaagcaaatgaagaaacacccctgccgccagtgtgacaagtctttcagctcgtcccacagcctgtgccggcacaaccggatcaagcacaaaggcatcaggaaagtgtacgcctgctcgcactgcccagactccagacgtacctttaccaaacgtttgatgctggagaagcacgtccagctgatgcatggcatcaaggaccctgacctgaaagaaatgacagatgccaccaatgaggaggaaacagaaataaaagaagacactaaggtccccagtcccaagcggaagttggaagaaccagttctggagttcaggcctccccgaggagcaatcactcaaccactgaaaaagctgaaaatcaatgtttttaaggttcacaagtgtgccgtgtgtggcttcaccaccgaaaacctgctgcaattccacgaacacatccctcagcacaaatcggatggttcttcctaccagtgccgggagtgtggcctctgctacacgtctcacgtctctctgtccaggcacctcttcatcgtacacaagttaaaggaacctcagccagtgtccaagcaaaatggggctggggaagataaccaacaggagaacaaacccagccacgaggatgaatcccctgatggcgccgtgtcagacagaaagtgcaaagtgtgcgcaaaaacttttgaaactgaagctgccttaaatactcacatgcggacacacggcatggccttcatcaaatccaaaaggatgagctcagccgagaaatagccacagatgctccatgaggaaaatccctgtccacattggaataaaaaagacatttttgttacaaagtttgcagtataatagagttaacagtactgtctaggctgttgcaatatattctctttcaatgtaccttccttcacctcgtcgtatatatcctcgataagtattaaaacagtatttgagtttaaaagagtttgtatatatttaaatgaataactttttatactctttgttacatgtttgtatcagtatttagtggaaaaccatttgagttgttttgggttagaatttttctttttgtactgtttctttaaaacagagttcttagtaacaggggcagttcctgaattcaaataaaccattttgtatgtttggattttgaatgggttaactaattacaggctaaaataatgccttttttagtgtttttaatttttagaattcactacataaattgtaagtaattgtgggtctcaaaaacactaggaacttttaagtgtcttagcacttcctcgatgtgcctgccctgagggagtgagttcacatttgagacaactgcactccagtgtggacgtgcctttgtcttcaggccatgccgaagggtgtttaaagcagtcttgcaggtcgctcctttcccagccgtggataaaaactgaagctaggaatctaataaggaatgctgatttcctcagttccattttgaggaatggggaaggctattctaaagaaaaaaatgggatttgttttctcggcagatctgcaaggctggctttaagagcacaaggagggaaagtaacgaaagggctggactactataaaagttacaaatacgtagttagaccaatagatttatatagtcaggtttttgtcatgtaatttattaactaactattacagaaacacagctaagaatatcaagtatttctctggctcttgacagaaaaaaatcagttgacttaaccctttgctgtcaaaagagttggcgtttcctgttctgggtgctactgccaaacgttatggtacttagagtcgggatgcacaacttcaaccaccgacttatcaatgcagccgcctgtgtattgcaattggccgttaccttaagcactgagccacccgggtttagttcagccatttcaagaagtatatttaacgtcggtagttctgctttattaaaatgcagcagaggtactcttctgtcccttccgtttatagttctctgagagagttctattttttggttttgttttgtgttttcttttgcattttgtatcttgtatttatccctgaacatgttttgtaccttttttttttttttttttaagaaaaggaattcttttgtgtatatatagatacttgcatgatatactgtagtcaatgttcggttcctcaaaaggtcttgctgctgtcaggtgttatgcactccatccatcataactgtatgaaacacatttcatatgtaaataaacgtgggacatttg

SEQ ID NO: 4138 - DNA, 1375 bp, Homo sapiens
atccggcggcagcggagcctgtggctccccctgcgggctgctcagcggcgtgcacagtcctgccggctggcttgggtggggtgccgaggctcaggcagcatgacgacggagacctttgtgaaggatatcaagcctgggctcaagaatctgaaccttatcttcattgtgctggagacaggccgagtgaccaagacaaaggacgggcatgaggttcggacctgcaaagtggcggacaaaacaggcagcatcaatatctctgtctgggacgatgttggcaatctgatccagcctggggacattatccggctcaccaaagggtacgcttcagttttcaaaggttgtctgacactatatactggccgtgggggtgatctgcagaagattggagaattctgtatggtttattctgaggttcctaacttcagtgagccaaacccagagtacagcacccagcaggcacccaacaaggcggtgcagaacgacagcaacccttcagcttcccagcctaccactggaccctctgctgcctctccagcctctgagaaccagaatgggaatggactgagtgccccaccaggtcccggtggtggcccacatccccctcatactccctcccacccacccagcacccgaatcactcgaagccagcccaaccacacacctgcaggcccgcctggcccttccagcaaccctgttagtaacggcaaagaaacccggaggagcagcaagagatagcatgacattctttcttcctgccaccaaccacatcccaagtgtcccctggagagcaagatagccttccactgattggctggtgtagcagtattttagccactgaacttcagtggagggtggtgagcagtgtccttatccaccctaatctcatactccctcattgtccagctgaactacctgtcccctgggagtcaggaccctctgcctgctctctttcctctttagaaatggcagttactggctgggcgcagtggctcacgcttgtaatcccagcactttgggaagccgaggtgggcggatcacctgaggtcgggagttcaagaccagcctgaccaacatggagaaaccccgtgtctactaaaaatacagaattagccaggcatggtggcgtatgcctgtaatcccagctacttaggaggctgaggcaggagaatctcttgaaaccgggaggcggaggttgaggtgagccgaaattgcaccattgcactccagcctgggcaataagagcgaaactccatctcaaaaaaaaaagaaagaaagaaagaaagaaagaaagaaatggcagttaccatctgtttcttctgtgtgagacatgggagtctaactgaagtctctccttcctaataaatgttaccactct

SEQ ID NO: 4139 - DNA, 1460 bp, Homo sapiens
  misc_feature (360)..(492): n is a, c, g, or t
ttgtttcattatggatggaggggatgatggtaaccttattatcaaaaagaggtttgtgtctgaggcagaactagatgaacggcgcaaaaggaggcaagaagaatgggagaaagttcgaaaacctgaagatccagaagaatgtccagaggaggtttatgaccctcgatctctatatgaaaggctacaggaacagaaggacaggaagcagcaggagtacgaggaacagttcaaattcaaaaacatggtaagaggcttagatgaagatgagaccaacttccttgatgaggtttctcgacagcaggaactaatagaaaagcaacgaagagaagaagaactgaaagaactgaaggaatacagaannnnnnnnnnnnnnnnnnnnnnnnnnnnnnnnnnnnnnnnnnnnnnnnnnnnnnnnnnnnnnnnnnnnnnnnnnnnnnnnnnnnnnnnnnnnnnnnnnnnnnnnnnnnnnnnnnnnnnnnnnnnnnnnnnnnnctcagagagtggcaacagtgtgaaaagactgaaaccggaccctgagccagatgacaagaatcaagagccctcatcctgcaagtctctcggaaacacctccctgagtggcccctccatccactgcccctctgctgcagtatgtatcggcatcctcccaggcctgggtgcctactctgggagcagcgactccgagtccagctcagacagcgaaggcaccatcaatgccaccggaaagattgtctcctccatcttccgaaccaacaccttcctcgaggccccctagtttctccgtccctacacagggagctcctccccaagggtagatcggaccgttcatgctgcctataggcattatgtccctcaaaaaaaaactcctttgcctgcatcctgtgtacaacatgacatttttaaccaatccaatctaaaaatgtgccagaatccacctgtggcccgaatcgtgtttggttcctctttctactccactgcagatgaccaaacctgtcccgctgccactttcctcactgatattgggaggagggcaaggcccagccgaagttccactaaaaatgccccaggagaataggcaccggctggcttgccaaagggtttgggttttattgctttctgttttttcttttcccgacagcacaaagaagtaagggcagttattggacaggtgttatttaaacattctattgtaaatgaatgtgttgtttggttctactgcattgtggagcatgcgggggaagagaactgacccaggtagtgaaatggagcccttccctggaactaaccagtccttgatgttgtgtgactaagtaaagatgataaaccccatctgctgggggtgtcacttcacactcggcatgcattgtgaaagctttccatacccttggccattccctctctcctctctctccaaccccatttatgcaggaagggactgctaacaagaacgcttccatctc

SEQ ID NO: 4140 - DNA, 1499 bp, Homo sapiens
cacagcagctgtggctggggagcccagatgaagtgtggctctatcttgtatgtgagcacacccacattttcactgccattatctgggacagcagaaccaggtttggctcaacagatttctctttccacccatctattgcaggtgtagtggtcttgctgcttctccagggaggatctgcctacaaactggtttgctactttaccaactggtcccaggaccggcaggaaccaggaaaattcacccctgagaatattgaccccttcctatgctctcatctcatctattcattcgccagcatcgaaaacaacaaggttatcatcaaggacaagagtgaagtgatgctctaccagaccatcaacagtctcaaaaccaagaatcccaaactgaaaattctcttgtccattggagggtacctgtttggttccaaagggttccaccctatggtggattcttctacatcacgcttggaattcattaactccataatcctgtttctgaggaaccataactttgatggactggatgtaagctggatctacccagatcagaaagaaaacactcatttcactgtgctgattcatgagttagcagaagcctttcagaaggacttcacaaaatccaccaaggaaaggcttctcttgactgcgggcgtatctgcagggaggcaaatgattgataacagctatcaagttgagaaactggcaaaagatctggatttcatcaacctcctgtcctttgacttccatgggtcttgggaaaagccccttatcactggccacaacagccctctgagcaaggggtggcaggacagagggccaagctcctactacaatgtggaatatgctgtggggtactggatacataagggaatgccatcagagaaggtggtcatgggcatccccacatatgggcactccttcacactggcctctgcagaaaccaccgtgggggcccctgcctctggccctggagctgctggacccatcacagagtcttcaggcttcctggcctattatgagatctgccagttcctgaaaggagccaagatcacgcggctccaggatcaacaggttccctacgcagtcaaggggaaccagtgggtgggctatgatgatgtgaagagtatggagaccaaggttcagttcttaaagaatttaaacctgggaggagccatgatctggtctattgacatggatgacttcactggcaaatcctgcaaccagggcccttaccctcttgtccaagcagtcaagagaagccttggctccctgtgaaggattaacttacagagaagcaggcaagatgaccttgctgcctggggcctgctctctcccaggaattctcatgtgggattccccttgccaggctggcctttggatctctcttccaagcctttcctgacttcctcttagatcatagattggacctggttttgttttcctgcagctgttgacttgttgccctgaagtacaataaaaaaaattcattttgctccagta

SEQ ID NO: 4141 - DNA, 4218 bp, Homo sapiens
attaattttaagtttcatgattttgaaacatggaagtggcgattcgaagattcctttggagtggatccatataatgtgttaatggtacttctttgtctgctctgcatcgtggttttagtggctactgagctgtggacatatgtacgttggtacactcagttgagacgtgttttaatcatcagctttctgttcagtttgggatggaattggatgtatttatataagctagcttttgcacagcatcaggctgaagtcgccaagatggagccattaaacaatgtgtgtgccaaaaagatggactggactggaagtatctgggaatggtttagaagttcatggacctataaggatgacccatgccaaaaatactatgagctcttactagtcaaccctatttggttggtcccaccaacaaaggcacttgcagttacattcaccacatttgtaacggagccattgaagcatattggaaaaggaactggggaatttattaaagcactcatgaaggaaattccagcgctgcttcatcttccagtgctgataattatggcattagccatcctgagtttctgctatggtgctggaaaatcagttcatgtgctgagacatataggcggtcctgagagcgaacctccccaggcacttcggccacgggatagaagacggcaggaggaaattgattatagacctgatggtggagcaggtgatgccgatttccattataggggccaaatgggccccactgagcaaggcccttatgccaaaacgtatgagggtagaagagagattttgagagagagagatgttgacttgagatttcagactggcaacaagagccctgaagtgctccgggcatttgatgtaccagacgcagaggcacgagagcatcccacggtggtacccagtcataaatcacctgttttggatacaaagcccaaggagacaggtggaatcctgggggaaggcacaccgaaagaaagcagtactgaaagcagccagtcggccaagcctgtctctggccaagacacatcagggaatacagaaggttcacccgcagcggaaaaggcccagctcaagtctgaagccgcaggcagcccagaccaaggcagcacatacagccccgcaagaggtgtggctggaccacgtggacaggatccggtcagcagcccctgtggctagaggaacaccagcacaaacgacagcctcaagtctccttcgagctttatatccatttggggatgaagtctactttgacagctagcaaggcgacatgcaactgttgttgaatgatgacagcaattcaggaaagacttaaatatgaaagcaaattgaacacatcgggtgtttgttatcagaaaagagatgagatgagataagacttgtttattgactagccaatatgtcattaaaattaaggtttatattgtgaagcttttttgaaattttacttttttttgagagttttgctctgtcacccaggctggagtgaggtggtacaatctcggctcactgcaacctccacctcccaggttcaagagattctcctgcctcagtctcccgagtagctaggattacagatgtgcatcaccatgcctggctaatttttgtattttttagtagagatggggtttcaccatgttggtcaggctggtctcgaactcctgacctcaagtgacccgcccttgtcggcctcccaaagtgctgggattacaggcatgagccattgtgcccagcctatatagtgtgaagcttttaggaaaatcagaacagggtagacagctgttaaaaacaatgtttaaatggaataatgttgaatgtttacaggctgtaagaactattgtatacacaaaataatacacaaagtttgtactttgtgtacaaatacaaatttgtactttgtgtacaaataatacaaaaagtttgtatacacaaactttttacgttgtggtttggtatattgtcttaactgaattttcttataagaaccccatgaaacttacctgagtttttaaaatgctatccaggacatcataccttatagtatacatgaaacataatgtaatccaggttgtaatttagaactttttttttttttttagctgagcacttaatgtaattaattccaggttatgactcttaaaaaacattggccattagagaaatagttctatttgcccatccaaatcacctgaatgactttttgaaagaataggggtccacatccccagatcccatcccagctgtgcacagtctgaagcaagcagagtgaaacaagttggcaacttgttccaagcgtgggcctttgcagtctgtgatccagtgttactccaggtcccagtctgtcccatacttgtcttttgctacagttagttagttactttgttatcatccccttgtaaactgccttcaatatctgggataaggaagacaaagcttaatgacaactaaggttctagctgacatctttctttcatatttaatttttgtgagttttcatctgttttctgtttgtttatgtgtcctaggttcttgacctaaccacatgggttttgttttttgtttttatattagaacttagaaaagtttgttttacagcagtattatggaacagaagagaccattttaaataatttttttaaacagcccaaaacacacaaaagatacttgttttctagagacagggtcttgctctgtcacccaggctggagtgcagtggcacgatcatagctcagtgcagcctccacctcctgggctcaagtggtcctcctgcctcagcctcttaagcagttgggactacaggtgtgtgccagcatgcttgctgttttttttttttttgagacagagtcttgctctgtcactcaggctggagtccagtggcttggtctcagctcactgcaatctctgcctcccaggggttcaagtgattctcctgcctcagcctcccaagtagctgaaactacaggcgcatgccaccatgcccagctaatttttgtatttttagtagagacagggtttcactatgttggccaggctggtctcaaactcccgacctcaagtgatccgcccgcttcggcctcccaaagtgctgggattacaggtgtgagccactgcgcctggctgctgatttatttttcatagacacgggggtctatgttgcccaggttggtcttgaactcctagcctcaagcgatcctcctgcctcagcctcccaatgtgctgggattacaggaatgagccaccatgcccagcccaagaagtagagtttcttttatactgactttggcctaaaaaaacagattttcatggaggaaaaaaaaacctagatttttagtaagactattttatatacttttttacattgatcaagtacattatttttaccaaacaacattgtttcccactacatccatggttatgtataaaaaaacgccattgtcaattaagatgttaaaaaattatttccataagagtattaaattctaatctatgattcacttaacttcctactttataaacactaggtaaagtaatctcacaagctgccaaagaacacatcccaagcagtaatcacagacgatgaagcaccttacaggacccctccaccctcaaacgcgcatgtccagagaagtattaatgccttaatagactactgaaggttaactatttacatcattctaaaaatattttaagctgtattacagtgctataaattctccttttaaggaaaaaagtaatagattgtttccttaccgtgtttgaaaggaaaaaaaataaatccatagtaactaatggtctgccgattttttccctgaatttttaaactccaacaaagcattattttgcaaaaagtcctttagcccaaagtcagtgtctctgttttgatctctttgtaaaagaactctctgttcatccattctctttccctgggaccgtaaaataaggctgaaaaagtcttcatctggtactgtcggaccctttgtggtagcaggtggtggagcacatctttgatcatctaatctggatccctagaagtttatgagagagattaaaagacatactgtgggaaagaaagcaccaagctatgttaaatctctcagtcacaacaagaaaacgcagttgtaaacttttatttggggcttctcagaaattaatctttgtttttatattgttctctttagttcccagcctgatttctgaaagaaataatctttaaacctg

SEQ ID NO: 4142 - DNA, 632 bp, Homo sapiens
tgcacaccagctgtgtagatgtgggagaggggtttcttccagatgcagactctcagtaatatcccttgtttctgcctccatggctcactcctgccctccactgatctggccactctctcagctcatcccactgatgacaccacgacgctctctgagagaccatccccaagcacagacgtccagacagacccccagaccctcaagccatctggttttcatgaggatgaccccttcttctatgatgaacacaccctccggaaacgggggctgttggtcgcagctgtgctgttcatcacaggcatcatcatcctcaccagtggcaagtgcaggcagctgtcccggttatgccggaatcgttgcaggtgagtccatcagaaacaggagctgacaacctgctgggcacccgaagaccaagccccctgccagctcaccgtgcccagcctcctgcatcccctcgaagagcctggccagagagggaagacacagatgatgaagctggagccagggctgccggtccgagtctcctacctcccccaaccctgcccgcccctgaaggctacctggcgccttgggggctgtccctcaagttatctcctctgctaagacaaaaagtaaagcactgtggtctttgc

SEQ ID NO: 4143 - DNA, 3459 bp, Homo sapiens
agctttaaaaggatgtctgcgaagtggtcaaaaggatcttaacctcaattaagtggggttttttaaaaagatttttttgggggcctgaaattttgaaaatcttcgaactctgagtggggaaagatgtataattcctcaattgcctacgaggatatcaagatgctgagaggaattcagcggtggtgaagagagtggatacaaaccagggattggtttccttgagctgttttggaggttgattctaaatcactgcttaaggaattcctggaaacatcaggaaaacatttgatcatccaagcctagtggaaatggctttaccgcagagtgaagatgcaatgaccggggacacagacaaatatcttgggccacaggaccttaaggaattgggtgatgattccctgcctgcagagggttacatgggctttagtctcggagcgcgttctgccagcctccgctccttcagttcggataggtcttacaccttgaacagaagctcctatgcacgggacagcatgatgattgaagaactccttgtgccatccaaagagcagcatctaacattcacaagggaatttgattcagattctcttagacattacagctgggctgcagacaccttagacaatgtcaatcttgtttcaagccccattcattctgggtttctggttagctttatggtggacgcgagagggggctccatgagaggaagccgtcatcacgggatgagaatcatcattcctccacgcaagtgtacggcccccactcgaatcacctgccgtttggtaaagagacataaactggccaacccaccccccatggtggaaggagagggattagccagtaggctggtagaaatgggtcctgcaggggcacaatttttaggccctgtcatagtggaaatccctcactttgggtccatgagaggaaaagagagagaactcattgttcttcgaagtgaaaatggtgaaacttggaaggagcatcagtttgacagcaaaaatgaagatttaaccgagttacttaatggcatggatgaagaacttgatagcccagaagagttagggaaaaagcgtatctgcaggattatcacgaaagatttcccccagtattttgcagtggtttcccggattaagcaggaaagcaaccagattggtcctgaaggtggaattctgagcagcaccacagtgccccttgttcaagcatctttcccagagggtgccctaactaaaagaattcgagtgggcctccaggcccagcctgttccagatgaaattgtgaaaaagatccttggaaacaaagcaacttttagcccaattgtcactgtggaaccaagaagacggaaattccataaaccaatcacaatgaccattccggtgcccccgccctcaggagaaggtgtatccaatggatacaaaggggacactacacccaatctgcgtcttctctgtagcattacagggggcacttcgcctgctcagtgggaagacatcacaggaacaactcctttgacgtttataaaagattgtgtctcctttacaaccaatgtttcagccagattttggcttgcagactgccatcaagttttagaaactgtggggttagccacgcaactgtacagagaattgatatgtgttccatatatggccaagtttgttgtttttgccaaaatgaatgatcccgtagaatcttccttgcgatgtttctgcatgacagatgacaaagtggacaaaactttagagcaacaagagaattttgaggaagtcgcaagaagcaaagatattgaggttctggaaggaaaacctatttatgttgattgttatggaaatttggccccacttaccaaaggaggacagcaacttgtttttaacttttattctttcaaagaaaatagactgccattttccatcaagattagagacaccagccaagagccctgtggtcgtctgtcttttctgaaagaaccaaagacaacaaaaggactgcctcaaacagcggtttgcaacttaaatatcactctgccagcacataaaaagattgagaaaacagatagacgacagagcttcgcatccttagctttacgtaagcgctacagctacttgactgagcctggaatgagtccacagagtccatgtgaacggacagatatcaggatggcaatagtagccgatcacctgggacttagttggacagaactggcaagggaactgaatttttcagtggatgaaatcaatcaaatacgtgtggaaaatccaaattctttaatttctcagagcttcatgttattaaaaaaatgggttaccagagacggaaaaaatgccacaatgatgccttaacttcggtcttgacaaaaattaatcgaatagatatagtgacactgctagaaggaccaatatttgattatggaaatatttcaggcaccagaagttttgcagatgagaacaatgttttccatgaccctgttgatggttatccttcccttcaagtggaactggaaacccccacagggttgcactacacaccacctacccctttccagcaagatgattattttagtgatatctctagcatagaatctccccttagaacccctagtagactgagtgatgggctagtgccttcccaggggaacatagagcattccgcagatggacctccagtcgtaactgcagaagacgcttccttagaagacagcaaactggaagactcagtgcctttaacagaaatgcctgaagcagtggatgtagatgagagccagttggagaatgtatgtctgagttggcagaatgagacatcaagtggaaacctagagtcctgcgctcaagctcgaagagtaactggtgggttactagatcgactggatgacagccctgaccagtgtagagattccattacctcatatctcaaaggagaagctggcaaatttgaagcaaatggaagccatacagaaatcactccagaagcaaagacaaaatcttactttccagaatcccaaaatgatgtaggaaaacagagtaccaaggaaactctgaaaccaaaaatacatggatctggtcatgttgaagaaccagcatcaccactagcagcatatcagaaatctctagaagaaaccagcaagcttataatagaagagactaaaccctgtgtgcctgtcagtatgaaaaagatgagtaggacttctccagcagatggcaagccaaggcttagcctccatgaagaagaggggtccagtgggtctgagcaaaagcagggagaaggttttaaggtgaaaacgaagaaagaaatccggcatgtggaaaagaagagccactcgtaacagcgaacggtcagtcaaggatcataagtttttactgccagtattgagaaattcgtggaagaaatgtcagcaggaagtaaaaattcaccgagaagtgtgtgtgtgttcgctgcttccacacattaatggcatgattttttttatgc

SEQ ID NO: 4144 - DNA, 2997 bp, Homo sapiens
  misc_feature (1375)..(1432): n is a, c, g, or t
  misc_feature (1674)..(1819): n is a, c, g, or t
ggaccacttaatagtgagtcttccaaccagagcttgtgcagcgtcggatccttgagtgataaagaagtagagactcccgagaaaaagcagaatgaccagcgaaatcggaaaagaaaagctgaaccatatgaaactagccaagggaaaggcactcctaggggacataaaattagtgattactttgagcgacgagtagaacagcccctctatggtttagatggcagtgctgcaaaggaggcaacggaggagcagtctgctctgccaaccctcatgtcagtgatgctagcaaaacctcggcttgacacagagcagctggcgcaaaggggagctggcctctgcttcacttttgtttcagctcagcaaaacagtccctcatctacgggatctggcaacacagagcattcctgcagctcccaaaaacagatctccatccagcacagacagacccagtccgacctcacaatagaaaaaatatctgcactagaaaacagtaagaattctgacttagagaagaaggagggaagaatagatgatttattaagagccaactgtgatttgagacggcagattgatgaacagcaaaagatgctagagaaatacaaggaacgattaaatagatgtgtgacaatgagcaagaaactccttatagaaaagtcaaaacaagagaagatggcgtgtagagataagagcatgcaagaccgcttgagactgggccactttactactgtccgacacggagcctcatttactgaacagtggacagatggttatgcttttcagaatcttatcaagcaacaggaaaggataaattcacagagggaagagatagaaagacaacggaaaatgttagcaaagcggaaacctcctgccatgggtcaggcccctcctgcaaccaatgagcagaaacagcggaaaagcaagaccaatggagctgaaaatgaaacgttaacgttagcagaataccatgaacaagaagaaatcttcaaactcagattaggtcatcttaaaaaggaggaagcagagatccaggcagagctggagagactagaaagggttagaaatctacatatcagggaactaaaaaggatacataatgaagataattcacagatttaaagatcatccaacgctaaatgacagatatttgttgttacatcttttgggtagaggaggtttcagtgaagtttacaaggcatttgatctaacagagcaaagatacgtagctgtgaaaattcaccagttaaataaaaactggagagatgagaaaaaggagaattaccacaagcatgcatgtagggaataccggattcataaagagctggatcatcccagaatagttaagctgtatgattacttttcactggatactgactcnnnnnnnnnnnnnnnnnnnnnnnnnnnnnnnnnnnnnnnnnnnnnnnnnnnnnnnnnncacaaattaatgtcggagaaagaggcccggtccattatcatgcagattgtgaatgctttaaagtacttaaatgaaataaaacctcccatcatacactatgacctcaaaccaggtaatattcttttagtaaatggtacagcgtgtggagagataaaaattacagattttggtctttcgaagatcatggatgatgatagctacaattcagtggatggcatggagctaacatcacaaggtgctgnnnnnnnnnnnnnnnnnnnnnnnnnnnnnnnnnnnnnnnnnnnnnnnnnnnnnnnnnnnnnnnnnnnnnnnnnnnnnnnnnnnnnnnnnnnnnnnnnnnnnnnnnnnnnnnnnnnnnnnnnnnnnnnnnnnnnnnnnnnnnnnnnncaagacatcctacaagagaatacgattcttaaagctactgaagtgcagttcccgccaaagccagtagtaacacctgaagcaaaggcgtttattcgacgatgcttggcctaccgaaaggaggaccgcattgatgtccagcagctggcctgtgatccctacttgttgcctcacatccgaaagtcagtctctacaagtagccctgctggagctgctattgcatcaacctctggggcgtccaataacagttcttctaattgagactgactccaaggccacaaactgttcaacacacacaaagtggacaaatggcgttcagcagcgggtttggaacatagcgaatccgaatggatctgatgaaacctgtaccaggtgcttttattttcttgcttttttcccatccatagagcatgacagcatcgattctcattgaggagaaaccttgggcagctccggccaggccttgtaggaaaaggccccgcccgaggttccagcgtcaacggccactgtgtgtggctgctctgagtgaggaaaaaattaaaaagaaaaactggttccatgtactgtgaacttgaaaacttgcagactcaggggggtccctgatgcagtgcttcagatgaagaatgtggacttgaaaatacagactgggctagtccagtgtctatatttaaacttgttcttttcttttaataaagtttaggtaacatctcctgaaaagcttgtagcacaaaggctcagctggggatggtgtttgacttcggaggaaaaaagttgctattgcccgttaaaggcactagagttagtgttttatccctaaataatttcaatttttaaaaacatgcagcttccctctccccttttttatttttgaaagaatacatttggtcataaagtgaaacccgtattagcaagtacgtggcaatgttcattccaatcagatgcagctttctcctccgtctggtctcctgtttgcaattgcttccctcatctcagtagggaaaaaattgagtgggagtactgagatgtgtgggtttttgccattggacaaagaatgaggttagaagactgcagcttggagtctctctaggttttcaactatttcttcacaatttgaacacttgacggttgtcccttttaatttatttgaagtgctatttttttaaataaaggttcatctgtcc

SEQ ID NO: 4145 - DNA, 3052 bp, Homo sapiens
cgcccggggccatggcgacactcagcttcgtcttcctgctgctgggggcagtgtcctggcctccggcttctgcctccggccaggagttctggcccggacaatcggcggccgatattctgtcgggggcggcttcccgcagacggtatcttctgtatgacgtcaaccccccggaaggcttcaacctgcgcagggatgtctatatccgaatcgcctctctcctgaagactctgctgaagacggaggagtgggtgcttgtcctgcctccatggggccgcctctatcactggcagagtcctgacatccaccaggtccggattccctggtctgagttttttgatcttccaagtctcaataaaaacatccccgtcatcgagtatgagcagttcatcgcagaatctggtgggccctttattgaccaggtttacgtcctgcaaagttacgcagaggggtggaaagaagggacctgggaagagaaggtggacgagcggccgtgtattgatcagctcctgtactcccaggacaagcacgagtactacagaggatggttttggggttatgaggagaccaggggtctaaacgtctcctgtctgtccgtccagggctcagcctccatcgtggcgcccctgctgctgagaaacacatcagcccggtccgtgatgttagacagagccgagaacctacttcacgaccactatggagggaaagaatactgggatacccgtcgcagcatggtgtttgccaggcacctgcgggaggtgggagacgagttcaggagcagacatctcaactccacggacgacgcagacaggatccccttccaggaggactggatgaagatgaaggtcaagctgggctccgcgctagggggcccctacctgggagtccacctgagaagaaaagatttcatctggggtcacagacaggatgtacccagtctggaaggggccgtgaggaagatccgcagcctcatgaagacccaccggctggacaaggtgtttgtggccacagatgccgtcagaaaggaatatgaagagctaaaaaagctgttacccgagatggtgaggtttgaacccacgtgggaggagctggagctctacaaggacggaggcgttgcgattattgaccagtggatctgcgcacacgccagttcatgaagtgccgctggagagccagagaccagctgcgcaggagccggaggaacgggcaggccgctgacctgaggtctggagaaacccctggagaagggtgtccccaccagcccatacagcgtgtgtgtggagggggccttgacctccgtgatgtctactgtgcctcaggataaggacccgccatgccctggctagacagtgtgtggttttttattggcacctcagtctcaacattttcttttcggattcatgaggaaagagaaatcctggggttggaccccaagacgacgtacaacaggttctgcggagaccaagagaaggcgtgtgagcaacccacccactggaagatcacctactgaggaggatcctccagggccgctccccggacccgacaggcgcgggtggatgcaggttctgtcgccgtggagtcaccgtctactgccagccgggagctgggcggacaggaccgtccctcgcagggtcccaggcccagaagaggccccacgcctctagagctgggctccgtcctcggcgttgccagccgccatggctgatgaagaggctccgctgctctcgggggtggcggttgttttcaggcagcgtctgtgaacccacagctcggttgccagcagtgcccgcgtggtgacccagaagcaggagtgtttgtcaggctcccgctctggcctttccagccacctttcatgtcttcatattttaagtgcattgaggatagatgcaggcgggtgagctgccctccgtcaggtggacccgggctgacatttccctgggagctggtgcaaggagaagcgtcattttaaatgtctgcagagcgaccaggggcctcatgaatctctccgttgccctccgcgcagcaggaggctgcctgtgtgtttcctcctgggatgcgtgcaaggcagacctggtgctgcaaaggaaagggcctgaggcctcagggagccccgtggagggatgacagttcaggccctactgctggcacgtcagagcactgggaagtttttcagtgacgtctctggggcactcagtggattgtctgtaggaaacttgcagctctgctcctcacaccaggcccggctggccacccaccctcgcccccactggccacccctccctcgccccgactgccccgccccaccctcaccccgactgccccgccctcgcccggctggccgtccctgccctcgccccggctggcaggtgcacatggggcctccaggtctgccattcgctattgagaactagaaatgaggaaggacagttacgctaactccaaaaggctgtctaggatgagctgctttatcagggagctccttgtacccattttacagaaatcatttttaggtctttgtgccaccaccacgaggggcatctgcaaagagggcaacgctagacacagaatccgtggaaggtgcagcagtgcctcaggggtcctcagggtcagggagcccccctcaccctcttggcccgttaccctttgtgactttccaccatggtgtcgtgtgaccctcagtcaggttggtgggggctgagtcctcactgagcagccactttccacatctgctagaggaacagtgacatggacacctgtgacagagagaggacagttaggagggacagacagctcttcctttcggagcctggctagtctaggacatcaccttgctgtgtcttctcaagcttttaaaattgaccctgaacgtgtgacagggtcctatggtgttactcaaagctgtgcagggtaaatgatgacatatttattctttttccatttgttctagaaacagtgcctttttcatcagttgcattttccaggctgagagctgtataaaacattttggactgtgaccatgtaccttcctttttaagaaaaataaactgctttatgg

SEQ ID NO: 4146 - DNA, 4272 bp, Homo sapiens
gtcattgctgatgggggcgagcttcctgcagctgcagagcatcaaagacgcctgctgcacattccttcgagaacggcttcacccaaaaaactgcctgggtgtgcgccagtttgctgagacaatgatgtgtgctgtgctgtacgacgctgccaacagcttcatccaccagcactttgtggaggtgtccatgtcagaagagttcctggccctgcccttggaagacgtgcttgagctggtgtctcgggatgagctgaatgtcaaatctgaggagcaggtctttgaagctgcattggcctgggtcagatacgaccgggagcagaggggtccctacctgcctgagctgctgtccaatatccgcctgcccctctgtcggccccagttcctttcagacagagtacagcaggatgacctggtgcgttgctgccacaaatgcagggacctggtagacgaagcaaaggactaccacctcatgccagagcgccggccccacctgccagctttcagaacccggccacgctgctgcacatccatcgctggacttatctacgctgtagggggcctcaactcagcaggtgattccctgaatgtggtggaagtgttcgaccccattgccaattgctgggagagatgccgtcccatgacaacagcacgcagccgcgttggcgtggctgtggtgaacgggcttctctatgccatcggaggatatgacggccagctacggctgagcactgtggaggcctacaacccggagacagacacatggaccagagtggggagcatgaatagcaagagaagtgccatggggacagtcgtgctggatgggcagatctacgtctgtgggggctacgatggcaactcttccctcagctccgtggagacctactcacctgagacggacaaatggacagtggtgacctcgatgagctcgaatcgcagtgctgctggggttacagtctttgagggcaggatatatgtgtcaggcggccatgatggtttgcagatcttcagcagttggaacactacaaccaccacacagccacctggcaccctgcagctggcatgctcaacaagcgctgccggcacggagccgcctccctggggagcaagatgtttgtctgcgggggctacgatggctctggcttcctcagcattgccgagatgtacagctctgtggcagaccagtggtgcctgattgtccccatgcacacgcgcaggagccgggtctccctggtggccagctgtgggcgcctctacgctgttgggggctacgacggacagtcaaacctaagctcagtggagatgtatgacccagagacagactgctggacattcatggcccccatggcgtgccatgagggaggggtcggtgtgggctgcatccctctcctcaccatctaaggcagaggatgggatgtggtggggcagggatctggtacagacataggcgcttccttccaggaacagtccctcaggagaggcagtggaccagaagagatggcgaaacgtgagctcgccggaggtacagtttttccaggtgcttaagccctccccaactgtgccacccttgtgaccttcaggcttgggtcatcaagatgcacagcatggaacacaagctcctctggatcctgcagctggtgacatggaactgttttctggtccacatgaacacaggctccatccaggcccagctcctacccaccgcctctctgtgggccagctgttcacagaaggccttccatctgatgctccccatcgcctgcttgctctccagccgagtctggccaatttgccatggggaggctgcagtgtccaagcctgctggaaactgggatgtagctggggacgaaaggacagacccaagcgttctccctgcctgagatggtgtggccacagcagtggaaggctgcacacaggcacattccttcttccacagtggggcaccaaggattctgtcctcattgctgggtaagcagggagaagagaagttttccccatgtctaattttgggatttcagtgaggccttttccatctgtccaggagaacagaagggaaaaaaagatacttgaaagaaactgaaggaaatttaaacaaagaaacacttgaaagaaactggaaagaaaaataatttttttatgtgaacaaattttgcaagaagaaaaaagcataaaagacactaacggcaaatctatgtttaaatggaaaatcgtctaactggagaagggcggtatccaccccacattcggatcccagggtcctgaggcctcgcattgagctgggggttccctctgagccccagtgtgtgtggaatcagtgcactcttgactgggcctgtagtaaggtgctcatggggtttgtcttctcacccaccatcagaggacttttaaaatcataggcgtagagagttagctatctgctgaattactgccactcttcttggtgggggctcctagctgtggctgggggctccaggcgcccctgtgattacctcctactgccaccatggcgctcattcagattccccactctcactaacattgcttccttttttgaccagcaggaaacagcaggtctggccagattctcacttgcccatcaatctcgttcttggatgatttccctcattgtgatgcttctggggcacgttgaccatatgcacctctagaacctaaccagggcttccttctaccagctgtgggcgggcttggtctggtaaccttgtctgctctgccattccactgctcctccatccactcgccaatcccaagagtctggcctccctccagccctgggcagactgaccagcaaggtggacctttacattcaagcacagctggcttttatgacataaagaactaaaggccgaaagaatctcttgctgctgcaaagaacagattttatatttcttcctctaatcttggcaaatgacctttaccttttggaaagatttcatattgcttcctcctccctggataggacctaatgtagcacagcgggactcaaagaggaggacattttctcttgccagtgcactgggcagtggggctgtccttcaactgctgctgccaaaattggttttctaaaattcttccagtagagactaaaagaagattcaattcctgtaacccaagactgagtcttagggctccagtctccacctgcttggtttcctatcctttgctgcctgcctggggtggcctggaagcctgttcagaaaggcacaatgtggagcctggggtgtctcccccaccccaggaccgtcaggtttaccagtgtgtgcaatcgccatgtattcagagggaagtacctttgttacctacaacttaggagctaggcctctgctacaagcacttgaaaatgatatttttatttttaacgtctcaacaatctgatatcggatgtcgtttaacctgggctcgtggtagggctccagcatttctccctccttcctggtttgcctgtaggggtagactcggaaggtgggtggggtgtgcatttcctgttaggagtgtatcagtgcttgtcttattataagcccctttcttttgtgaatttgaagtagcaccaacaagcctggattgtgaaggtattaagaatcggtctgtgggctactgagtgggtccttaggatactggcccagattttgccactgggtatggcagatcattttctaccatggcctgctgctcttgtagtggacttcctgagtccaatcccacctcctggtgtagaatttacactgctgcacctgaggtcgatgtttcaaagtaagatcaagccagtgttttgatctgggctctgagcacaagtcaggaaacaccaacatattcacactctcccagtaggttcctcagtccgatggtgaatggctattcgtaaatggctggtctggctctttggtgttggagcctttccaatagccccatgaaaagaagcatcacccaaggatattgtaaaaaggatgtaacaaggagatagggtagacattgtactcagtgggccttggggcctagcccagctctgagcagaggactgtggcattcactgtccttgagtgtttcaccttcttggataacacacgggccttctcttctggatttcatcagagattacagccagatgggggctgaagaccatcctcttgaccacagaggtgtgactgtgggaattcctcccaatttatggtttcccagaaaatcttagttccttttatttatagaatgcatgtcttttgtgttaagaaaccaaagagaaataaagagaacactcctaat

SEQ ID NO: 4147 - DNA, 1870 bp, Homo sapiens
cacccttgaaatgcagcatgccaagaaggctgcagagatagcgagtgagaaagactataaaagagatctggagactgaaattaaagggaaagggatgcaggtgagcacagacactcttgatgtccagagagctaagaaagcatccgagatggccagccagaaacaatacaagaaggacttagaaaatgaaattaaagggaaaggaatgcaagtgagcatggatatcccagatatccttcgagccaagaggacatctgaaatctatagccagagaaagtataaagatgaagcagagaagatgctttctaactattctaccatagcagatactcctgaaattcagagaattaagacaactcaacaaaacattagtgcggtattttataagaaagaagtgggagctggcactgcagtgaaagatagcccagagatcgaacgagtgaagaaaaatcagcagaatattagttcagtgaaatacaaagaagagattaaacatgcaacagccatttctgatcctccagaactaaagagagttaaagaaaaccagaagaacatcagcaatctccagtataaagagcaaaactacaaggccactccggtaagcatgaccccggagatagagagagtgaggcgaaaccaggagcagctgagtgcggcaagtcgtttctgtttccttttatattttctcaaacataacatatttttatttaaaaatatgccctttggaaggccattatccttagcaaactaacacaggaacgtaaaaccaaatactgcataataatgagagctaaatgatgagaatacatggacacatagaggggaataacagacaccggagcctgttggacgggagaggatgggaggagggagaggatccggaaaagtaactgttgagtactgggcttaatgccggggtgatgaagtcatctgtacaacaaactcccataacacaagttcacctgtgtaacaaacctgcacatgtaccgctgaacttaaaagttttaaaagaaaatgaatttgagcaacatgcaattatatggatgaatcatatcattataacatgaaaaagtgaatatgtacatgcagcattaattcttttgtaaaatttaacaactgcaataataacgatgatgataaacggaatatctccagatttaataaaactatctaaaaatttaaaaaggaaaagttttacaccctctgcatttttggatgttccttttcacatttccttgttgaagggcatgaactgcgtgtccaggaaatttgggactgtgttgctgtaccttagctgtgtttgcttattcaagagatcttcattaagtacccaaatgtactgggcattgtcctggtcacccagacacaaagatgggtaaaatataagggagaacttcaacggggaactgcaatttctgatccaccagagctgaagagggcaaaagaaaaccagaaaaacatcagcaatgtttattacagaggtcagctgggaagagctaccactttaagtgtaactcctgaaatggaaagagtgaagaagaatcaagaaaatattagctcggtaaaatatacccaggaccataaacagatgaaaggtagaccaagtctgattttagatacacctgctatgagacatgttaaagaagcacaaaatcatatttcaatggtaaaataccatgaagattttgaaaaaacaaaggggagaggctttactcccgtcgtggacgatcctgtgacagagagagtgaggaagaacacccaggtggtcagcgatgctgcctataaaggggtccaccctcacatcgtggagatggacaggagacctggaatcattgttgacctcaaagtttggcgcacagatcctggctcc

SEQ ID NO: 4148 - DNA, 344 bp, Homo sapiens
cctttccggcggtgatgacctacccacacgagaacatgcctcttgcaaagggtctccttcatccctctccagaaaaggagaagaggaaacacaagaagaaacgcctggtgcagagccccaattcctgcttcatggatgtgaaatgcccaggatgctataaaatcatcacggtctttagccatgcacaaacggtagttttgtgtgttggctgctccactgtcctctgccagcctacaggaggaaaagcaaggcttacagaaggatgttccttcaggaggaagcagcactaaaagcactctgaatcaagatgagtgggaaaccatctcaataaacacattttggat

SEQ ID NO: 4149 - DNA, 3750 bp, Homo sapiens
gttctgcaagcctacatcagcaatgacctcttggactgttatagccacaaccagaggagtgtgcttcagttgctgcactccacgagcgacgtggtgcggcagtacatggccaggctcatcaatgcttttgcgtcactggcagaaggtcgcctctaccttgcccagaacacaaaggtgctgcagatgctggagggaaggctgaaggaggaggacaaggatatcatcaccagggagaatgttcttggggccctgcagaagttcagtctcaggcgcccgctgcagacagcgatgattcaagacggcctcatcttctggctggttgatgttctgaaggaccctgactgcctgtctgactacacgctggagtactcggtggctttgctcatgaacctctgcctccgcagcacagggaagaacatgtgtgccaaggtggcaggcctcgtgctcaaagtcctttcggatcttcttggccatgaaaaccatgagatacagccgtatgtgaatggagctctgtacagcatcctttctgttccatccattcgtgaggaagcaagagcaatgggaatggaagacatcctacgctgcttcatcaaagaaggcaatgctgaaatgatccgccagatagaattcatcatcaagcagctaaattccgaagagctaccagatggtgttcttgaatctgatgatgatgaagatgaagatgatgaagaggaccatgacatcatggaagccgatctggacaaagacgaactgatccagccccagctcggagaactctcaggagagaagcttctgaccacggagtacctggggatcatgaccaacacggggaagacaaggcggaaggggctggctaatgtgcagtggagcggggatgagcccctgcaaaggcccgtcacccccggcggccacagaaacgggtacccagtgtggaagaccaacacacacctccccagacagcccagcacgccagaaacggccacccgcaggccctgccagccgctcacgaggctgtctacagggagggcaagcccagcaccccggagtcctgcgtctcctcttcatcagccatcatcgccaagccaggagagtggctcccaagaggacgccaggaagagcctcgcccagcccccacgggaccccccgccagccaagggaggcgccccaggacccaggcaatggagtgaccaccagggaatgtgcatcagccttcacctgcaagccccgggccccctgcactccagagatgctggactggaacccacccaaggcaaaggcgtcagttctggcccctctgttctcttcgtgtggcccccagcaggccagccgccccggctccacagcgtcctccacaaggggcctgccgagcagccagtctcacaggaagtaaggatgtccccgggtgtccccatcacgttgccggaggaccagccagcttcccgctctcagctggcagcagctgccggtgatggatgtgaagggacagttgtccacaagactctgggagctgaggggaggccggctctccaggcagcaccagagcaaggccatcgcagccccgccagccgggtcactttctcccagggcagagccaccaaggagggctggggagagcctggcattgccctcctggagaggggaatttcctgctcacccttcacacacagaggagaggggtggcttttgcccgcaggagatcttctggccccagaaacagcaggtgctggatttgcagccctggccctccaggccccaacagggcgacagtgtagggccagcctggagcagggcttttccaaggctgctgaagccagccctcctcacttgggctgactaccaggacccagaaggaactcagggtgaagctcattttattctcaagcctgcgtctcagcagcaaagttggtgttttcttcctgtgttaaaatctgagaaagaaggccaggtgcggtggctcacgcctgtaattccaggactttggaaggctgaggcgggcagatcacgaggtcaggagatcgagaccatcctggctaacgtggtgaaaccccgtctctactaaaaaaatacaaaaaaattagccgggcgtggtggcgggcgcttgtagtcccagctactctggaggctgaggcaggagaatggcgtgaacccgggaggcggagcttgcagtgagccgagatcgtgccactgcactctagcctgggtgacagagcgagactccgtccccaaaaaaaaaattctgagaatatggtgtgttccagcctcttcaaagctctgctcttctgcacacgttttttgaaggccttaaaaaggccaccagtgtgaccagggagcaccctctgcctccctccctgcactgggaccataaacataaacagctctaccagcaaagtgacccatcccgcgggggaggcctgcgcacgcccctcaccagggctgtcatcagaatccagtcttaggacagaggaaggatgtttgccttcaggaccagcaagtcacaggtgtcctggatgttacccaagctctaaaatcaaataaaacccatcagtatttagtggtgtgtgtgtgtgtgtgtgtgtgtgtgtgtgtgtgtgtgtgtgtgtgtgtgtgtgtatgagtgtatgaagggaaatggaaagcagagaaaagtcgcgtgccctcccccaggcacctgatctgcccacagacccttcaatggggacatctctggtcccaatggtcgtaaataaaggctaagcgctggatttttccatggccccctgactcctcaggagcgcaggcagaggaggtaaacaggaggccaggttacccatgagatgaccagaagctcatccagggccgggaccctggttcatctcgtgaattcttggcagcggctccaggctgggcacattagatgctgtcatgtgactggcctggtggccacctcttggttctctggaaatgtgtccactctgtgctcagggaagaaggctgccgtcctgacctgtcagccaccaggccctctctgaactcctcacttgacccggaggcattgggagcaaacacaaagctcgcccctggtgtcagtggtgcagacagaggaaaagcagagggtccgcaaaatgcaactcctccgtggtgagactttgaaaaggtgtagagtggttgcagacaaacagcaaaggagtggaatggaaaaatctctcttgctccccacaagaagtccactcccctacggattcctcagatgccactggctggcacagcctttcccgcccttggtgtgggagcagcagaagtccagcgggggtgggagaatcatcggggtcaggtcagtgtctccctcgtctgaagtcaaccactacttttccctcaagcctaccaaagagctaaagtctgatctgtagatgtctgatggtttgaggagaagaaaagatagtcttttagagaagtggggagtatccaacttagggtcaaaatacactgagattaggccgggcacagtggctcacacctgtaatcccagtgctttgggaggccgaggcggatggatcacttgaggcctccaggagttcgagaccagcctggccaacatggcgaaaccccgtctctactaaaatacaaaaaattagctggatgtggtggtgggtgcctgtaatctcagctactcaaggaggctgaggcacaagaatagcttgaaccgggagatggaagatgcagtgagccaagatcacgcccctgcactccagcctgggcgacagagactccgtc

SEQ ID NO: 4150 - DNA, 1238 bp, Homo sapiens
tgggaatgcctcgctgggaatgcagctgagcctgtgtgggtgtggagagaaggtgcagatggcctccggttttctctttgcaggctgagaaagtgttcatggtggctcgagggcttgtccgagaggctcgggaggacttggaagttcaccaggccaagctgaaggaggtgagggaccgcttggaccgtgtctccagggaggacagtcagtacttggaactggctactctcgagcacaggatgctgcaggaggagaagaggcttcgcacagcctatctgcgtgcagaagactctgagcgagagaagttctccctcttctctgcagctgtgcgggaaagtcatgagaaggagcgcacaagggctgagaggaccaagaactggtccctcattggctcagtcctgggggccctgattggtgtggctggctccacctatgtgaaccgtgtgcgactacaggagctgaaggctttactcctggaggcgcagaaggggcctgtgagtctccaagaggccattcgagaacaggcgtctagctactcccgccagcagagggacctccacaatctcatggtggacttgaggggcctggtacatgctgctgggccagggcaggactctgggtcacaggcaggtagtcccccgaccagagacagagatgtagatgtcctttcagctgccttgaaagagcagcttagtcattccaggcaagtccattcatgtctagaaggcttacgagagcagcttgatggcctagaaaagacttgtagccaaatggctggggtggttcagcttgtaaagtctgcagcacacccaggcctggtggaaccagcagacggggctatgcccagcttcttgctggagcaggggagcatgatcttggcactgtcagacacggagcagagactagaagcccaagtcaacaggaacaccatctatagcaccctggtcacctgtgtgacatttgtggccacactgcctgtgctctacatgctattcaaagccagctaacccctggcccctcctccagagggtctgaggcaatagctgtgaatgtggatttaagtagagaatcgtagcaatgaagcgagcctttgggggcatgtacaacctcaatctgaaggagcagtgtctgtgtggctcaccagcaggcatgcttcgctttgtagacaaggttcatttacattaattatcaaaactttgtgctaatgtccaattaaaatatcctgagttttattattt

SEQ ID NO: 4151 - DNA, 642 bp, Homo sapiens
tccttcctttccagccccagccccggaccctacagctgccaagatgctgatgcctaagaagaaccggattgccattcatgaactcctttttaaggagggagtcatggtggccaagaaggatgtccacatgcctaagcacccggagctggcagacaagaatgtgcccaaccttcacgtcatgaaggccatgcagtctctcaagtcccggggctgcgtgaaggaacagtttgcctggagacatttctactggtaccttaccaatgagggtagccagtatctccgtgattaccttcatctgcccccagagattgttcctgccaccctacatctgcccccggagattgttcctgccaccctacaccgcagccgtccagagactggcaggcctcggcctaaaggtctggagggtaagcgacctgcaagactcacaagacgggaagctgacagagatacctacagacggtgttctgtgccccctggtgctgacaagaaagccgaggctggggctgggtcagcaaccgaattccagtttagaggcagatgtggtcgtggacgtggtcagccacctcaataaaattggagaggattatttcacattgaataaacttacagccaaaaaaaaaaaaaaaaaaaaaaaaaaac

SEQ ID NO: 4152 - DNA, 1536 bp, Homo sapiens
cttctcatcatggcggaccctagagataaggcgcttagggactaccgcaagaaggtgcttgagcacaaggagatcgatggccgtcttaaggagttaagggaacaattaaaagaacttaccaagcagtatgaaaagtctgaaaatgatctgaaggccctacgaagtgttgggcagattgtgggtgaagtgtttaaacagttaactgaagaaaaattcattgttaaagctaccaatggaccaagatatgttgtgggttgtcgtcaacagcttgacaaaagtaagctgaagccaggaacaagagttgctttggatatgactacactaactatcatgagatatttgccaagagaggtggatccactgatttataacatgtctcatgaggaccctgagaatgtttcttattctgagattggagggctatcagaacagatccgggaattaagagaggtgatagaattacctcttacaaacccagagttatttcagcgtgtaggaataatacctccaaaaggctgtttgttatatggaccaccaggtacgggaaaaacactcttggcacgagccattgctagccagctggactgcaatttcttaaaggttgtatctagttctattgtagacaagtacattggtgaaagtgctcatttgatcagagaaatgtttaattatgctagagatcatcaaccatgcatcatttttatggatgaaatagatgctattggtggtcgtcggttttctgagggtacttcagctgacagagagattcagagaacgttaacggagttactgaatcaaatggatggatttgatactctgcatagagttaaaatgatcatggctacaaacagaccagatacactggatcctgctttgctgtgtccaggaagattagatagaaaaatacatattgatttgccaaatgaacaaacaagattagacatactgaaaatccatgcaggtcccattacaaagcatggtgaaatagattatgaagcaattgtgaagctttcagatggctttaatggagcagacctgagaaatgtttgtactgaagcaggtatgttcgcaattcgtgctgatcatgattttgtagtacaggaagacttcatgaaagcagtcagaaaagtggctgattctaagaagctggaggctaaattggactacaaacctgtgtaatttactgtaagatttttgatggctgcatgacagatgttgacttagtgtaaaaataaagttaaagaaaataatgtatgtattggcaatgatgtcattaaaagtatatgaataaaataacatcataaaaattagtagttcaacttttaagatacagaagaaatttgtatgtttgttaaagttgcatttattgcagcaagttacaaagggagagtgttgaagcttttcatatttgctgtgtgagcattttgtaaaatattgaaagtggtttgagatagtggtataagaaagcatttcttatgacttattttgtatcatttgttttcctcatctaaaaagttgaataaaatctgtttgatt

SEQ ID NO: 4153 - DNA, 2092 bp, Homo sapiens
gaaccagttgtaaggagaatggagagagcagtgagagtggagtccggggtcctggtcggggtggtctgtctgctcctggcatgccctgccacagccactgggcccgaagttgctcagcctgaagtagacaccaccctgggtcgtgtgcgaggccggcaggtgggcgtgaagggcacagaccgccttgtgaatgtctttctgggcattccatttgcccagccgccactgggccctgaccggttctcagccccacacccagcacagccctgggagggtgtgcgggatgccagcactgcgcccccaatgtgcctacaagacgtggagagcatgaacagcagcagatttgtcctcaacggaaaacagcagatcttctccgtttcagaggactgcctggtcctcaacgtctatagcccagctgaggtccccgcagggtccggtaggccggtcatggtatgggtccatggaggcgctctgataactggcgctgccacctcctacgatggatcagctctggctgcctatggggatgtggtcgtggttacagtccagtaccgccttggggtccttggcttcttcagcactggagatgagcatgcacctggcaaccagggcttcctagatgtggtagctgctttgcgctgggtgcaagaaaacatcgcccccttcgggggtgacctcaactgtgtcactgtctttggtggatctgccggtgggagcatcatctctggcctggtcctgtccccagtggctgcagggctgttccacagagccatcacacagagtggggtcatcaccaccccagggatcatcgactctcacccttggcccctagctcagaaaatcgcaaacaccttggcctgcagctccagctccccggctgagatggtgcagtgccttcagcagaaagaaggagaagagctggtccttagcaagaagctgaaaaatactatctatcctctcaccgttgatggcactgtcttccccaaaagccccaaggaactcctgaaggagaagcccttccactctgtgcccttcctcatgggtgtcaacaaccatgagttcagctggctcatccccaggggctggggtctcctggatacaatggagcagatgagccgggaggacatgctggccatctcaacacccgtcttgaccagtctggatgtgccccctgagatgatgcccaccgtcatagatgaatacctaggaagcaactcggacgcacaagccaaatgccaggcgttccaggaattcatgggtgacgtattcatcaatgttcccaccgtcagtttttcaagataccttcgagattctggaagccctgtctttttctatgagttccagcatcgacccagttcttttgcgaagatcaaacctgcctgggtgaaggctgatcatggggccgagggtgcttttgtgttcggaggtcccttcctcatggacgagagctcccgcctggcctttccagaggccacagaggaggagaagcagctaagcctcaccatgatggcccagtggacccactttgcccggacaggggaccccaatagcaaggctctgcctccttggccccaattcaaccaggcggaacaatatctggagatcaacccagtgccacgggccggacagaagttcagggaggcctggatgcagttctggtcagagacgctccccagcaagatacaacagtggcaccagaagcagaagaacaggaaggcccaggaggacctctgaggccaggcctgaaccttcttggctggggcaaaccactcttcaagtggtggcagagtcccagcacggcagcccgcctctccccctgctgagactttaatctccaccagcccttaaagtgtcggccgctctgtgactggagttatgctcttttgaaatgtcacaaggccgcctcccacctctggggcattgtacaagttcttccctctccctgaagtgcctttcctgctttcttcgtggtaggttctagcacattcctctagcttcctggaggactcactcccccaggaagccttccctgccttctctgggctgtgcggccccgagtctgcgtccattagagcacagtccacccgaggct

SEQ ID NO: 4154 - DNA, 1714 bp, Homo sapiens
cccaggaagagccaggacagcaggaagcccctgcagaaaaagaggaagcgctcccccaagagcgggctcggccccgcggacctggccctcctgggcctctcggccgaacgcgtgtggctggacaagttacttttcgaccaggcagagagctcctaccgccagaagctggcagatgtggctgcccgggcagcctggcctcctgccttggccccttggggtctctgcacccatggaaaccaggtggcctgccaccacgtgacctgggggatctgggtcaacaagtcctccttcgaccaggctgagcgggccttcgtggagtggtctcaggccctgttgctggcccccgacggcagccgcaggcaggggactcccaacacaggccagcaggtggccgtccccgacctggcccaccagcccagcccaccggtcaatggccagcccccgctgggcagcctgcaggcactggttcgggaggtgtggctggagaagcccggtatgatgcagccgagaggggcttctacgaggccctgtttgacggccatcccccagggaaggtgcgcctgcaagagcgagccggcctggccgagggtgcccggcgggccgcagagaccggcggggccgcaacatcttagggaacaagcgggccgggctgcgacgggccgatggggaggcccctctgccttgccctactgttacttcctgcagaaggatgcagaggccccctggctcagcaagcctgcctacgacagcgccgagtgccgccaccacgctgccgaggccctgcgggtggcctggtgcctcgaagctgcctccctgtctcaccgacccggtcctcggtctggcctgtccgtgtccagcctgagacccaacagaaaaatggctacaaacttcctagcacatgagaagatctggttcgacaagttcaaatatgacgacgcagaaaggagattctacgagcagatgaacgggcctgtggcaggtgcctcccgccagagctcaggccccggggcctccagcggcaccagcggagaccacggtgagctcgtcgtccggattgccagtctggaagtggagaaccagagtctgcgtggcgtggtacaggagctgcagcaggccatctccaagctggaggcccggctgaacgtgctggagaagagctcgcctggccaccgggccacggccccacagacccagcacgtatctcccatgcgccaagtggagcccccagccaagaagccagccacaccagcagaggatgacgaggatgatgacattgacctgtttggcagtgacaatgaggaggaggacaaggaggcggcacagctgcgggaggagcggctacggcagtacgcggagaagaaggccaagaagcctgcactggtggccaagtcctccatcctgctggatgtcaagccttgggatgatgagacggacatggcccagctggaggcctgtgtgcgctctatccagctggacgggctggtctggggggcttccaagctggtgcccgtgggctacggtatccggaagctacagattcagtgtgtggtggaggacgacaaggtggggacagacttgctggaggaggagatcaccaagtttgaggagcacgtgcagagtgtcgatatcgcagctttcaacaagatctgaagcctgagtgtgtgtacgtgcgcgcgtgcgtgaggccctgccacgattaaagactgagaccggc

SEQ ID NO: 4155 - DNA, 377 bp, Homo sapiens
caggctccaaacaggcatgcgaggtgcctttggaaagccccagggcactgtgaccagggttcacattggccaagttatcatgtccatccacaccaagctgcagaacaaggagcatgtaattgaggccctgcgcagggccaagttcaagtttcctggccaccagaagatccgcatctcaaagaagtggggcttcaccaagttcaatgttgatgaatttgaagacatggtggctgagaagcagctcatccctgatggctgtggggtcaagtacatccccagtcgtggccctctggacaagtggcgggccctgcactcatgagggcttccactgtgctgccccctcttaatactcaccaataaattctacttcctgtcca

SEQ ID NO: 4156 - DNA, 1189 bp, Homo sapiens
gggatcgaactcttgctgcagggtttcgatcgccgcttcctggcggcgcgcacactgcgctccttcccctggcatgtgggcggcggggcgagcggagaggcccgcggggctcgcgggagtccaggggcagacgggatgggtctccgtgctgaaacccccggcgctccggctacactgtgaagcatcctgtgtgtgtgtgaagcacccgccgtcagtcaagtatgcccggtgctttctctcagaactcatcaaaaagcacgaggctgtccacacggagcctttggacgagctgtacgaggggctggcagagactctgatggtcaaggagtccacccagggccaccggagctatttgctgccctcgggaggctcggtcacaatctccgagagcacagccatcatctctcacggtaccacaggcctggtcacatgggacgccaccctctgccttgcagaatgggccatcgagaacccagcagccttcactaacaggactgtcctagaacttggcagtggtgccggcctcacaggccttgccatctgcaagatgtgccgcccccgggcatacatcttcagcgaccctcacagccgggtcctcgagcagctccaagggaatgtctttctcaatggcctctcattagaggcagacatcactgccaacttagacagccccagggtgacagtggcccagctggactgggacgtagcgacggtccatcagctctctgccttccagccagatgttgtcattgcagcagacgtgctgtattgcccagaagccatcgtgtcgctggtcggggtcctgcggaggctggctgcctgccaggagcacaagcgggctcctgaggtctacgtggcctttaccgtccgcaacccagagacgtgccagctgttcaccaccgagctaggctgggccgggatcagatgggaagcagaagctcatcatgaccagaaactgtttccctacggagagcacttggagatggcaatgctgaacctcacactgtaggactcacacacgactctaacgggattgtaagaatcaagtcactctcatgggaagaatttttatatgggaaagcggctaaaactttcattggactggaatgtttggagattgttaaattccaaatcaggaaccacaaactgccctctaataagatatcagctgtctaagcgtgtgggtgcc

SEQ ID NO: 4157 - DNA, 3405 bp, Homo sapiens
gtgcaatttgtagaggctgcagcacacgagagtgaacagcagaaagaggcttcttggaaacataaccaggaattgcgaaaagccttgcagcagctacaagaagtattgcagaataagagccaacagcttcgtgcctgggaggctgaaaaatacaatgagattcgaacccaggaacaaaacatccagcacctaaaccatagtctgagtcacaaggagcagttgcttcaggaatttcgggagctcctacagtatcgagataactcagacaaaacccttgaagcaaatgaaatgttgcttgagaaacttcgccagcgaatacgtgataaagctgttgctctggagcgggctatagatgaaaaattctctgctctagaagagaaagaaaaagaactgcgccagcttcgtcttgctgtgagagagcgagatcatgacctagagagactgcgcgatgtcctctcctccaatgaagctactatgcaaactatggagagtctcctgagggccaaaggcctggaagtggaacagttatctactacctgtcaaaacctccagtggctgaaagaagaaatggaaaccaaatttagccgttggcagaaggaacaagagagtatcattcagcagttacagacgtctcttcatgataggaacaaagaagtggaggatcttagtgcaacattgctctgcaaacttggaccagggcagagtgagatagcagaggagctgtgccagcgtctacagtgaaaggaaaggatgctgcaggaccttctaagtgatcgaaataaacaagtgctggaacatgaaatggagattcaaggcctgcttcagtctgtgagcaccagggagcaggaaagccaagctgctgcagagaagttggtgcaagccttaatggaaagaaattcagaattacaggccctgcaccaatatttaggagggagagactccctgatgtcccaagcacccatctctaaccaacaagctgaagttacccccactggccgtcttggaaaacagactgatcaaggttcaatgcagataccttccagagatgatagcacttcattgactgccaaagaggatgtcagcatacccagatccacattaggagacttggacacagttgcagggctggaaaaagaactgagtaatgccaaagaggaacttgaactcatggctaaaaaagaaagagaaagtcagctttacccctcaaacatgggagaaaaagtttcagcattttaattcaaattggtaaaaggctgagcaacccttaaagctgccataatggaagaagactgtgagctagcttaaaaaagagagaatgaaggggaagaaacaaaacccctgtgtggcagagtgtcgagatgagatgagcatttatttgtctccgtcgaattccttacggagataaggtgcagctgcaggggatgacaccgaagatacaagcactgagttcactgacagtattgaggaggaggctgcacaccatagtcaccagcaagtaagtcagtgtcagggtctgggacttccagggtggacagcacacagcccttctgaggtctgatagtctcctgcagcccttgcggacttagtgagaagatatctttttacataaactacttctcagtcatctacctgttctccttgaacttcccagctgcctttccaacccatatcttcactccatttttctctccaatccaccctttggtttgtattgtatctctttcttctgcttccttccccctcctacccacctttgcccctatttattctctgtagctatagcttcagaagcatttttacttgcaagacgatggacacattccccttgggctttttgtaactgaaatgcaccacagaagacagggagtcatcgaagggctgctcggggaggtggcagggcggaggaactgcttgggaagaaactccaagaagattggaatgcttccaaagcaagaatctttctcagtgaaatctcattatacaaagagaaccttatgcaacctgacaaaccactgaggtcatggtgactcagtgatcagcagatggtacttcaacagcaatcccctgtcaaacctcagaacttgaggctgaaacattgcttccacccaccatcagtgaagatgtaactagcatgttacaagagtgaataatctggacttcagagattaagtcaccaatagtgatctcacaagtactcaccggaactcctataatgtctccactttgtccatgccatttagcaatctcatctcctaaatggactgtgcctatgattcttaaggagaaagtgaatcattggtagatatcctgcacaagcagctggactttccagtaatagctttcttggggctattaggaaaattaaacaagaaatgaggctttctgggtctgcctgtatgtcttctgcataagaaaaagaagagacatcgaatcaaccaataagaagagcccaaataagcatcctcaaatcttttgggatttggcacttggggacatgagtagttgtctgggatacgtcatattctcaacagtttctttgtagtagtaggatcaccttcttataataggatcaccttcttgttgctatagctgtacccgaccttcccttctcccttgagtgcttgcatgagctccacttttccttttgcttgaacagcttctcctgagtcctccttaccgatggttgtgactttaattatatacatctctgtccctccagacagatccctctgtcctcactctctgatttcattgaggatcttgggtgagagagagggacctgcaggatgaacaaatgtctactctaagacagctagattgggaggttggctggtcactgatggttataatgactgtgggacaggattaacttcagaataaatgaacaggagacacagatatgaagaaagtttctgattgatatggtctgaagtactcctggtattgcaagtcatttgctctaattctcaattgtaggcaaactgatttgtaaatttgcttcttcagccttctttcctgtagcctagcatggagaatctgaccagaccccattttgagaaggtcagcctacactggaatgaactttttacattagggcatttgtatttccctcacaatacttgccacattacttggcataggagagatgcttagtgtaattatgagttaacaagcctttggatcagggcttgactcatgatagacaaagtatatgcctgctggatggaagaatctcttgggcgagcaccatttttctttccatcacctttccttgaaaatatatcttcagctttgggtaggaggaatcttggtgtatgaaatcattgcaaatttacttcatcttttctggagtttgaagttgtgactctcctgctaccaattaaataaagcttactttgccataac

SEQ ID NO: 4158 - DNA, 1596 bp, Homo sapiens
gaagccatcttcgacaagagcacagggaaggttgttttgaagacgttcagcctctacaagaagctgctgactcttttcagagctggccacgaccaggtggtggtcctgctccatgatgtccgtgatgtgagcgtggaggaggagaaggtccggtacttcgggaaaggctacatggtggtgctccggcttgcgacgggcttctcccaccccctcacgcagagtgcagtcatgggccaccgcagtgatgtggaagcatcgccaagctcatcaccagcttcctggagctgcactgccttgagagccccacagagctgtctcagagcagcgacagtgaggccggtgaccctgcaagccagagctgacagccccactgtgcctgagcccgtgcaccgcccacaggacccatggcacattcccggtgtgcctgagcccgtgcaccgcccacaggacccgtggcacattcccggtgtgcctgagcccgtgcaccgcccacaggacccgtggcacattcccggtgtgcctgagcccgtgcaccgcccacaggacccgtggcacattcccggtgtgcctgagcccgtgcaccgcccacaggacccgtggccttggcttcagttggtgcctccagccgagttggcctattgcctgctcatgctgctgcttgcacactgcatgaaacagcaggccagaccaggacatccagactttctccatcgtgaggcctgggcctgcctttctgcagccggaggtctcgccagccctggactcctgctttgggccacagcaagacctcgggcgagtggagaggcggggccaggccgggcccttgtgggtgctgatgctgcatgttgtccccgacacagcgtcctctccctggtggacatccccagcggtcaggtgcttccccaagggcagtgaggggtgaacatccagggcctacctggctgtgcacgctgcagccacactgtggaagctgcccctccccgaggacccgcctcccttgctgatgccaggatctcagcgcatagaccactctgccccagcggtcgtcacagaaaggtctctctgttcctcacactcagcttcagcataagctgtgaggccagaaaaaaggtcagctcttctagtatcgtgcagtgcttaaaaaccgggagctccagccgggcgcagtggttcatgccagtaatcccagcactttcggaggccgaggtgggaggattgcttgaggccaggagttcaagaccagcctgggcaacacagcaagatcctgtctttgtaaaaaaactaaccaaacaggtgcggtgtgcaccgagcgcgcctggcctgatgccctggcctgtgagctggggactcctgggccctgtgagcccctaggcgcaggcccaggaatggctgggtaggacagggaacacctttgccccacgtctggctgtgacctcggtgaaagccgacaggagagagatggaccctcctcctcagtagtggctgccagtccctcgttgcaggacagggtcatcataaccataaataacccttcacgtgtcacctgcagcttccactctttatttccaaagaatcagtgtcacacatgcagatcac

SEQ ID NO: 4159 - DNA, 5156 bp, Homo sapiens
acaggtgatgtcattgtctatattaatgaagtttgtgtccttggacacactcatgcagatgttgtcaaacttttccagtctgttcctattggtcagagtgtcaacctggtgttgtgtcgtggctaccctttgccctttgatcctgaagaccctgctaacagcatggtgccaccccttgcaataatggagaggccacctccagtgatggtcaatggaagacacaactatgaaacatatttggagtacatttctcggacctcacagtcagttccagatataacagatcggccgcctcattctctgcactccatgccaactgatggtcagctagacggcacgtatccaccgcccgtccatgatgacaatgtgtctatggcttcatctggggccacccaagctgaacttatgaccttaaccattgtgaaaggtgcccagggcttcggcttcactattgccgacagtcctacaggacagcgggtgaaacaaatacttgacattcagggatgccctggcctgtgtgaaggcgacctcattgttgagatcaaccagcagaatgtacagaacctgagccatacagaagtagtggatatacttaaggactgtcccattggaagtgaaacttctttgattatccatcgaggaggtttcttttctccatggaaaactccaaagcctataatggaccgatgggagaatcaaggcagtcctcaaacgagtttatctgctccggccataccgcagaacctgcccttcccacctgcccttcacaggagctcctttcctgactcaacagaggcctttgacccacggaagcctgatccatatgagctctacgagaaatctagggccatttatgaaagtaggcgtccagattataaggaattggatgttcatcttcggaggatggagtctggatttggcttcagaatcctcgggggagatgagcctggacagcctattttgattggagctgtcattgccatgggctcagccgacagagatggccgccttcacccaggagatgagcttgtgtatgttgatgggattccagtagccggcaaaacccaccgctatgtcatcgacctcatgcaccacgcagcccgcaatgggcaggtcaacctcactgtgagaagaaaggtgctatgtggaggggagccctgcccagagaacgggagaagtccaggctctgtatccacccaccacagctctccacgcagtgactacgcaacctacaccaacagcaaccacgctgcccccagtagcaatgcctctccccctgaaggcttcgcctcccacagcctgcagaccagtgatgtggtcattcaccgcaaagagaatgagggcttcggctttgtcatcatcagctccctgaacaggcctgagtctggatccactataactgtgccccataaaatcggacgcatcattgatgggagtcctgcagatcgctgtgcaaaactaaaagtgggagaccggatcctagcagtgaatggccagtctatcatcaacatgcctcacgctgacatcgtgaagctcatcaaggatgcaggtcttagtgtcacccttcgcatcattcctcaggaggagctcaacagccccacctcggcacccagctcagagaagcagagtcccatggcgcagcagagtcccctggcacagcagagtcccctggcccagccaagcccagccacccccaacagccccatcgcccagccagcaccacctcaaccacttcagctgcaaggacacgaaaatagttacaggtcggaagtgaaagcaaggcaagatgtgaaaccagacatccgacagcctccattcacagactacaggcagcccccgctggattacaggcaacccccaggaggggactaccagcagcccccacccttggactacaggcagcctcccctactggactacaggcagcactcccccgacaccaggcagtaccctctgtcggactacagacaaccccaggattttgattatttcactgtggacatggagaaaggagccaaaggatttggattcagcattcgtggaggaagggaatacaaaatggatttgtatgtgttgagactggcagaagatggaccagcaataaggaatgggaggatgagggtaggagatcaaatcattgaaatcaatggggaaagcacaagggacatgacacatgccagagcaatagaactcatcaaatctggaggaagacgagtgaggctgctgctcaagagaggcacgggacaggtcccagaatatgacgaacccgccccctggagttctcccgctgccgccgccccaggtctgccggaagtaggcgtctccctggacgacggcctcgctccattctctccatcacatccagccccaccctccgacccttcccaccagataagcccaggcccaacttgggatatcaaacgggaacacgacgttaggaaaccaaaggagctttcagcctgcggccagaagaagcagcgcctcggggagcagagggagcgctcggcgagtccgcagagggccgcgcggccgaggctcgaggaggcgcccggcggccaggggcggcccgaggccggcaggcccgcctcggaggccagggcgcccgggctcgcggcggcagacgcggcggacgcggcgcgggcgggcgggaaggaggcgccccgtgcggcggcgggctccgagctctgccggcgcgaaggcccgggggctgcgccggcgtttgccggcccgggcggcggcggcagcggcgcgctggaggccgagggcagggcgggtgcgcgcgcgggtccccggccgggcccgcgacccccggggggcgccccggcgcgcaaggccgccgtcgcgccggggccctggaaggtgccgggttctgacaagctgcccagcgtcctcaaacccggcgcctcggccgccagcagatgagccgcgcggccacggccaacccgcccgccccggcgcaggcagttcttcttaggttccgtctcacggcgttttaatttattttcactgtcacacgcatagatccacgaggcaccaaggcctgggagcatcgacgtgaagtcccacgtgtccggtgtgcttgggcggcatcgcatcaacgcgcagacctaaactgatcctaaagcccccggttcccttgtgggggctttggcagctatggaagaaccaaaataacgtgaagaacatcacagagagacagtgcagtgtagctttagtttaagaaaaaaaaatattcctccccactgcatgaaggacttggatgtcatccaaactttatatcaagaaacaggacaaagttaagagcaatcacaaactggaatatcgccttaaaaatcaaactgcacggagcaagctgaaactgagacaagattatatcttttaattgatctaaagcgttgtaaataaattgttctcgacatatctagacaggggttaaagggtttctttgacacattcggaaccgttcacccatgacatgtttccatggctcacccttggcatccatcctcggtgttagcagcagcgttccctgcctcctgcaggatgacttagaaatctagtgagtttcttggtgtgatgccatttttattgccctttctgtgatcaaatcatatttctgtacattttcagtggtagaaaaaaaaggttttaaaaattgtatcctagggaacagtttgccataagtcagaattttgcagtttagctcatagatcttaattggtttttctctaaaatatgaattttataattgaaggaccacaatttgtttaatcaagataggcaacgctgcagttcctttatgaagaggcttttctgtcgtcccaggctagcagagatggatagcttctttgtcagcaatgtgatttcacttattttattgtcttattttaaaccctgtctccatgacttcatttgcactttgacagagcagaggcagagtatttgtcttatatttctcagattataatattaaaaaattacaatcaatttattttcattaaagaacgtgagtctttttagcattcctttctgcttatccttctttccttaccctttgtccttttgtttccattagttttctttcgtcttgtattccttgccactttattttgttagcaacttctagatgtttatcttcatggatctatgattgacctcctagtaaaattctaagtcttgcctttcttccctgctgttttagcatttctttgtaaaatgttagcttcaattaattagccattggtacttactgtagctacacatattaaaaggcaaagtgtttctgaaggcaatttctttttaatatgcccgaatgaatgaggcttcatcctttccatattcttactctttacaggagttcaaatgcaaataagctccacctccctgcacttgtagtctaaaaagtaaaaggggcgatcaggtccatctcaaaggtcacacgtaatagcctccctgggctgatcattccctctccttgtaattgcagtatcctgagtagcagtttaattttcatcaaacatcggagtagtttagttgtttgacaggaggagaataaggctgaaagcctcaagtgaaggatcttgcagcttgtaaaagcaatttccaaaaatgaaacccattcatcgtaaacaaaagcacaaacacttgtagcagtttataatgcttttggtttaatctcaattagtctttctcccctggactagaaatccagtatagtttgccattaatttattgaatctggttttggacaatgcttctgtagtgtagctgcacgtcctggtactgtatcctctgactttattttccatgtattacaaaaggaaaaaaaaattgagattacactggcataaactctagtttgcacagttcacagctactacttgtgcagtaattgctttatgcggctgtaatccataacctgtgaagacagcacatcatctaaatcccattccaaataatatttgtgtagtgttagctgtgaatttaccctgtacagctgtatctctataaatataattccatgtattaatagtcacagaaagactgtaagtgagcaactatttttatgaaacgtaccactatggataaattaacttttacagaaatcttgtttactgtatgatattctaaaacactgtcaaataaaatatatatcc

SEQ ID NO: 4160 - DNA, 2610 bp, Homo sapiens
atgggtcgctccaattctagatcacattcttcaaggtcaaagtctagatcacagtctagttctcgatcaagatcaagatctcattctagaaagaagcgatacaggtctcgttccagaacatattcaaggtctcgtagtagagatcgtatgtattctagagattatcgtcgcgattacagaaataatagaggaatgagacgaccttatgggtacagaggaaggggtagagggtattatcaaggaggaggaggtagatatcatcgaggtggttatagacctgtctggaatagaaggcactctaggagtcctagacgaggtcgttcacgttccaggagtccaaaaagaagatccgtttcttctcaaagatccagaagcagatctcgccggtcatatagatcttctaggtctccaagatcatcctcttctcgttcttcatccccatatagcaaatctcctgtttctaaaagacgagggtctcaggaaaaacaaaccaaaaaagctgaaggggaaccccaagaagagagtccgttgaaaagtaaatcacaggaggaaccgaaagatacatttgaacatgacccatctgagtctatcgatgaatttaataagtcatcagccacatccggtgatatttggcctggcctttcagcttatgataatagtcctagatcaccccatagtccttcacctattgctacaccacctagtcagagttcatcttgctctgatgctcccatgctcagtacagttcactctgcaaaaaatactccttctcagcattcacattccattcagcatagtcctgaaaggtctgggtctggttctgttggaaatggatctagtcgatacagtccttctcagaatagtccaattcatcacatcccttcacgaagaagtcctgcaaagacaatcgcaccacagaatgctccaagagatgagtctaggggccgttcctcgttttatcctgatggtggagatcaggaaactgcaaagactgggaagttcttaaaaaggttcacagatgaagagtctagagtattcctgcttgataggggtaataccagggataaagaggcttcaaaagagaaaggatcagagaaagggagggcagagggagaatgggaagatcaggaagctctagattacttcagtgataaagagtctggaaaacaaaagtttaatgattcagaaggggatgacacagaggagacagaggattatagacagttcaggaagtcagtcctcgcagatcagggtaaaagttttgctactgcatctcaccggaatactgaggaggaaggactcaagtacaagtccaaagtttcactgaaaggcaatagagaaagtgatggatttagagaagaaaaaaattataaacttaaagagactggatatgtagtggaaaggcctagcactacaaaagataagcacaaagaagaagacaaaaattctgaaagaataacagtaaagaaagaaactcagtcacctgagcaggtaaagtctgaaaagctcaaagacctctttgattacagtccccctctacacaagaatctggatgcacgagaaaagtctaccttcagagaggaaagcccacttaggatcaaaatgatagcgagtgattctcaccgtcctgaagtcaaactcaaaatggcacctgttcctcttgatgattctaacagacctgcttccttgactaaagacaggctgcttgctagtacacttgtccattctgtcaagaaggagcaagaattccgatccatctttgaccacattaagttgccacaggccagcaaaagcacttcagagtcatttattcaacacattgtgtccttggttcatcatgttaaagagcaatacttcaagtcagctgcaatgaccctaaacgagcggttcacttcgtatcagaaagccactgaagaacatagtactcggcaaaagagccctgaaatacacaggagaattgacatctcaccaagtaccctgaggaagcatacccgtttagcaggggaagagagagtttttaaagaagaaaatcaaaagggagataaaaaattaaggtgtgactctgctgaccttcggcatgacattgatcgccgtagaaaagaaagaagtaaagaacggggagattccaagggctccagggaatccagtggatcaagaaagcaggaaaaaactccaaaagattacaaggaatacaaatcttacaaagatgacagtaaacataaaagagagcaagatcattctcgatcttcatcctcttcagcatcaccttcttctcccagttctcgagaagaaaaggagagtaagaaggaaagagaagaagaatttaaaactcaccatgaaatgaaagaatactcaggctttgcaggagttagccgaccacgaggaacctttcatgacgacagagatgatggtgtggattattgggccaaaagaggaagaggtcgtggtacttttcaacgtggcagagggcgctttaacttcaaaaaatcaggtagcagtcctaaatggactcatgacaaataccaaggggatgggattgttgaagatgaagaagagaccatggaaaataatgaagaaaagaaggacagacgcaaggaagaaaaggtataa

SEQ ID NO: 4161 - DNA, 2951 bp, Homo sapiens
gtgccacatcctggctctgtgcgctgggctcccgccgctgctgcgcgcctggcgcgtgccccccgcgccgcccgtctcgggccccggacccagtccgcatccgtcgtccggcccgctgctgccgccgcgcttctacccgcgctacgtgctaccgctcgccttcggcaagtacttcgcgtccgtgtcagcgcacgtcagcatctggaaggtgcccgtgtcctatgcacacaccgtcaaggccaccatgcccatctgggtggtcctcctgtcccggatcattatgaaggagaagcagagcaccaaggtatacttgtcactcatccccatcatcagcggtgtcctgctggccaccgtcaccgagttgtcttttgacatgtggggactcgtcagcgccctcgccgccacgctgtgcttctcgcttcagaacattttctccaaaaaggtcttgcgagattcacggatccaccatctccggctgctcaacatcctgggctgccacgccgtcttctttatgatccccacctgggttctggtggacctctcggctttcctggtcagcagcgacttgacctacgtctaccagtggccctggacgctcctgctcctggctgtcagcggcttctgtaactttgcccagaatgttatcgccttcagcatcctcaacctcgttagccccctgagctactcggtcgccaatgccaccaaaagaatcatggtcatcacggtgtccctgatcatgctgcgcaacccagtcaccagcaccaacgtcctgggcatgatgaccgccatcctgggggtcttcctctataacaagaccaagtacgatgcaaaccagcaagccaggaagcacctcctccccgtcaccacagcagacctgagcagcaaggagcgtcaccggagcccactggagaagccccacaacggcctcctcttcccccagcacggggactatcagtacggccgcaacaacatcttaacagaccacttccaatacagccggcagagctacccaaactcgtacagtttgaaccgctatgatgtgtagagtccaaaggacaggaccagactgttggtgactccttccccggcccccacagcagtatcagaaacttctgacaatcagtgaatgtacaacccagccgaggggacggtgcataactctccatcagaagccctggggttcctggccccccgtgagccgcaggaggatgcgttgcctgcagtgcagacggccgtgagctctgggcaaacctaaacagagaccagtgtctcatgctctttcttcctggagtctgtcatctgagggccgtgtccctgcggagatcttggccacgttgtacctttccatgtggaattattccccaagcagtgtagctcagagcacttgtgtctgcattccagataacattcaggacctgtgtgaaaagctggggtcactgtggctgtagaccatgaactggcagtgggggtgtccagggcggtgcttgagaacgtcagactggctagtttaattccctggcgcagatacgcataggaccaacagggtcaccaagcagacagggagcccgcgagaatcattcaaaacatccccagccacagagatggatccagtttcctggtcatccccttagcagttcacaagttcctggcaaatgttccaaagcaaaaagcgattgcaattagcatccagttcctgcagcctggtgctctgccctgcacgtcagggttggcatccacccagatccagatggaagggaaacttctctcttctcctttgcctcctcttccctcaccagagcagggcgcttctcttggggtggtgagaaggatcttcgagaaatcgtgttcagtatttcaagctctatttctgtggcacatgtcttttgagaggcatcttcacctcttctgtgatgacttggtatgttgtttggtagagagatcttgattttcggaggatcttgcatttttctagggaatattttgtagttgtgtgtgtgtgtttttgccttggtccccattatgggatgcattaggactggcctatgcatcgaaaatctttttgtttgtaaacgtttaaaaacaaagttccccggccaggcacagtggctcacacctgtaatcccagcactttgggaggccaagatgggcggatcacgaggtcaggagttcgagaccagcctggccaacatagtgaaaccccatctctactaaaaatacagaaattagccgggcatggtgtcgcgtgcctgtagtcccagctcctcaggctgctgaggcaggcgaattgcttgaacctgggaggcagaagttgtggtgagccgagattgtgcactccagcctgggtaacagagcgagactccatctcaaaaaaaaaaacaaaacaaaaccaagttcccactggtgatgcctgtctgacacgttttggtatttagtaggaaatgaagtgtttcgaagcttcgagagaagcttcaaaattgtcacaattgctgaaaacagaatgaatcgtgaacattatctcaatattttgtataatagacaagaccacagtgttttggttccctgacctgtttttgtgtttatgttaggatctgaatcatgttctgggtaaggggacgaggagcgaacactgcactaagatttggtttgccaaatcagattctttggtcaagagtcagtttggggccaggcgtggtggctcatgcctgtaatctcagcactttgggaggctgaggtgggtggatcactggagtttgagaccaccctggccaacatggtgaaaccccatctctactaaaacaaaaattagccaggcatggtggcacctgcctgtaatcccagctacttgggaggctgaggcaggagaatcacttgagcccaggaggtggaggtttcagcgagctgagatcacaccactgcactccagccttggtgacagagtgagactctgtctc

SEQ ID NO: 4162 - DNA, 3100 bp, Homo sapiens
ggactggggcggccacgccactccgccagaaggtcgccaggagcctccgcccttcaccttcctccgaaatccgccaggccacgccaagctccctgcccaacccttactgacgggggccacattttcccggcctccgcagccagaccttgacacaaaggacatcaaactgccgagggtaaaaaccccggaagggcggacacctccacatcgccttttgccacctttccctttatttccggagatatttattgagtgtctactgtgtgccaggcactatatctatgtgcatagaaaaaccctggaaggccatacaacaatatatatagagtgatcgtctctgcttgctgagctaacaggggtgtcaagcttccattttggtatctacttctaaatacactcagaacaggagaaatttggactaattttcaaactacagacactttctaatcatgatgcatttcaaaagtggactcgaattaactgagttgcaaaacatgacagtgcccgaggatgataacattagcaatgactccaatgatttcaccgaagtagaaaatggtcagataaatagcaagtttatttctgatcgtgaaagtagaagaagtctcacaaacagccatttggaaaaaaagaagtgtgatgagtatattccaggtacaacctccttaggcatgtctgtttttaacctaagcaacgccattatgggcagtgggattttgggactcgcctttgccctggcaaacactggaatcctactttttctggtacttttgacttcagtgacattgctgtctatatattcaataaacctcctattgatctgttcaaaagaaacaggctgcatggtgtatgaaaagctgggggaacaagtctttggcaccacagggaagttcgtaatctttggagccacctctctacagaacactggagcaatgctgagctacctcttcatcgtaaaaaatgaactaccctctgccataaagtttctaatgggaaaggaagagacattttcagcctggtacgtggatggccgcgttctggtggtgatagttacctttggcataattctccctctgtgtctcttgaagaacttagggtatcttggctatactagtggattttccttgagctgtatggtttttttcctaattgtggttatttacaagaaatttcaaattccctgcattgttccagagctaaattcaacaataagtgctaattcaacaaatgctgacacgtgtacgccaaaatatgttaccttcaattcaaagaccgtgtatgctttacccaccattgcatttgcatttgtttgccacccgtcagtcctgccaatttacagtgagcttaaagaccgatcacagaaaaaaatgcagatggtttcaaacatctcctttttcgccatgtttgttatgtacttcttgactgccatttttggctacttgacattctatgacaacgtgcagtccgacctccttcacaaatatcagagtaaagatgacattctcatcctgacagtgcggctggctgtcattgttgctgtgatcctcacagtgccggtgttatttttcacggttcgttcatctttatttgaactggctaagaaaacaaagtttaatttatgtcgtcataccgtggttacctgcatactcttggttgttatcaacttgttggtgatcttcataccctccatgaaggatatttttggagtcgtaggagttacatctgctaacatgcttattttcattcttccttcatctctttatttaaaaatcacagaccaggatggagataaaggaactcaaagaatttgggctgcccttttcttgggcctgggggtgttgttctccttggtcagcattcccttggtcatctatgactgggcctgctcatcgagtagtgacgaaggccactgaaacccgccgagaaaaagaaacatccctgttgtctgctcagtcaagtccccacacatcagcaatctctcaccacttcttttgcaagtttacagaagcaaacagaaatgtacaggatacttaaaatggaataactttttggttgcaaaacagagacatggttctataatgcttcatgtccctccaagatttgagatcaatttagggattgtgaaatttttttttcaaatttcatacaatcatatttcccagtacttttcacaatcattttttacccatctaactctatgttttgtggcttcccggtctcttagaactttgaaaacatgatatacaataatgtttatttattatacatccagattctgaaataattttcctactgatgttcagctcacactatctgtacctttttagaagagaaaagaatcttgaattgtatatatttattttgctttacagaaaaaaatggtttcgtaaataatttgcctattttggttaacatagcacatggagataatcatctgaaagttatagggcactgccactgctgaatcagagcatgcccaatatttgaggtggctctgatttcctggcagctgaactcgggtagtccagtggcctagctggtaccacatctattcccatccagagacattctctggcaagtgttctcagctgaaaagtggttggggatgattcttaccttggtaattaaatgaagctacacatttgggtaatctagcaaatgaagtattttttccctcttggcaacttgtgtcagagttactctggtctgagtcaactttcgctggggaaaacctatggaacctactgcaaaaagattgtccaaaatgcctaagaaaatactcctctgatgcatttagccttcaaccctacctgtcttgctgaagggagaaaaatgttttagtacattataggcccagcagcttttattcatgtccaccagctagttgcacagagaatcatgtgtacctaactaaggatgatctaggataagtaactcctgttttatattgagtattttagggaagtctttaaaagacttgttttatatctataaatctaggttattacaaatacaagaattttgtaccttaaataagcctcatttctatttcttcttcattaattctccatctagtcttgtgaaaaaaaaaaaaaaaaaa

SEQ ID NO: 4163 - DNA, 597 bp, Homo sapiens
atggcggtggacaaaagcaaccctacctcaaagcacaaaagtggtgctgtggccagcctgctgagcaaggcagagcgggccacggagctggcagccgagggacagctgacgctgcagcagtttgcgcagtccacagagatgctgaagcgcgtggtgcaggagcatctcccgctgatgagcgaggcgggtgctggcctgcctgacatggaggctgtggcaggtgccgaagccctcaatggccagtccgacttcccctacctgggcgctttccccatcaacccaggcctcttcattatgaccccggcaggtgtgttcctggccgagagcgcgctgcacatggcgggcctggctgagtaccccatgcagggagagctggcctctgccatcagctccggcaagaagaagcggaaacgctgcggcatgtgcgcgccctgccggcggcgcatcaactgcgagcagtgcagcagttgtaggaatcgaaagactggccatcagatttgcaaattcagaaaatgtgaggaactcaaaaagaagccttccgctgctctggagaaggtgatgcttccgacgggagccgccttccggtggtttcagtga

SEQ ID NO: 4164 - DNA, 1919 bp, Homo sapiens
gtcagccccgtctccgtctgaagagtgcttctgccctcatttgcctctccctgtgaccccggccccctcagactccgctgcgtcgtctctcggccccgtccagccgttcctgactgctcttcgccggagtccgcttcccaaccccctttcgccagagcccgagagctccgtcggctctgcgtcctggcggtggggactccccgcggagcgcttgcgcgtgccaggccacccgggactacgtttcccagcgggccgagcggccggcgccgcggctgcggtcaggattgtcagtggcttcgccccgaggagagctgactgccctgggctgctgcctccggcagagctgagccaaaatgtccccggaatctaaaaagcttttcaacatcattattttaggagttgcctttatgtttatgttcactgcctttcaaacttgtggaaatgtggcgcaaactgtcatcaggagcttaaataggacagattttcacggcagtggatataccagcatggctattatctatggagtgttctctgcttcaaatttgattacaccgtcagtggttgccattgtaggacctcaactctctatgtttgccagtggtttattttacagcatgtacattgccgttttcatccagcctttcccgtggtccttctacacagcctctgttttcattggaattgctgctgctgagagtgaccgaagaacagtgtttattgccctaacggtgattagccttgtggggacagttctattctttctcattcggaaaccagattctgaaaatgtcctaggagaagatgagtcttctgatgaccaggacatggaagtcaacgagtctgcccagaacaatctgacaaaggcagtagatgcttttaaaaagtcttttaagttatgtgtcaccaaggagatgctccttcttagtattacaactgcttatacaggtctggaattaactttcttctctggtgtatatggaacctgtattggtgctacaaataaatttggagcagaagagaaaagccttattggactttctggcattttcatcggcattggagaaattttaggtggaagcctcttcggcctgctgagcaagaacaatcgttttggtagaaatccagttgtgctgttgggcatcctggtgcacttcatagctttttatctaatatttctcaacatgcctggagatgccccgattgctcctgttaaaggaactgacagcagtgcttacatcaaatccagcaaagaagttgccattctctgcagttttctgttgggccttggagacagctgctttaatacccagctgcttagtatcttgggctttctgtattctgaagacagcgccccagcatttgccatcttcaagtttgttcagtctatttgcgcagccgtggcatttttctacagcaactaccttctccttcactggcaactcctggtcatggtgatatttgggttttttggaacaatttctttcttcactgtggaatgggaagctgccgcctttgtagcccgcggctctgactaccgaagtatctgatctggtgtccgtgaggggacacgtatgacctcagaaacacagctggacacagagcttggtggaagaagtcgcctttgatcttcactatatattgggtgatgttcagtatggaaaatcaagggattaagactgttaaatcagccagagttggtgttcaagtttacagatatgagttatttaaagcaagtagaataagggaaagctgttctgtcaactgtaattgttcaaagatgttgtttttcatttcatctatctcaattcttataatcatgttatagaatgtaaatgttttcttctctctcctgctcttgttggaagatcctgccttgatttagaatactaggccatatgtcatataaatattttttctgg

SEQ ID NO: 4165 - DNA, 2288 bp, Homo sapiens
tcggagaggaacaagctagctatgttgactggtgttcttctggctaatggaacacttaatgcatccattcttaatagcctttataatgaaaatttggttaaagaaggagtttcagcagcttttgctgtgaagctctttaaatcatggataaatgaaaaagatatcaatgcagtagctgcaagtcttcggaaagtcagcatggataacagactgatggaactctttcctgccaataagcaaagtgttgaacacttcacaaaatattttactgaggcaggcttgaaagagctttcagaatatgttcggaatcagcaaaccatcggagctcgtaaggagctccagaaagaacttcaagaacagatgtcccgtggtgatccatttaaggatataattttatatgtcaaggaggagatgaaaaaaaacaacattcatttcatgaaagccttccagaaaatagtggtgcttttttataaagctgaagtcctgagcgaggagcccattttgaagtggtataaagatgcacatgttgcaaaggggaagagtgttttccttgagcaaatgaaaaagtttgtagaatggctcaaaaatgctgaagaagaatctgaatctgaagctgaagaaggtgactgaattttgaaactacaccctcagtaaagcaaacaggagttgtagataaaatgtcatgtctcatgtgtcctggttcttacatcttcctacctccctgtatcaagcatgatataagggctttcatggcaaattttattttaactgtttctatggttgctggaaatgttgggtttagtttctaaaaccatgttttaagtagctacaggagctatagatttgaatctaatgttgcattagtcttttcagttatcttctacctcctgtattttctactgtaataatgtaatttaaggccttccacaatgaacagttcactttattccctgggttttctataaacagttttaaggatatgatttggttaaaaaataatttgttataaaaattctgtttgcaaattaaactggaaaagtatccagagtctcaaaaggcaatgatttgtgagataatatggcatgcccggagccctgctcatcaatgaaaaacccatatgtaataatcgaattcatttaacatgaatcttgagtacgtggaccattgcttgcatgttaactttttgttttgttttgttttgttttgttttgcatttttaactccagatatcctaaagctcaattgtttggtctctggttttcatccttagagaagccatggagaacagacttgaaaagtttaggaaatcataatgtggcagaggtggtgggaagaagaaagttgagctttttccccttgagaaacttctgcatttagtttgtatctttccaggcaaaacaaatgggtattcttttcatacaaccattttcaaatgaaccttagaaaagtcttaacatttaaggtattttatgcacagaatacacttagattgataggaaagaactcgtaatggagtttgagtaaagaaaatgactgatgtactaaacccagtaaaaattgttgaaaatgttaaaggtcagcatgttctaattgggaatctagatatagcttagatttcctattggcttagagtatttgctataacaaatgaagtgcaatgacaattatatattcctactcggtcatactggactggcttcgttctcttaacatactcagtaatgactcaagcctctggctattaacataccctagttgccattttttaattgccatgagccaaatacttcttggtatacaattgatccatttattttaatggctgccttttcattttcatcttttcttgctgctacccatctatgtatgtagtcattggggggaaaatgtagccacattttttatgggaagactttgtgttaaaagtgaacattttgaaggtttttaactggtgaaactagcctggaataatgccaccagagactgagtggaaatcgccccttttgaaggtgccattcttatgagccaaaagtttgtcatttaaaagttcattttgcgggaataacatgtaatataatttgaaataaaggtatagtaaccttaaaaagaacattataactgattgttgtgaatggggtgaatttgttaaaatgagtaactttgataaagtttttcatgcacaggcaaaatgtattcactagatttctacgtagtgatctgcttttactttgtaatttgtagttctcaaaagacttttttttaaaaaaataaagtccatacttacactt

SEQ ID NO: 4166 - DNA, 2427 bp, Homo sapiens
agtagggcctgatgtaaacacccgagccgggctccaaggcccgggaggtcagaaaaccgggccgcgggcggcaccgacagctggggcccgggtcagggacacgcggaggtcaggccggtgaaggcggcaggaagctggagcacgatcccaggaggaacaatcctgcaccatgactcaacagccacttcgaggagtgaccagcctgcgtttcaaccaagaccaaagctgcttttgctgcgccatggagacaggtgtgcgcatctacaacgtggagcccttgatggagaaggggcatctgggtgagctgttggcaggggaggggcaatgggcagaagagctgggctgggcattggctcccacctccactgacaccctggtccctgtccagaccacgagcaggtgggcagcatgggcttggtggagatgctgcaccgctccaaccttctggccttggtgggcggtggtagtagtcccaagttctcagagatctcaggtaagtgccctcatcctgccctttggcccagatttctcggattcctggcctcccacaggcaccccaaggtactggcagatgaagacgtcagagtacttcagagtcacacagagaggaggcctacagcttggaagtcatggatcttatagcttgagaagcttggtgctttgttttcattttaaaaattctgattgagtgcctcctgtgtgccatgccctagagcacttactgtgagcctggaactgccctaagcactttacgtttattaactcatttaatcctcacagtaactctatggggtaggaaggatcattatccccatctttaccgatgaggaaactgaggcccagtgcagttaagtgactcatccaaggtcacacaagcaataggttttaaaatcttggagccgtcttcccaatacccccttggcttgagcctcaagtgccatcttactttaagggtttttcttgatgatcccatctggacaaggcaggagttgccctaggtgagtcacagagccctaggattcctcacggaaatctccagggtgcatggactaggaccctggaggcagaaatagttaccgaggggaagttacaggcctgagtgtgagtccctgtttggttgctgatgagctttgaggtccttggccagacactcaaccactttgaacctcagtttcctcatctgtagatgagtgtaacagtctagaacactcctctcagggatcatatccacaagtgctcgtgctgtgcgaggatctcactggttgtttattgaaaggctaagcaagtaggttgaggtccctgggaagcaggggtggatcctgtgtcaccagggctgccccttaccctaaaccttggccccgacaacccacccacctgcccagcagtgctgatctgggacgatgcccgggagggcaaggactccaaggagaagctggtgctggagttcaccttcaccaagccagtgctttctgtgcgcatgcgccatgacaagatcgtgatcgtgctgaagaaccgcatctatgtgtactccttccccgacaatccccgaaagctgtttgagtttgatacccgggacaaccccaaggggctctgtgacctctgccccagcctggagaagcaactgctagtgttcccgggacacaagtgtgggagtctgcaacttgtggacctggcgagcacaaagcctggcacctcgtctgctccattcacgatcaatgcacatcagagtgacatagcctgtgtgtctctaaaccagccaggcactgtagtggcctcagcctcccagaagggtacccttattcgcctctttgacacacaatccaaggagaaactggtggagctgcgccgaggcactgaccctgccaccctctactgcattaacttcagccacgactcctccttcctctgcgcttccagtgataagggtactgtccatatctttgctctcaaggatacccgcctcaaccgccgctccgcgctggctcgcgtgggcaaggtggggcctatgattgggcagtacgtggactctcagtggagcctggcgagcttcactgtgcctgctgagtcagcttgcatctgcgccttcggtcgcaatacttccaagaactgcagagctgagccttggcagtggggcgtgcttggaagccaccagccagcaagcattaatggggctggtgcccactttccactcagcagagctatgtctaaataaagagctcacttccccccagcacttcttgatgactgtgtgccccaagggccaggccagagacccaggaaggcagcgaccccttgggatccctaacctggaggaaattgccagggacccagagggagtgccctaatccaacctggggattttttaaaagcttcctaggaagagatgatctccgatgtgatgaatacgaataaaaggcccttaatggc

SEQ ID NO: 4167 - DNA, 540 bp, Homo sapiens
tcttccacaggaggcctacacgccgccgcttgtgctgctgccatgtctctagtgatccctgaaaagttccagcatattttgcgagtactcaacaccaacatcgatgggcggtggaaaatagcctttgccatcactgccattaagggtgtgggccgaagatatgctcatgtggtattgaggaaagcagacattgacctcaccaagagggcgggagagctcattgaggatgaggtggaacgtgtggtcaccattatgcagaatccacgccagtacaagatccccgactggtttttgaacagacagaaggatgtaaaggatggaaaatataaccaggtcctggccaacggtctggacaacgagctccgtgaagacctggagcgactgaagaatattcgggcccatagagggctgagtcacttctggggccttcgtgtccgaggccagcacaccaagaccactggccgctgtggccgcaccgtaggtgtgtccaagaagaaataagtctgtaggccttgtttgttaataaatagtttatatacc

SEQ ID NO: 4168 - DNA, 1543 bp, Homo sapiens
ctcttacagtggtccctgctggcccttggtgacgggtcgcgtcagttccgacccggacccgtacgctgctgcgctgacgtggctcctggaagcagggctggcgtagggccgccatgttgcagcaggatagtaatgatgacactgaagatgtttcactgtttgatgcggaagaggagacgactaatagaccaagaaaagccaaaatcagacatccagtagcatcgtttttccacttattctttcgagtcagtgcaatcatcgtctgtcttctctgtgagttgctcagcagcagctttattacctgtatggttacaattatcttgttgttgtcgtgtgacttttgggcagtgaagaatgtcacaggtagactaatggttggcctacgttggtggaatcacattgatgaagatggaaagagccattgggtgtttgaatctagaaaggagtcctctcaagagaataaaactgtgtcagaggctgaatcaagaatcttttggttgggacttattgcctgttcagtactgtgggtgatatttgcctttagtgcactcttctccttcacagtaaagtggctgagacggtctcgccacattgcccagactggtctgaaagtcttgggctcaagagatcctcccgcttccgccttccaaagcgctgggataacaggcgtgagccgctgcccgggccatccctcgaggaagtttcatcaggtagacattaattctttcacgaggatcacggatcgagctctttactggaaacctgcgccccgccttagttctccacctcttcgtgcggctccaggcaactgccaacagatggcgcccgcccgcctatttctctccttgcggctttgggcctggaggggaggtggggagagtcccaatagcagaggaactggtgagcccgggccaaaatttcatctggcatccggaatgcattaaaaacaacccacaaatctgaagctcctcgcaggagagagagagagagagagagaggagagagaggagagaggagagagggagggaagagagtgacggagaaggagagaaagagacgggagagaggagagagaaagagagagagaggagagagagaaagaacgaacgaacagggaacttgtaaaactaaggggaaaagggcagaagagaggcagcagcgtggtccctgcaagcgtccgctttcctggccaagcagcccccagcacgcctgctttgtggggcagggccatgcggccccgaggaaggatgcggtgagccagagggttccagacaaaggaggggatccccaaggctctgggccagccagtccctgttttactggcaccacggtccctcctaggcgaggacgaagagggaaggggtggagacctccaccttctctgcgtgtggctgcgtccctttacagaatgacaggcccttacttccgagggcggggactaatgtgtaaggcttaacagatccaattccagaaattatctgtgtttttttcaatcaccctcttgtgcccccccaccccccattaaatttcatcttttatcttt

SEQ ID NO: 4169 - DNA, 1738 bp, Homo sapiens
aaagttccgggtgaggcgtgggtcccacaaccgcttggaatttgcctcccggctccgctctggaagctaagaaggggcacgagagccggagacgggaacctgagagcagggaagccagtagccggccggaggagcgcgcggccgctccagtcggaaggagccgttgcagccctgcccggcgtgtggcggggtcagcgaggcccctgcggtgcttcgcccgcgccttccgctccgcactcacccgccctctgggcctcccacaggaatcaaagatcaactcccactgaggacaaatggacctgtaattccgggtgtgacgagagaacgagatttaccttcctgaattaaaaaacaggtcattaagcttgggccctgactcttctttgtgagaaggtacagagatggaaaccttacaatccgagactaaaacgagggtccttccctcatggctgacagcccaggtggctacaaagaatgtggcaccaatgaaggcccccaagaggatgagaatggcagcagtgccagtggcagcagcaaggtgcgacagctctggtcagaagactcctgcgaatctgactccctgcgacaaggactgtgtactgcatgaatgaggctgagatagttgatgttgctctgggaatcctgattgagagccgcaaacaggaaaaggcctgcgagcagccggccctggcgggggctgataacccagagcactcccctccctgctccgtgtcgcctcacacaagttctgggagcagcagtgaggaagaggacagtgggaaacaggcactggctccaggcctcagcccttcccagaggccggggggttccagctctgcctgtagcaggagccctgaggaggaggaggaagaggatgtgctgaaatacgtccgggagatctttttcagctagggcataaactgtgcactgaactgtctgccgagagcagctggaggacagctgagcttccactggtgctgctgggccgcccgcctgtgggaatggggctctctgtgctcctacctttgtgccttcttgggcctggcagattcacctcaggccagaagcccctggacactccgggccttggggctgccgttctgagtgtgcggaaggcaggactcaaaatgagatcccatttgactccctctgtatgtactgtgccctctcctggctcttgaggctctggagtcccaattgtctgtgttagtcagtgaccaggttccagggaaaatgatgtcatgtggtggtccaacttactggaaccaaagagacagtactttgcaaagaaaaggatcactgccaggtgcactggaattgctacagtttagtccgcatgatctctcctgaaggaggaagcctgtttcaaaaatagtttccatcatgagtctatcaatgagctcccacctctccagccagcctagaaagcaaacgagctgcccacagttctctgccctgtctgggaggttgaggccacagtgtatagactggtaagccagacaggcctcctcccgcaagctgctaccttgctttcacctgtaccttggtccccgggcagctagctataaagcaagagggacaggagcccagaagagacactgaggacaagagatcacaccagagtacatgtctctgcctctgttttcagtgtggctttggacaggaatatatgaataaatcactgccatacaggttttccaatacacaagtgctagaaaatacacacaattccccaatg

SEQ ID NO: 4170 - DNA, 2655 bp, Homo sapiens
gaacatccagtcatggataaaaatgagctggttcagaaggccaaactggccgagcaggctgagcgatatgatgacatggcagcctgcatgaagtctgtaactgagcaaggagctgaattatccaatgaggagaggaatcttctctcagttgcttataaaaatgttttaggagcccgtaggtcatcttggagggtcgtctcaagtattgaacaaaagacggaaggtgctgagaaaaaacagcagatggctcgagaatacagagagaaagttgatacggagctaagagatatctgcaatgatgtactgtttcttttggaaaagttcttgatccccagtgcttcacaagcagagagcaaagtcttctctttgaaaatgaaaggagattactaccattacttggcagaggttgccactggtgatgacaagaaagggattgtggatcagtcacaacaagcataccaagaagcttttgaaatcagcaaaaaggaaatgcaaccaacacatcctatcagaccaggtctggcccttaacttctctgtgttctattatgagattctgaactccccagagaaagcctgctctcttgcaaagacagcttttgatgaagccattgctgaacttgatacattaattgaagagtcatacaaagacagcatgctaataatgcaattactgagagacaacttgacattgtggacatcagatacccaaggagacgaagctgaagcaggagaaggaggggaaaattaaccggccttccaacttttgtgtgcctcattctaaaatttacacagtagaccatttgtcatccatgctgtcccacaaagttttttatttacgatttatgacaggtttatgttacttctatttgaatttctatgtttcccatgtggttttcatgtttaatattaggggagtagagccagttaacatttagggagttacctgttttcatcttgaggtggccaatatggggatgtggaatttttatacaagttataaatgtttggcatagtacttttggtacattgtggcttcacaagggccagggtaaaactgcttccctgtccaagcaaagaaaactgcctacatattggtttgtcctggtggggaataaaagggatcattggttccagtcacaggtgtagtaattgtgggtactttaaggtttggagcacttacaaggctgtggtagaaacataccccatggataccacatattaaaccatgtatatctgtggaatactcaatctcaatgtgcacacctttgactacaactgcagaagtgttcctttagacaaagttgtgacccattttactctggataagggcagaaacggttcacattccattatttgtaaagttacctgctgttagctttcattatttttgctacactcattttatttgtatctaaatgttttaggcaacctaagaacaaatgtaaaagtaaagatgcaggaaaaatgaattgcttggtattcattacttcatctgtatcaagcacagcagtaaaacaaaaacccatgtatttaactttttttttttaggttttttgcttttgtgattttttttttgatacttgcctaacatgcatgtgctgtataacaatccaagcataattgttaagaacacatgtattaaattcatgtaagtggaataaaagttttatgaatggacttttcaactactttctctacagcttttcatgtaaattagtcttttggttctgaaacttctctaaaggaaattgtacattttttgaaatttattccttattccctcttggcagctaatgggcttttaccaagtttaaacacaaaatttatcataacaacaaaaatactactaatataactactgtttccatgtcccgtgatcccctctcttcctccccaccctgaaaaaaatgagttccaatttttttgggagaggggagattgattagaaaaaaatgtaatatgttccatttaaaattttggcgtatggcattttctaacttaggaagccacaatgttcttggcccgtcatgacattgggtagcattaactataagttttgtgcttccaaatcactttttggtttttaagaatttcttgatactcttatagtctgccttcaattttgatcctttattctatttgtcaggtgcacaagattaccttccttttttagccttctgtcttgtcaccaaccattcctacttggtggccatgtacttggaaaaaggccgcatgacctttctggctccactcagtgtctaaggcaccctgcttcctttgcttgcatcccacagactatttccctcatcctatttactgcagcaaatctctccttagttgatgagattgtgtttatctccctttaaaaccctgcctatcctgaatggtttgtcattgtctgcctttaaaatccttcctctttcttcctcctctgttctctaaataatgatggggctaagttatacccaaagctcactttacaaaatatttcctcagtactttgcagaaaacaccaaacaaaaatgccattttaaaagaggtatattttttcttttagaatgtaagctcctcaagagcagggacaatgttttctgtatgttctgttgtgcctagtacactgtaaatgctcaataaatattgatgatgggaggca

SEQ ID NO: 4171 - DNA, 909 bp, Homo sapiens
ctaacttggtgtgcagagtgaactgccgccgacggagcggccaggagagtggggatttctgtcagcgccggtaccccggagctcggagacatgaacggcttcacgcctgggcagtggggaggcggcagccgcagtggccgctgtggtcgccagtgcctcgtccgggaaatcggggctgaggggccgggcgcaggggcggtctcagcggctgggcccctgggggcggccaggccgggctcctggcaactgtgctgcctgcggaggatggtgagcggtgcggtcgggcagcaggcaacgccagcttcagcaagaggatccagaagagcatatcccagaaggtgaagatcgagctggataagagcgcaggcatctttacatatgtgattatcataaaaacttaattcagagtattcgaaacagaagaaagagaaaagggagtgatgatgatggaggtgattcacctgttcaagatttcgataccccagaggttgatttataccaattacaagtaaatacacttaggagatacaaaagacacttaaagccaccaaccagaccaggacttaataaagcacaacttgttgagatagttggttgccactttaggtctattccagtgagtgaaaaagacaccttaacatatttcatctaatcagtgaagaatgacaagaacaaatcagatctcaaggttgatagtggtgttcactagatgtggaattgagactaaaaacttggatgttaacactgtttaccgctttttcacatgtagaaatgttctttgtgtattttttctgcaaaagattttctgattttattttctttgtttctgactctaataattagttggaaactcatgtaaaatgagctttcctaaattaaaaactattttaaataaaggttattactatt

SEQ ID NO: 4172 - DNA, 1647 bp, Homo sapiens
actttacctcacttgtgaaggagaaagagccatcctctctacctttgttctaggtggatattctcttgctgtcagaacaccatccatttttgtagcccaaagaacaatgtttccatagtataaagttgaaaaaaaaaacaaactatattgaagcctctttaaagacaagataaatacagagagttatgttaggagtataacaagtaatattatgtctcaggccttctaattgaaatgctaagctaagcttacttttttttttttgtaacggagtctcgctcttgttgcccaggctagagtgcaatggcgtgatctcggctcaccccaacctctgcctcccgggttccagtgattctcccgcctcagcctcccgagtagctgggattacaggcatgcaccaccatgtcggactaattttttgtgtgttttttttttagtagagacaaggtttctccatgttggtcaggctggcctcgaactcctgacctcagatgatccacccacctcggcctcccaaagtgctaggattacaggtgtgagccactgcacccggcctttttttttttctttttgagatggagtcttgctgtctcccagcctggattgccacagtgcaatctcggctcactgcaacctcctgacctcaagtgatccacctcagcctcccaaagtgctgggattacagatgtgagccaccgtacccagcctaaatgctaagcttacttttgatgtggtaaatttatatattctctatcccaaatacatagggagcaagtatgttcagatgtagttaaatgtttaatcccatacaccatcttgactattataaaaagaccttacccagtgagctaaattggctaggtcaaatgtggttaaaatttggctgttctggtttcaggcaagaaggggttaaaagtggaatgtatgttgtaatagaagttaaagttgcaactcaagaaggaaaagaaataacctgtcgaagttatctgatgacaaattacgaaagtgctcccccatccccacagtataaaaagattatttgcatgggtgcaaaagaaaatggtttgccgctggagtatcaagagaagttaaaagcaatagaaccaaatgactatacaggaaaggtctcagaagaaattgaagacatcatcaaaaagggggaaacacaaactctttagaacataacagaatatatctaagggtattctatgtgctaatataaaatatttttaacacttgagaacagggatctgggggatctccacgtttgatccattttcagcagtgctctgaaggagtatcttacttgggtgattccttgtttttagactataaaaagaaactgggataggagttagacaatttaaaaggggtgtatgagggcctgaaatatgtgacaaatgaatgtgagtaccccttctgtgaacactgaaagctattctcttgaattgatcttaagtgtctccttgctctggtaaaagatagatttgtagctcacttgatgatggtgctggtgaattgctctgctctgtctgagatttttaaaaatcagcttaatgagagtaatctgcagacaattgataataacattttgaaaattggaaagatggtatactgtttttagaggaataaacgtatttgtggttt

SEQ ID NO: 4173 - DNA, 1056 bp, Homo sapiens
ccgtccagagactgctgaacccctatccatctgctaccaccacccactctggacacagaacatccagtcatggaaaaaaatgagctggttcagaaggccaaactggctgagcaggctgagcaatatgataacatggcagcctgcatgaagtctgtaactgagcaaggagctgaattatccaatgaggagaggaatcttctctcagttgcttataaaaatgttgtaggagcccgtaggtcatcttggagggtcatctcaagtattgaacaaaagacggaaggtgttgagaaaaaacagcagatggctcgagaatacagagagaaaattgagatggagctaagagatatctccaatgatgtactatctcttttggaaaagttcttgatctccaatgcttcacaagcagagagcaaagtcttctatttgaaaatgaaaggagattactaccgttacttggctgaggttgccgctggtgatggcaagaaagggattgtgggtcagtcacaacaagcataccaagaagcttttgaaatcagcaaaaaggaaatgcaaccaacacatactgtcagactgggtctggcccttaacttctcttgttctattatgagattctgaactccccagataaagtctgctctcttgcaaagatggcttttgatgaaggcattgctgaacttgatacattaaatgaagagtcatacaaagacagcacgctaataatgcaattaccgagagacaacttgacattgtggacactggatacccaaggagacaaagctgaagcaggagaaagaggggaaaattaaccggccttccaacttttgtctgcctctttctaaaatttacacagtagaccatttgtcatccatggtgtcccacaaatggttttttgtttacaatttatggcagatgtgtgttacttttatttgaatttctatatttcccatgtggtttttatgtttaatattaggggagtagagccagttaacatttagggagttatctgttttcatcttgaggtggccaatatggggatgtggaatttttatacaagtt

SEQ ID NO: 4174 - DNA, 1293 bp, Homo sapiens
aaacaaggaaaggagcaaaatcaggactcacagacagaggcagaagagctacgcaaactttggaaaacccatactatgcaacaaactaaacagcaaagggaaaatattcaacaagtgtcacaaaaagaagctaagcataaaattacatctgctgatggacacatagaaagttctgcacttttaaaagaaaagcaaaggcatcgattacataagttcttgtgtctcagagttggaaaaccaatgaggaaaacgtttgtatctcaagcaagtgctacaatgcaacagtatgcacagagagataagaaacatgaatattggtttgctgtgccacaagaaaggacagatcacttgtatgccttcttcattcagtggagtccagaaatatatgcagaagatactggcgaatataccagagaacctggatttatagtagtaaaaaagattgaggagtctgaaacaattgaggattctagtaatcaagcagcagccagagaatgggaggtagtgtcagtggctgagtatcaccgcaggatcgatgctctaaatactgaagaactgcgcacactctgcagacgcctccagattactacaagggaagacataaattcaaagcaggttgctacagtgaaagcagacctggagtctgaatcttttcgaccaaacctaagtgatcccagtgaacttttactgccagatcaaattgaaaagcttaccaagcatcttccaccaagaacaattggctatccatggactcttgtttatggtactggaaaacatggcacaagcttgaaaactctttatcgaacaatgacaggtttagacaccccagtgctgatggtgattaaagacagtgatggacaggtttttggtgcgttagcatctgaaccactgaaagtgagtgatggcttttatggtactggagagacctttgtttttacattctgtccggagtttgaggtctttaagtggacaggagataatatgttttttatcaaaggagacatggattcactagctttcggtggtggaggaggagaatttgcgctttggcttgatggagatctctaccatggaagaagccattcttgtaaaacgtttgggaatcgtacactttctaagaaggaagatttctttatccaagatattgaaatctgggcttttgaataaataaaatgctctctgtcttagcaggagaatggcccaaacctgacatggacaagcattgtttggaaagttcaagaagcaatacagtgtaacatgtcacttgtgctttaaaattagtctgtatcacca

SEQ ID NO: 4175 - DNA, 1187 bp, Homo sapiens
agctgacatctgtatctctggacctgaatgttgatccctcgcttcaggttgacatacctgatgtgctcagtgagagagataaagtcaaatttacagtgcacacaaagaccacactgcccatgtttcagagcccagagttttctgttacaaggcaacatgaagactttgtgtggctacatgacactcttattgaaacaacagactatgctgggcttattattccacctgctgctatgaagcccgacttcaatggtcctcgagagaagatgcagaaaccgggagagggtgaagggtctatgaccaaagaagaatttgccaagatgaaacaagaactggaagcctaagtgttaggtggaaaaatactaaagaaatgtttggtggcttcttcaaaagtgtggtgaaaagtgctgaagaagtcctttttactggagttagggaggtagatgacttctttgagcaagagaagaacttccttactaattattacaataggatcaacgattcttgtgtgaaagctgacaaaatgaccagatctcataaaaattgttgccgatgtctatatccacactgcagcctgcttacattgcctggctttagaagagcccacagtcatcaaaaagtacctattgaaggttgctgtgctatttgacaaacttaggaaagtagagggtcaagtttcatcagatgaagatctgaagctaacagagctccaacgatactacatgctcaacatcgaagctgctaaggatctcttatacagacacaccaaagccctcattgattatgagaactcaaacaaagctctggataaggcccggttaaagagcaaagacgtcaaattggctgaggcacaccagcaggagtgctgcctgaaatttgaacagctttccaaatctgcaaaagaagaactgataaatttcaaaccgaagagagtggcagcatttagaaagattctcattgaaatgtctgaactggaaataaaacatgccaggaacaatgactcccttttgcagagctgtattgacttgttcaagaataactgatatgccttcactcagaagaaaataaatgaatgtgaaagaaagccaagcatcacttgcacttaaatcattaccatggaagatttattagctttaactttagtttaaaattatgtgaataaatattttgatttctacaaatcttaa

SEQ ID NO: 4176 - DNA, 2018 bp, Homo sapiens
cagccaatgccggaacaggatttgctgttgctgagcctcaaatcgcaatgttttgtgggaagttaaatatgcatgtgaacattcagactgggaaatgggaacctgatccaacaggcaccaagagctgctttgaaacaaaagaagaagttcttcagtactgtcaggagatgtatccagagctacagatcacaaatgtgatggaggcaaaccagcgggttagtattgacaactggtgccggagggacaaaaagcaatgcaagagtcgctttgttacacctttcaagtgtctcgtgggtgaatttgtaagtgatgtcctgctagttccagaaaagtgccagtttttccacaaagagcggatggaggtgtgtgagaatcaccagcactggcacacggtagtcaaagaggcatgtctgactcagggaatgaccttatatagctacggcatgctgctcccatgtggggtagaccagttccatggcactgaatatgtgtgctgccctcagacaaagattattggatctgtgtcaaaagaagaggaagaggaagatgaagaggaagaggaagaggaagatgaagaggaagactatgatgtttataaaagtgaatttcctactgaagcagatctggaagacttcacagaagcagctgtggatgaggatgatgaggatgaggaagaaggggaggaagtggtggaggaccgagattactactatgacaccttcaaaggagatgactacaatgaggagaatcctactgaacccggcagcgacggcaccatgtcagacaaggaaattactcatgatgtcaaagttcctccaactcctctgccaaccaatgatgttgatgtgtatttcgagacctctgcagatgataatgagcatgctcgcttccagaaggctaaggagcagctggagattcggcaccgcaaccgaatggacagggtaaagaaggaatgggaagaggcagagcttcaagctaagaacctccccaaagcagagaggcagactctgattcagcacttccaagccatggttaaagctttagagaaggaagcagccagtgagaagcagcagctggtggagacccacctggcccgagtggaagctatgctgaatgaccgccgtcggatggctctggagaactacctggctgccttgcagtctgacccgccacggcctcatcgcattctccaggccttacggcgttatgtccgtgctgagaacaaagatcgcttacataccatccgtcattaccagcatgtgttggctgttgacccagaaaaggcggcccagatgaaatcccaggtgatgacacatctccacgtgattgaagaaaggaggaaccaaagcctctctctgctctacaaagtaccttatgtagcccaagaaattcaagaggaaattgatgagctccttcaggagcagcgtgcagatatggaccagttcactgcctcaatctcagagacccctgtggacgtccgggtgagctctgaggagagtgaggagatcccaccgttccaccccttccaccccttcccagccctacctgagaacgaagacactcagccggagttgtaccacccaatgaaaaaaggatctggagtgggagagcaggatgggggactgatcggtgccgaagagaaagtgattaacagtaagaataaagtggatgaaaacatggtcattgacgagactctggatgttaaggaaatgattttcaatgccgagagagttggaggcctcgaggaagagcgggaatccgtgggcccactgcgggaggacttcagtctgagtagcagtgctctcattggcctgctggtcatcgcagtggccattgccacggtcatcgtcatcagcctggtgatgctgaggaagaggcagtatggcaccatcagccacgggatcgtggaggttgatccaatgctcaccccagaagagcgtcacctgaacaagatgcagaaccatggctatgagaaccccacctacaaatacctggagcagatgcagatttaggtggca

SEQ ID NO: 4177 - DNA, 2858 bp, Homo sapiens
aacacgattcctctggccaggccaaggggagggcgacactgacaggcgccccccacccaggggccgtggcgaagcaaggggccggctgctcagaaaaggataagaagtggtttctcctcccctcttcccttcctcatcctgcagcccgcgcctcccccctcgccgcgctgcgcacggatggcggcgggagccgcagagccaccatgttcagccagcagcagcagcagcagctccagcaacagcagcagcagctccagcagttacagcagcagcagctccagcagcagcaattgcagcagcagcagttactgcagctccagcagctgctccagcagtccccaccacaggccccgttgcccatggctgtcagccgggggctccccccgcagcagccacagcagccgcttctgaatctccagggcaccaactcagcctccctcctcaacggctccatgctgcagagagctttgcttttacagcagttgcaaggactggaccagtttgcaatgccaccagccacgtatgacactgccggtctcaccatgcccacagcaacactgggtaacctccgaggctatggcatggcatccccaggcctcgcagcccccagcctcacacccccacaactggccactccaaatttgcaacagttctttccccaggccactcgccagtccttgctgggacctcctcctgttggggtccccatgaacccttcccagttcaacctttcaggacggaacccccagaaacaggcccggacctcctcctctaccacccccaatcgaaaggattcttcttctcagacaatgcctgtggaagacaagtcagaccccccagaggggtctgaggaagccgcagagccccggatggacacaccagaagaccaagatttaccgccctgcccagaggacatcgccaaggaaaaacgcactccagcacctgagcctgagccttgtgaggcgtccgagctgccagcaaagagattgaggagctcagaagagcccacagagaaggaacctccagggcagttacaggtgaaggcccagccgcaggcccggatgacagtaccgaaacagacacagacaccagacctgctgcctgaggccctggaagcccaagtgctgccacgattccagccacgggtcctgcaggtccaggcccaggtgcagtcacagactcagccgcggataccatccacagacacccaggtgcagccaaagctgcagaagcaggcgcaaacacagacctctccagagcacttagtgctgcaacagaagcaggtgcagccacagctgcagcaggaggcagagccacagaagcaggtgcagccacaggtccacacacaggcacagccaagcgtccagccacaggagcatcctccagcgcaggtgtcagtacagccaccagagcagacccatgagcagcctcacacccagccgcaggtgtcgttgctggctccagagcaaacaccagttgtggttcatgtctgcgggctggagatgccacctgatgcagtagaagctggtggaggcatggaaaagaccttgccagagcctgtgggcacccaagtcagcatggaagagattcagaatgagtcggcctgtggcctagatgtgggagaatgtgaaaacagagcgagagagatgccaggggtatggggcgccgggggctccctgaaggtcaccattctgcagagcagtgacagccgggcctttagcactgtacccctgacacctgtcccccgccccagtgactccgtctcctccacccctgcggctaccagcactccctctaagcaggccctccagttcttctgctacatctgcaaggccagctgctccagccagcaggagttccaggaccacatgtcggagcctcagcaccagcagcggctaggggagatccagcacatgagccaagcctgcctcctgtccctgctgcccgtgccccgggacgtcctggagacagaggatgaggagcctccaccaaggcgctggtgcaacacctgccagctctactacatgggggacctgatccaacaccgcaggacacaggaccacaaggttgccaaacaatccttgcgacccttctgcaccgtttgcaaccgctacttcaaaacccctcgcaagtttgtggagcacgtgaagtcccaggggcataaggacaaagccaaggagctgaagtcgcttgagaaagaaattgctggccaagatgaggaccacttcattacagtggacgctgtgggttgcttcgagggtgatgaagaagaggaagaggatgatgaggatgaagaagagatcgaggttgaggaggaactctgcaagcaggtgaggtccagagatatatccagagaggagtggaagggctcggagacctacagccccaatactgcatatggtgtggacttcctggtgcccgtgatgggctatatctgccgcatctgccacaagttctatcacagcaactcaggggcacagctctcccactgcaagtccctgggccactttgagaacctgcagaaatacaaggcggccaagaaccccagccccaccacccgacctgtgagccgccggtgcgcaatcaacgcccggaacgctttgacagccctgttcacctccagcggccgcccaccctcccagcccaacacccaggacaaaacacccagcaaggtgacggctcgaccctcccagcccccactacctcggcgctcaacccgcctcaaaacctgatagagggacctccctgtccctggcctgcctgggtccagatctgctaatgctttttaggagtctgcctggaaactttgacatggttcatgtttttactcaaaatccaataaaacaaggtagtttggc

SEQ ID NO: 4178 - DNA, 1737 bp, Homo sapiens
cttacgagcccacaggccccggagtagcagcggggaggccgggagcccgcgggccggagccgcccggccgaggcgtgggggctgcggggccggcccatccgtgggggcgacttgagcgttgagggcgcgcggggaggcgagccaccatgttcagccagcagcagcagcagcagctccagcaacagcagcagcagctccagcagttacagcagcagcagctccagcagcagcaattgcagcagcagcagttactgcagctccagcagctgctccagcagtccccaccacaggccccgttgcccatggctgtcagccgggggctccccccgcagcagccacagcagccgcttctgaatctccagggcaccaactcagcctccctcctcaacggctccatgctgcagagagctttgcttttacagcagttgcaaggtaacctccgaggctatggcatggcatccccaggcctcgcagcccccagcctcacacccccacaactggccactccaaatttgcaacagttctttccccaggccactcgccagtccttgctgggacctcctcctgttggggtccccatgaacccttcccagttcaacctttcaggacggaacccccagaaacaggcccggacctcctcctctaccacccccaatcgaaaggattcttcttctcagacaatgcctgtggaagacaagtcagaccccccagaggggtctgaggaagccgcagagccccggatggacacaccagaagaccaagatttaccgccctgcccagaggacatcgccaaggaaaaacgcactccagcacctgagcctgagccttgtgaggcgtccgagctgccagcaaagagattgaggagctcagaagagcccacagagaaggaacctccagggcagttacaggtgaaggcccagccgcaggcccggatgacagtaccgaaacagacacagacaccagacctgctgcctgaggccctggaagcccaagtgctgccacgattccagccacgggtcctgcaggtccaggcccaggtgcagtcacagactcagccgcggataccatccacagacacccaggtgcagccaaagctgcagaagcaggcgcaaacacagacctctccagagcacttagtgctgcaacagaagcaggtgcagccacagctgcagcaggaggcagagccacagaagcaggtgcagccacaggtacagccacaggcacattcacagggcccaaggcaggtgcagctgcagcaggaggcagagccgctgaagcaggtgcagccacaggtgcagccccaggcacattcacagccgcatctgccacaagttctatcacagcaactcaggggcacagctctcccactgcaagtccctgggccactttgagaacctgcagaaatacaaggcggccaagaaccccagccccaccacccgacctgtgagccgccggtgcgcaatcaacgcccggaacgctttgacagccctgttcacctccagcggccgcccaccctcccagcccaacacccaggacaaaacacccagcaaggtgacggctcgaccctcccagcccccactacctcggcgctcaacccgcctcaaaacctgatagagggacctccctgtccctggcctgcctgggtccagatctgctaatgctttttaggagtctgcctggaaactttgacatggttcatgtttttactcaaaatccaataaaacaaggtagtttggc

SEQ ID NO: 4179 - DNA, 2511 bp, Homo sapiens
ccgttgcccatggctgtcagccgggggctccccccgcagcagccacagcagccgcttctgaatctccagggcaccaactcagcctccctcctcaacggctccatgctgcagagagctttgcttttacagcagttgcaaggtaacctccgaggctatggcatggcatccccaggcctcgcagcccccagcctcacacccccacaactggccactccaaatttgcaacagttctttccccaggccactcgccagtccttgctgggacctcctcctgttggggtccccatgaacccttcccagttcaacctttcaggacggaacccccagaaacaggcccggacctcctcctctaccacccccaatcgaaagacaatgcctgtggaagacaagtcagaccccccagaggggtctgaggaagccgcagagccccggatggacacaccagaagaccaagatttaccgccctgcccagaggacatcgccaaggaaaaacgcactccagcacctgagcctgagccttgtgaggcgtccgagctgccagcaaagagattgaggagctcagaagagcccacagagaaggaacctccagggcagttacaggtgaaggcccagccgcaggcccggatgacagtaccgaaacagacacagacaccagacctgctgcctgaggccctggaagcccaagtgctgccacgattccagccacgggtcctgcaggtccaggcccaggtgcagtcacagactcagccgcggataccatccacagacacccaggtgcagccaaagctgcagaagcaggcgcaaacacagacctctccagagcacttagtgctgcaacagaagcaggtgcagccacagctgcagcaggaggcagagccacagaagcaggtgcagccacaggtacagccacaggcacattcacagggcccaaggcaggtgcagctgcagcaggaggcagagccgctgaagcaggtgcagccacaggtgcagccccaggcacattcacagcccccaaggcaggtgcagctgcagctgcagaagcaggtccagacacagacatatccacaggtccacacacaggcacagccaagcgtccagccacaggagcatcctccagcgcaggtgtcagtacagccaccagagcagacccatgagcagcctcacacccagccgcaggtgtcgttgctggctccagagcaaacaccagttgtggttcatgtctgcgggctggagatgccacctgatgcagtagaagctggtggaggtaacatggaaaagaccttgccagagcctgtgggcacccaagtcagcatggaagagattcagaatgagtcggcctgtggcctagatgtgggagaatgtgaaaacagagcgagagagatgccaggggtatggggcgccgggggctccctgaaggtcaccattctgcagagcagtgacagccgggcctttagcactgtacccctgacacctgtcccccgccccagtgactccgtctcctccacccctgcggctaccagcactccctctaagcaggccctccagttcttctgctacatctgcaaggccagctgctccagccagcaggagttccaggaccacatgtcggagcctcagcaccagcagcggctaggggagatccagcacatgagccaagcctgcctcctgtccctgctgcccgtgccccgggacgtcctggagacagaggatgaggagcctccaccaaggcgctggtgcaacacctgccagctctactacatgggggacctgatccaacaccgcaggacacaggaccacaagattgccaaacaatccttgcgacccttctgcaccgtttgcaaccgctacttcaaaacccctcgcaagtttgtggagcacgtgaagtcccaggggcataaggacaaagccaaggagctgaagtcgcttgagaaagaaattgctggccaagatgaggaccacttcattacagtggacgctgtgggttgcttcgagggtgatgaagaagaggaagaggatgatgaggatgaagaagagatcgaggttgaggaggaactctgcaagcaggtgaggtccagagatatatccagagaggagtggaagggctcggagacctacagccccaatactgcatatggtgtggacttcctggtgcccgtgatgggctatatctgccgcatctgccacaagttctatcacagcaactcaggggcacagctctcccactgcaagtccctgggccactttgagaacctgcagaaatacaaggcggccaagaaccccagccccaccacccgacctgtgagccgccggtgcgcaatcaacgcccggaacgctttgacagccctgttcacctccagcggccgcccaccctcccagcccaacacccaggacaaaacacccagcaaggtgacggctcgaccctcccagcccccactacctcggcgctcaacccgcctcaaaacctgatagagggacctccctgtccctggcctgcctgggtccagatctgct

SEQ ID NO: 4180 - DNA, 3061 bp, Homo sapiens
gtgaaggcgagcagacgcggagaaaggacgcgggagtgagagagggtgagtcagccactgtctaaacgataacgggaggcggttctgcggggtagggttgaattcagtaaatgggctcgtgctgctgtctcttcggagacgctgctatcttagcgtcagcgagggaaggttgaggaggagccagagccgggtcctgcagcgtttctcgccatcagcgcccgtcgccatctccaccatgcagtcccgggaagacgccccgcgctctcgccgcctagccagtccccgtggtgggaagcggcccaagaagattcacaaacccacagtttcggcctttttcacgggtccagaggaattaaaggacacggcccattctgcagccctgctggcacagctcaagtccttctacgatgcgcggctgctgtgtgatgtgaccatcgaggtggtgacgcctggcagcgggcctggcacgggtcgcctgttcccctgcaaccgcaatgtgctggccgcggcatgtccctacttcaagagcatgttcacaggtggcatgtacgagagccagcaggccagcgtgaccatgcacgatgtggacgccgagtccttcgaggtgttggtcgactactgctacacgggtcgtgtgtctctcagtgaggccaacgtggagcgcctgtacgcggcctccgacatgctacagctggaatatgtgcgggaagcctgtgcctccttcttagcccgacgtcttgacctgaccaactgcaccgccatcctcaagtttgcagatgcctttggccatcgcaagctgcgatcccaggcccagtcctatatagctcagaacttcaagcaactcagccacatgggttcaattcgggaggagactctagcagatctgaccctggcccagctgctggctgtcctgcgcttggatagtctggacgtggagagtgagcagacagtgtgccatgtggcagtgcagtggctggaggctgctcccaaagagcggggtcccagtgctgcagaagtcttcaagtgcgtgcgctggatgcacttcactgaagaagatcaggactacttagaagggctgctgaccaagcccatcgtgaagaagtactgcctggacgttattgaaggggccctgcagatgcgctatggtgacctgttgtacaagtctctggtgccagtgccaaacagcagcagcagcagtagcagcagcaactctcttgtatctgcagcagaaaatccaccccagagactgggtatgtgtgccaaggagatggtgatcttctttggacaccccagagatccctttctctgctgtgatccatactcgggggacctttacaaagtgccgtcacctttgacctgtctggctcacactaggactgtcaccactttagctgtctgtatctctcctgaccatgacatctatctagctgctcagcccaggacagacctctgggtgtataaaccagctcagaatagttggcagcaacttgcagatcgcttgctgtgtcgtgagggcatggatgtggcatatctcaatggctatatctacattttgggggggcgagaccctattactggagttaagttgaaggaagtggaatgctacaatgttaagagaaaccagtgggcattggtggctccactgccccattcttttttatcctttgacctaatggtaattcgagactatctctatgctctcaacagtaagcgcatgttctgttatgatcctagccacaatatgtggctgaagtgcgtttctctgaagcgcaatgactttcaggaagcctgcgtcttcaatgaggagatctattgtatctgtgatatcccagtcatgaaggtctacaacccagttagggcagaatggaggcaaatgaataatattcccttggtctcagagaccaacaactacagaattatcaagcatggccaaaaattgttgctcatcacctctcgcaccccacagtggaaaaagaaccgggtgactgtgtatgaatatgatattaggggagaccaatggattaatataggtaccacattaggcctcttgcagtttgattctaactttttttgcctctctgctcgtgtttatccttcctgccttgaacctggtcagagtttcctcactgaagaagaagaaataccaagtgagtctagcactgaatgggacttaggtggattcagtgagccagactctgagtcaggaagttcaagttctctttctgatgatgatttttgggtgcgtgtagcgcctcagtgaaatgcacaggatcaacagggtttgttgtaactagattgaaacactaagttgtttttactgttttggaaaatatcttaaatatcctttttgttcctaaaggagaggaaaagttgattaacttctggtttggtttagaaaaagtaatgtttgaaatacgaaggtaatttaatgttacaaattttaacactcaaatcaaccttttaataattttctgtgctaagggtccagtatttatttgattatttagtatgtttatgtttcatgacactaatttagtcttttgatacattttacattctgtttactgccacaagcactgtggcaataacttttgaattttaatttttataatagaaaaatgattaggaattgctagatagtgttttgaaagcatatctttttcttcagaacaatgtagacttccaaaatggttaacctaaggggtctttacaaaatgtgttataagttaaacataatttgggaagttttacttttgttttcttctatgaagaaaaaaatgcaggctgggcgcggtggctcacgcctgtaatcctagcactttgggaggccgaggcaggtggatcacctgaggtcagttcaagaccagcctggccaacatggtgaaaccccgtctctactaaaaatacaaaaattagctgggcgtggtggcatgcgcctgtaatcccagctacccaggaggctgaggcaggagaattgctgaaacccgggagtcagaggctgcagagagccgagactgggccactgcactccagcctggatgacagagtgagactccgtctc

SEQ ID NO: 4181 - DNA, 1757 bp, Homo sapiens
gcttgtcgtgcagctggccccaagcgcgcggggcaaggcggccctgcaggggtgagctttcctctgagaacccggggccttagcgacacgtaatccagttttccgtctccttggtgcagatgaagaaaccgacgcccatgggcgaaagggacctgctcaagttcactcaagaccacagagctgggcagcaagaaggagctcaagtccatgcccttcatcacctacctctcaggtttgctgacagcccagatgctgtcagatgaccagctcatttcaggtgtggagattcgctgtgaggagaaggggcgctgtccatctacctgtcacctttgccgccggccaggcaaggagcagctgagccccacaccagtgctgctggaaatcaaccgtgtggtgccactttataccctcatccaagacaatggcacaaaggaggccttcaagagtgcactgatgagttcctactggtgctcagggaaaggggatgtgatcgatgactggtgcaggtgtgacctcagcgcctttgatgccaatgggctccccaactgcagcccccttctgcagccggtgctgcggctgtccccaacagtggagccctccagtactgtggtctccttggagtgggtggatgttcagccagctattgggaccaaggtctccgactatattctgcagcataagaaagtggatgaatacacagacactgacctgtacacaggagaattcctgagttttgctgatgacttactctctggcctgggcacatcttgtgtagcagctggtcgaagccatggagaggtccctgaagtcagtatctactcagtcatcttcaagtgtctggagcccgacggtctctacaagttcactctgtatgctgtggatacacgagggaggcactcagagctaagcacggtgaccctgaggacggcctgtccactggtagatgacaacaaggcagaagaaatagctgacaagatctacaatctgtacaatgggtacacaagtggaaaggagcagcagatggcctacaacacactgatggaggtctcagcctcgatgctgttccgagtccagcaccactacaactctcactatgaaaagtttggcgacttcgtctggagaagtgaggatgagctggggcccaggaaggcccacctgattctacggcgactggagagggtgagtagccactgctccagcctcctgcggagtgcctacatccagagccgcgtggaaacagtgccctatcttttctgccgcagcgaggaggtccggcctgcaggcatggtgtggtatagcatcctcaaggacaccaaaatcacgtgtgaggagaagatggtgtcaatggcccgaaacacatattatttgactctatcaaaagtctctcctttttaaaccttttcttatggatggctgtcaatcccgaggcagaagttttcaggtggagaccaagcggcctttgctcttcttccttcttcctgccacactctgctttcttcctgccatggacccctggaggagacctatggagggacagttttgacctgacccctagaggagacagttttgacctcttcagcaccaggaaggaagctctgaggatggttgcagtgaggaagcatgggtctttaaggacttctctctcttttttgctggacattattgagtttgtgggaccctgcctcttcctgctacctgtgggtctgcccagagtccctgcaggcctgtccatgcattaaaaattcctattgtctctc

SEQ ID NO: 4182 - DNA, 1563 bp, Homo sapiens
gaaagaatgcaaaaaaaaaaaaaaaaagtcaagggtaggagccttctttagtgaaacagcactaagaacaaagcaaaaagaccataacattttaaaagccattttgggcaggctcaaggagaatgtaatcagcagtatcatcatgagcagctctacagatcattaatgctggtttatttgtcttttcaaaaagaaaagaaaaaggtcttgcaggggatgggcactcagccactggaagacagagagcaaatgtaaacaatttactggctttgaacttatttaataatatgtgggacgggccaatgctgagtccagatgtggatttactgaattgcttttagacaaaactcacatatgcaaacatatgcttgacttgtattgaatgtgtctactccatctttcccctctcctgactctactggacttgttaatgttgaatgattttatttttggtatctcaggacacttctatctctgaaagccggggcatcactacatattgatacccctactggagagaagattgcacggactggtaaatgatgttgtctttcctccttctcccaccattttctctccctctagaagccgaaccggaagttgacaaccttctggtttcagatgccaccccagacggtttccgtctgtcctggacagctgatgaaggggtcttcgacaattttgttctcaaaatcagagataccaaaaagcagtctgagccactggaaataaccctacttgcccccgaacgtaccagggacataacaggtctcagagaggctactgaatacgaaattgaactctatggaataagcaaaggaaggcgatcccagacagtcagtgctatagcaacaacaggtactgtaaataaacaggagagaacagagaaaagtcatgactcaggggtcttcttctcacagggctgagtaatcacaggagctttggatgcaggcaggctggcgctctgatcctgactctttcaattacagactgtgttaccttggacaatttggctaagtccttatgcaaaaaaagtatgatgccatttacttaatagggttgtgaggattaaatgagataattcatataaagcccatagcggaaggcctggcaggtagcaagggcccagcaaatgagagctattcacgttgccattaatgcatcatcatcgttacaattatcatctttttttttttacgttccaaagattcttccttctatctattatctcatcatatctcatctcatcatatcatatctcatcattttatccagagatacacttccttgttctttggccaaatgttcgagctataccaagtagggagataatggagaagcagcacgtctatctatacacattaatatttataaaatgctacatgtgaataatcagtacggtgatcagcaaggataaaggagagagctggcaagattaacatgctactgtttatgaagctctctaactttgatactcataacaactctgaaaggcacctagagtgtccttggagtttaattacctttttccataggagctgtttcaaggagaaaaaaaaaaaa

SEQ ID NO: 4183 - DNA, 5331 bp, Homo sapiens
ggccgctcaaccatcacagaagatcacagccaccaaaatccccaaaagcctccctaccaagccttcggccccttctacttcaattgtgcccatcaaaagcccccatcctacccagaaaacagctccatcttcatttacaaagtcagccctacccactcagaagcaagtgccacctacttcccgtccagttcctgccagagtctcccgtcccgcagagaagcccatccagaggaacccgggaatgcccaggcccccaccgcccagcacccggcccctacctcctaccaccagctcctctaaaaaacccattcccacactagctcggactgaggccaagataaccagccatgccagtaagccggcctctgcccgcaccagcacccacaaacctcccccatttactgctttatcctcatctcctgcccctactcctggttctaccaggagtactcggccaccagccacgatggtacctccaacttcgggcaccagcactcccagaacagcacctgccgtccccactcctggctcagctcccactggaagcaagaagcccattggatcggaagcctcaaagaaagccggacccaagagcagcccccggaagcctgtccccctcagacctgggaaggcagccagggatgtccccttgagcgatctgacaaccaggcctagccccagacagccccagcccagtcagcagaccaccccggccctggtattggccccggcgcaattcctgtcctccagcccccggcccacgagcagtggctattcgatcttccacctggcaggatctacgcctttccctctgctgatggggcctccgggacccaagggagactgtggcttgccgggtccccctgggctacctgggctacctggaatccctggtgcacgtgggcctcggggtcctcctgggccttatggaaatccaggtctccccggccctcctggagccaaaggtgacatgggcttgcctgggctctccgggaatccaggacctccgggacgaaagggacacaagggctatcctggaccggcagggcaccccggagaacaggggcagccaggacctgagggcagcccaggggccaaaggttaccctggcaggcaggggttacctggaccggtaggagatcccggccccaaaggcagcaggggctacattgggctcccagggctcttcggcctgccagggtctgatggagaacgaggcctgcctggcgttcctggcaagaggggcaagatgggtatgccggggtttcctggagtctttggggaaagaggccctcctggactggatggaaatcctggagaactgggcctgccaggcccccctggagtccccggcctcattggtgacttaggagtgttgggtccgattggctacccgggacccaagggcatgaagggactgatgggcagcgtgggggagcccggactgaaagggtgaacaaggggttccaggtgtgtcaggagatcccggattccaaggagacaaggggagccaggggttgccagggttccccggtgcacgggggaagccagggcctctgggcaaagtcggagacaaaggatccattgggtttcccgggccccctggacccgagggattcccaggagacatcggcccccctggcgacaatggcccagaaggcatgaagggtaagcctggagcccgaggcctgccgggaccccgtgggcagctggggcccgaggggagatgagggacccatggggccgccaggggcccctggcttggagggtcagcctggcaggaaggggtttcctgggaggcccggcctggatggcgtgaagggggaaccaggggatcctggtcggccggggcctgtgggagagcagggatttatgggattcattggtctggtcggggagccaggaatcgtgggagaaaagggtgatcgtggcatgatgggacccccaggcgtgcctggacccaaggggtcgatggtaaggaggtcatcctggaatgccaggtggtatggggacccctggagagcctggaccccagggtcctccaggatctcgaggcccaccaggcatgaggggagcaaagggacgtcggggcccccgaggaccggacggaccagctggggagcaagggtccaggggcctgaagggccctccaggaccccagggcagaccgggccggcctggacagcagggtgtggctggtgagcgaggccacttgggctcgagaggctttcctggcatcccgggtccctcaggccccccaggcaccaagggcctcccaggagaaccgggccctcagggaccccaggggccaattgggcctccaggagagatgggacccaaggggccgcctggtgcagtgggagaaccgggccttcctggggaagccgggatgaagggtgaccttggacccctgggcactcctggggagcagggcctcattgggcaacggggagagccaggccttgagggtgacagtggccccatgggacctgatgggctgaagggggacaggggagacccagggcctgatggagaacatggcgagaaaggccaggaagggctgatgggtgaggacgggccccccggcccccctggcgtcactggtgtccggggtcctgaaggaaaatcagggaagcaaggcgagaagggccgcactggagccaagggtgccaagggctatcaaggacagctgggtgagatgggcgtccctggagaccctggaccccctggcactccaggccctaaagggtcccggggcagcctgggaccaacgggtgctccgggacgcatgggggcccaaggagaaccgggactggctggttatgatggacacaaaggcattgtgggaccccttggacctcctggaccaaaaggcgaaaagggggagcagggcgaggacggcaaggctgaggggccccctgggccacctggagatcggggccctgtgggtgatcgaggagaccgcggggaaccgggagaccctgggtaccctggacaggagggtgtgcaaggcctccgtggaaagccaggccagcagggccaacccgggcatccgggaccccgggggtggccgggacccaaaggatcgaaaggcgcagagggaccaaagggaaagcaaggcaaggcaggggccccaggccggaggggggtccagggcctgcaggggctgccagggccccggggcgtggtggggagacagggcctcgagggcatcgctggaccagatgggcttcctggcagggacgggcaagcaggacagcagggggagcagggagacgatggggaccctggccccatgggccctgctgggaagagaggaaatccaggtgtggccggcttacctggagcacagggacccccaggattcaagggtgagagtgggttacccggacagctgggtccccctggcaagcgaggaacagagggcagaacggggctccctggaaaccagggggagcctgggtccaaaggccagccgggcgactctggcgagatgggcttcccaggaatggcaggtctcttcggacccaaggggcccgcctggagacattggcttcaaaggcatccagggccctcgggggccacctggcttgatgggaaaggaaggcatcgtcgggcccctcggaatcctgggaccttcgggactcccgggtccgaagggtgacaaaggcagccgtggggactggggattgcaaggtccgaggggtcctcccggccccagagggcggcccggccccccgggtcctccagggggtcctatccaattgcaacaagatgatcttggggcagctttccagacgtggatggacaccagtggagcactcaggccagagagttacagctatccagaccggctggtgctggaccagggaggagagatctttaaaaccttacactacctcagcaacctcatccagagcattaagacgcccctgggcaccaaagagaaccccgcccgggtctgcagggacctcatggactgtgagcagaagatggtggatggtacctactgggtggatccaaaccttggctgctcctctgacaccatcgaggtctcctgcaacttcactcatggtggacagacgtgtctcaagcccatcacggcctccaaggtcgagtttgccatcagccgggtccagatgaatttcctgcacctgctaagctccgaggtgacccagcacatcaccatccactgccttaacatgaccgtgtggcaggagggcactgggcagaccccagccaagcaggccgtacgcttccgggcctggaatggacagatttttgaagctgggggtcagttccggcccgaggtgtccatggatggctgcaaggtccaagatggccgctggcatcagacactcttcaccttccggacccaagacccccaacagctgcccatcatcagtgtggacaacctccctcctgcctcatcagggaagcagtaccgcctggaagttggacctgcgtgcttcctctgacctctgacctcgtggccactctaggcctcacggaggagggaagaggaagaggcaaggggagggtactgaggggcagatggctccaggagaggcagctcccctgcccaagggtccttgggcagaccccagctgttgtctgcccagtagaagtgggtgggggtaggaggggatagggtgtccttgggaacaatggatcccagcttagccccaaagaccaaccaaagagccagccagagtaagctggacctgcaacctgcctgagccccgtggcctctcagctctgcggccaccccgttccctccccagcttcctgcccaaagagccccacattcaagccaacttgagggaagggggcgtctcgtcagctggtccctgctagggagctattgatgtgcaatattagaaaggagacatgaaaaaaggagaaaaggaaagacagaagtgtatatatatattatttaaacaaacaaaaagaaggtgcgttactatttttttttcacccgggaaagaggtgagaggatgggaaggagcagccaggcgtgggaagcggcgagatcctcgggctgggggtgcccacgtttgctacctcccactgtgaaatcgctggtgctcacaattgtctctcacagtgtatgtgatttttttaaggaaaaaaaaaaatccctatttaagattctgaaggtgctaccattattttgccacagactttgaagaaacttttggatgtggggcatcatccgcatctttctctctcctccaaatgacaaagtttggggaatttttgaattttcctagcatcgcccttgtgctcatcaggtaatctgctaaggaggaaaaaagaaaagaaaaaagg

SEQ ID NO: 4184 - DNA, 463 bp, Homo sapiens
gctcgcagactgtgctataaactgcaatttctatttggggtcctcacggagaagaacaccaggaaagacagacaggaccagtgccatgggccagctttgctgctttcctttctcaagagatgaaggaaaaatcagtgagttggaaagctcgtcctctgcagtcctacagagatacagcaaggatatacccagttggtcaagtggtgaaaagaacggaggggagcccgatgacgctgaactagtaaggctcagtaagaggctggtggagaacgcggtgctcaaggctgtccagcagtatctggaggaaacacagaataaaaacaagccgggggaggggagctctgtgaaaaccgaagcagctgatcagaatggcaatgacaatgagaacaacaggaaatgagcccggaacgcaggcccccatgtctctgtgcaaagcctccctgcttccctctgctgagtctag

SEQ ID NO: 4185 - DNA, 3237 bp, Homo sapiens
gatacttatagatctccatctcagcctatgaagctttggaaaggattgatggtttaatccgaaaatgtaagtaattggatgtgcagtgtggcctggggctgccttaggaacaggtgtgcctgctgcgtgcgtggctcctcctccaagccgaccctgcagttgctgtcgtcctccctaggtggggtgtgcacagatctggaaacacacacacgagtgcacacatcaacacttgactttttgcccagctctgccgtggccgaggttgcaggacaagcagtagacagggctgtgggctcctgttcccatccagaataatagggcgacagggaaccctgcagccagcttcagggaccactgcccaacctgacatgcagctggggtcttccctttgtggagatgaagttgtctgcatgctgcagaaagctatgtggctgtgacaccttctgcaccctggctgagggtccgctcagatggaaaaatgtcttcagggttttgaaggttccctgcctttctttttaaatatagctgccactgttcatccttttgtagcggtttagaaaacacctcatggtcattcccttgactcaattattgctggcattagcagtgtcactgtgaatgtttctttcaaaagcatgagtgctgagaggaaactgcttttcttaaaaacttaaaaaacctttagtcttcggactcccccgcccaggctaccagacattcgagcaaaacaaaggaagtatgtatcacggtgatctgggtgaagagagtagggagtagtcataaaacatttattgaagagcttacaactggaaatgcctattttagaatggtgttttaagtgcagacactggctgcccaagtgtcttgtgcctctggacgctaacttcctaggcgggagaaactggggtctccctggggaagggggcacatgaactctcgagggcgaaggccagagtgcacctgcttatgaccttcgaagtgtagagaggttggcaaagccgcagttattgaattaatggaagcaacttgtaactcaagatgcacgattttaaaaatgattcagtaaagactgacttgtaatcggggcgatgcttctctgctgtgtcaggctgggctgcggccttcttgactaccgggagcaggctcagcagatagaattgaagaccggagggatgagtgcttctccccacgtgctccccgacgactcacacatggacacctacgagcaggtagcctggtaccgtcagacgactgctgcggtgggaagcttttctccagtgtctgtcactgttcgattcggccctaattcctttcttctgtgttttctttggttcagggtgtgcttttctcctctctctgcctggatcgaaacctgccagacatgatgcagctatggagtgaaatatttaacaagtaactttatttgcaagagttgtccattcttggggtgtactagagatctttgtttgaagtactttaaaggagacagttttactcgtgtgtgttgttgttttccaagtctgacttttacttgtagttcatatggacttataaaatttctttggttgttaaagtactctgaaaacttaatcaactttccatgatactgaagggacgtgaggaatgggtctccaggaattttttcttctcctttttccatagcccgtgctttgaagaagaggagcacttcaaggtgctggtgaagatgaccgcccaggagctcgccaatggaattcctgactctgggcacctgtacgcatccatcagggcaggccggaccctcacgcccgcaggggacctgcaggagaccttcagcgggatggatcaggtgcggctgatgaagaggattgcagaaatgacagatatcaaacccatcctgaggaagctcccgcgtatcaagaaacacttgttaaatggtgataatatgaggtgttcagtgaatgcgactcctcagcagatgcctcagacagaaaaagcggtcgaagacttccttagaagcatcggtcggagtaaaaaggaacggaggcctgtgcgcccacacacggtcgagaaacctgtgcccagcagctctggtggagatgcccacgttccccatggctcccaggtcattaggaagctggtcagttttacagtgagaaattgtgtggagtgacggaactgcagtgccttgctctcgcgccccagcacctggctgcagagtgtcacggagatgggacccctgagatggctccagtcccagtgccgtgggcagtgcgtgggagcacagccgcctctgacccctgagtgggtccagtcccagtgccgtgggcggtgcatggcagcacagccgcctctgaccataccgtgtccctcaggaacccaccttcaagccctggcagatgaagactcacttcctgatgcccttcccggtgaattacgtgggtgaatgcatccgaactgtcccctacacggacccagatcatgccagtcttaaaatccttgcacgtttgatgactgccaaattcttgcatacagaaattcgagaaaaaggcggtgcttatggtggaggcgcaaaactcagccacaatgggattttcaccctttactcttacagggacccaaatacaatagagacgctccagtcttttgggaaggctgtcgactgggctaagtctggaaaattcacacagcaagacatcgacgaagccaaactttctgtcttctcaaccgtagatgctcctgtcgctccttcagacaaaggaatggaccacttcttgtacggcctctcggatgagatgaagcaggcccacagagagcagctctttgctgtcagccacgacaagctcctggccgtgagcgatagatacctcggcactgggaagagcacacacggcctggccatcctcggacccgagaacccgaaaattgccaaggacccatcctggatcatccaatgagcagccgtggcgctcgactgcacaggagcccgagacaatacacctccgagctgaatatgaaaagtcagaaatgctactgctttttccaagaatattatgtcattgagtgtcgccaaagcccttgactggcgagtcaaaaactcagatctatcttaagagtgaccaggaagaggttcattgaaataatcatgcatgaagcgccaaagatgcaccatgtagaattttcactttgtactggcaggctcgttttacctcattctagaatatttaagaatctaaaaataaagggcaactctgactt

SEQ ID NO: 4186 - DNA, 985 bp, Homo sapiens
aaaaaaagctgatgaggtcggaaaaaagggagaagaaaccggcaccctctctgagaggcaacagaagcagcaattgtttcagcgaaaaaagcagcaagggagggagtgaaggaaaaaagcaaaaaagggggcgacacgcaagtgcctgtaggggtgaaaggagcagggaccggcgatctagggggggatcagctacaaaagaaactgtcactgggagcggtgcggccaaggaggaagcagtgctgccaggctctgctccagggcacagctggctggcggctgccctgtccgcagcaaaggggcacaggccggggaccgcgagaggtggcaaagtggcaccgggcgccgaggctgctgagcgctcgccgagacggcgaccggactggctgccccggaactgcggcgactctccctactcagaacttggcctacgtttcccaggactctccccatctccagaggcccccacaaaaccgggaaaggaaggaaaggacagcggcggcagcagctcaatgagtgcctacagcagaaagcctgtgatttggccaggctctatgggaggaatgaggttgttagcctgatgcaggcaaatggggctgggggagccacaaatcttcaataaacgtggggagggctcccccacgttgcctctactttatcaattaactgagtagctctcctgacttttaatgtcatttgttaaaatacagttctgtcatatgttaagcagctaaattttctgaaactgcataagtgaaaatcttacaacaggcttatgaatatatttaagcaacatctttttaacctgcaaaatctgttctaacatgtaattgcagataactttgactttcttctgaatattttatctttccttggcttttcccttgcttccccttttgccaatctcaacacccaagttgaagactttgtttttaaaatggtttgtcctgatgcttttgtctaattaaaacactttcaaaacagg

SEQ ID NO: 4187 - DNA, 600 bp, Homo sapiens
ccgatgccatcatgcagcctggttaggagcaaaggaaaggggaaaaagaaaaacgactaattcatcttttcctgatcgtcaggaccctaaagaatggccgagccttgggggaacgagttggcgtccgcagctgccaggggggacctagagcaacttactagtttgttgcaaaataatgtaaacgtcaatgcacaaaatggatttggaaggactgcgctgcaggttatgaaacttggaaatcccgagattgccaggagactgctacttagaggtgctaatcccgatttgaaagaccgaactggtttcgctgtcattcatgatgcggccagagcaggtttcctggacactttacagactttgctggagtttcaagctgatgttaacatcgaggataatgaagggaacctgcccttgcacttggctgccaaagaaggccacctccgggtggtggagttcctggtgaagcacacggccagcaatgtggggcatcggaaccataagggggacaccgcctgtgatttggccaggctctatgggaggaatgaggttgttagcctgatgcaggcaaatggggctgggggagccacaaatcttcaataa

SEQ ID NO: 4188 - DNA, 1832 bp, Homo sapiens
ttcagtgagcatgtttttgaacacattaacaccgaagttctacgtggccctaacaggcacttcctcactaatatcagggcttattttgatatttgaatggtggtattttcgcaaatacggaacttcattcattgaacaagtctcagtaagccacttgcgcccccttctgggaggggttgacaacaactcttccaacaattctaattccagtaacggggactcagattccaataggcaaagtgtctcagaatgcaaagtatggcgaaatccactaaatttatttaggggtgctgaatacaatcggtatacttgggtgacaggacgagagcctcttacttactatgacatgaatctctctgcccaagaccaccagacattctttacttgtgactcggaccatctgcgtcccgcagatgcaataatgcagaaagcctggagagagagaaacccccaagctaggatttctgcagctcatgaagccttggagataaatgaaattaggtccagagttgaagttcccctaattgcttcctctaccatctgggagataaaattgttaccaaagtgtgcaactgcttatattctcttggctgaagaggaagcaacaaccattgctgaagcagaaaaattatttaagcaggccctgaaggctggagatggctgttaccgacgctctcagcagctacaacatcatggatcccagtatgaagcccaacatagacgagacaccaatgtcttggtgtacatcaaaagaaggctagcaatgtgtgccagaagactcgggaggaccagggaagcagtgaaaatgatgagagatttaatgaaggagttcccccttctgagtatgttcaatatccatgaaaaccttttagaagcccttctggaactacaagcatatgctgatgttcaggcagtcttagcaaagtatgatgatataagcttaccaaagtcagcaacaatatgctacacagctgctttgctcaaagcaagagctgtctctgacaaattctctcctgaggctgcatctcggcgggggctgagcacagcagagatgaatgcagtagaggccattcatagagctgtggaattcaatcctcatgtgccaaaatacctactagaaatgaaaagcttaatcctacccccagaacatatcctgaagagaggagacagtgaagcaatagcatatgcattctttcatcttgcacactggaagagagtggaaggggctttgaatcttttgcattgtacgtgggaaggcacttttcggatgatcccttatcccttggaaaaggggcacctattttatccttacccaatctgtacagaaacagcagaccgagagctgcttccatctttccatgaagtctcagtttacccaaagaaggagcttcccttctttattctctttactgctggattatgttccttcacagccatgctggccctcctgacacatcagttcccggaacttatgggggtcttcgcaaaagctttcctcagcactttgtttgcccccttaaactttgtcatggagaaagtggagagcatcctcccatccagtctgtggcaccagctaacacggatctgagagaagccctgtcctccactcacctcacccgccgctgccaccatctcctctgtgccaactccttgtggaccgcaagaaagcatgactttgaaaaagggaagccattccgagattttaaaatgttcatggactattccatattaaaagctgtttttgttgtacaaaattcactgatgttcagttctattttattttgccttcagaaaagaagaaagtcaaaaataaaacttttgtgtattacagc

SEQ ID NO: 4189 - DNA, 8866 bp, Homo sapiens
  misc_feature (40)..(410): n is a, c, g, or t
gcactgcagcgccaacgtccgagcgggcggccgagctccnnnnnnnnnnnnnnnnnnnnnnnnnnnnnnnnnnnnnnnnnnnnnnnnnnnnnnnnnnnnnnnnnnnnnnnnnnnnnnnnnnnnnnnnnnnnnnnnnnnnnnnnnnnnnnnnnnnnnnnnnnnnnnnnnnnnnnnnnnnnnnnnnnnnnnnnnnnnnnnnnnnnnnnnnnnnnnnnnnnnnnnnnnnnnnnnnnnnnnnnnnnnnnnnnnnnnnnnnnnnnnnnnnnnnnnnnnnnnnnnnnnnnnnnnnnnnnnnnnnnnnnnnnnnnnnnnnnnnnnnnnnnnnnnnnnnnnnnnnnnnnnnnnnnnnnnnnnnnnnnnnnnnnnnnnnnnnnnnnnnnnnnnnnnnnnnnnnnnnnnnnnnnnnnnnncggacgccacagcgctagacgtctcccacaacctgctccgggcgctggacgttgggctcctggcgaacctctcggcgctggcagagctggatataagcaacaacaagatttctacgttagaagaaggaatatttgctaatttatttaatttaagtgaaataaacctgagtgggaacccgtttgagtgtgactgtggcctggcgtggctgccgcgatgggcggaggagcagcaggtgcgggtggtgcagcccgaggcagccacgtgtgctgggcctggctccctggctggccagcctctgcttggcatccccttgctggacagtggctgtggtgaggagtatgtcgcctgcctccctgacaacagctcaggcaccgtggcagcagtgtccttttcagctgcccacgaaggcctgcttcagccagaggcctgcagcgccttctgcttctccaccggccagggcctcgcagccctctccgagcagggctggtgcctgtgtgggtcagcccagccctccagtgcctccttcgcctgcctgtccctctgctccggccccccgccgcctcctgcccccacctgtaggggccccaccctcctccagcacgtcttccctgcctccccaggggccaccctggtggggccccacggacccctggcctccggccagctagcagccttccacatcgctgccccgctccctgtcactgccacacgctgggacttcggagacggctcccccgaggtggatgccgctgggccggctgcctcgcatcgctatgtgctgcctgggcgctatcacgtgacggccgtgctggccctggggaccggctcagccctgctggggacagacgtgcaggtggaagcggcacctgccgccctggagctcgtgtgcccgtcctcggtgcagagtgacgagagcctcgacctcagcatccagaaccgcggtggttcaggcctggaggccgcctacagcatcgtggccctgggcgaggagccggcccgagcggtgcacccgctctgcccctcggacacggagatcttctctggcaatgggcactgctaccgcctggtggtggagaaggcggcctggctgcaggcgcaggagcagtgtcgggcctgggccggggccaccctggcaatggtggacagtcccgccgtgcagcgcttcctggtctcccgggtcaccaggagcctagacatgtggatcggcttctcgactgtgcagggggtggaggtgggcccagcgccgcagggcgaggccttcagcctggagagctgccagaactggctgcccggggagccacacccagccacagccgagcactgcgtccggctcgggcccaccgggtggtgtaacaccgacctgtgctcagcgccgcacagctacgtctgcgagctgcggcctggaggcccagtgcaggatgccgagaacctcctcgtgggagcgcccagtggggacctgtagggacccctgatgcctctggcacggcaggacggcctctcagccccgcacgagcccgtggaggtagtcggccccccacgttctataacctgccctcctgcctgcccctggaggcctcgcctgccctgcccactgtgggtctcgccaaaaaacttgggggccttaatgttgcttgtgcccagtgaagatggttgggaaaatccagagtgcagagaggaaagcgtttactcacattacccccaggccttttctctgagtgtgggtgagttattcctgaaaggcaggtcaggggtcctgccccccatggacagtttccatcggagtcttcctctcgagcgacaggagccaggcctgtgggggtccgatggctcgctctccttccctcccctcttcctgcgaagttcgggtggggggagtctgggcttcaggctgggatggggtctgtggagctgaggcggccccctgcccaccaggtcatggtattcccgggcctgcgtctgagccgtgaagccttcctcaccacggccgaatttgggacccaggagctccggcggcccgcccagctgcggctgcaggtgtaccggctcctcagcacagcaggtgggactctggggtggtgggcgccgcaggactcggggtggcctctctgagctctcacgtctgctggtcctgtggccatcagagtggttcccagtcttaggtggacagagcaggggttccagagacaccagctcattccaggtgtcctgggggtggatcgggtggggcctgcctggggaccggcctgggtcagtcagctggccggagacagggacgcagcactgggctgggagtgctgcccgggcggggagacctgtcctcacagcaaggccaggctcgctggtgcaggcagttgggcatctctgacggtggcccgtgggcgaatgagggccccaacaccctcccctcctcgcagggaccccggagaacggcagcgagcctgagagcaggtccccggacaacaggacccagctggcccccgcgtgcatgccagggggacgctggtgccctggagccaacatctgcttgccgctggacacctcctgccaccccaggcctgcgccaatggctgcacgtcaggggccagggctactcggggccccctatgcgctatggagagagttcctcttctccgttcccgcggggccccccgcgcagtactcggtgtgtggccctgacctgggtctgttccctgcatctcctcaggccaccttcctgtctgctgcccagggtctgggtctgcgcagcagacacacccagcctgcaggcccctcccacgtccttgccacctctgacctccgacctccgacctccaacctccgacctctgcagtgcccttgcccctctcccagtgggagaagctctcgcctgggcccttggcacgagctgtgcctcctcttcctctctcccagcacagccgctccttcctgtctgtcaggtcttggcctgtgtcctctccccgtgtgtccccctgtctgcaactgtcctgcctgtccttgtcacgagcactgtggggaggctccctgaggtgtggctgacgaagcggggagccctgcgtgtccaccctcatccgtcgtgcaggggtccacgggccatgaccgtgaggacgtgatgcagccctgcctccctctccacaggtcaccctccacagccaggatgtcctcatgctccctggtgacctcgttggcttgcagcacgacgctggccctggcgccctcctgcactgctcgccggctcccggccaccctggtccccaggccccgtacctctccgccaacgcctcgtcatggctgccccacttgccagcccagctggagggcacttgggcctgccctgcctgtgccctgcggctgcttgcagccacggaacagctcaccgtgctgctgggcctgaggcccaaccctgggctgcggctgcctgggcgctatgaggtccgggcagaggtgggcaatggcgtgtccaggcacaacctgtcctgcagctttgacgtggtctccccagtggctgggctgcgggtcatctaccctgccccccgcgacggccgcctctacgtgcccaccaacggctcagcctcggtgctccaggtggactctggtgccagcgccacggccacggctcgctggcctgggggcagtgtcagcgcccgctttgagaatgcctgccctgccctggtggccaccttcgtgcccagctgcccctgggagaccaatgataccctgttctcagtggtagcactgccgtggctcggtgagggggagcacgtgatggacgttgtggtggaaaacagcgccagccgggccaacctcagcctgcgggtgacggcggaggagcccatctgtggcctccgcgccacgcccagccccgaggcccgtgtactgcagggagtcccagtgagtatggccgaggctccaccaccagcccccaggcaggtgcctgcagacagggtgctcacacagggcttgaggcctggcttcccagtgagggcagcagcccagttactggggacgtcggccccgggcaggtcctgctggctggctcctcaggctacctggtgggctttaaattcctggaaagtcacggctctgacagcggctccgctaactcattccaccgtctcatttcacgaaatgaatttaaaactccgctccctgacctcacacgagtccccgtgagtctctcacgccctctgctgtgttctcgcctggctaaagcaagtggcttttgaggtggagtccgaacccctgatgggaaactgcgggctgcccgcagtgccaccatgctgggtacatgggggacagggctgttccatcttgcgggtacctgccccttcaccaggggccttgggaggggccatcagaaatggcgtgacctgtgcagcctgtcctgggttctgtaagccagtgtaggtgctgtccctgtgaggcccgtgtgcctcccctcactgctccgagctctctggctgaggagctggggcaggagccccgggagggtctgagaagactcagagagaggtggactctttgtagctggtactaggtttgctttacagatggggaaactgaggcacagagaggttgaggcattagtagtactacatggctggctggagagccggacagtcagtgtcccagcccgggcttggctctcatggcatgcagagccccgggcacctcctctcctctgtgccccgcgtgggactctccagcccgacgggaggtgtgtccaggaggcgacaggctaagggcagagtcctccacagagcccaggctgacaccagtccccccgcagaggtacagccccgtggtggaggccggctcggacatggtcttccggtggaccatcaacgacaagcagtccctgaccttccagaacgtggtcttcaatgtcatttatcagagcgcggcggtcttcaagctctcagtaggtgggcgggagtggggaggggaggggatggggcggggcgggggcggctccaccttcacctctgccttctgctctgcttcatgctgcccgaggacgctgccatggctgtggtgagtggagggagggacgccaagcagggcaggcctctcacctgccacctgggcccactgatgcctgtccctgcagctgacggcctccaaccacgtgagcaacgtcaccgtgaactacaacatcaccgtggagcggatgaacaggatgcagggcctgcgggtctctacagtgccagccgtgctgtcccccaatgccacgctggcactgacggcgggcgtgctggtggactcggccgtggaggtggccttcctgtgagtgactcaggggccggtttggggtgggcaccaggctcttgtccgggcaccaggctcttgtcccggctccagcctcagccgagggcggtgggctgcacgtacgttcagcaacaagacgctggtgctggatgagaccaccacatccacgggcagcgcaggcatgtgactggtgctgcggcggggcgtgctgcgggacggcgagggatacaccttcacgctgacggtgctgggccgctctggcgaggaggagggctgcgcctccatccccctgtcccccaaccgcccgccgctggggggctcttgccgcctcttcccactgggcgctgtgcacgccctcaccaccaaggtgcacttcgaatgcatgggctggcatgacgcggaggatgctggcgccccgctggtgtacgccctgctgctgcagcgctgtcgccagggccactgcgaggagttctgtgtctacaagggcagcctctccggctacggagccgtgctgcccccgggtttcaggccacacttcgaggtgggcctggccgtggtggtgcaggaccagctgggagccgctgtggtcgccctcaacaggtctctggccatcaccctcccagagcccaacggcagcgcaatggggctcacagtctggctgcacgggctcaccgctagtgtgctcccggggctgctgcggcaggccgatccccagctcgtcatcgagtactcgctggccctggtcactgtgctgaacgagtacgagcgggccctggacgtggcggcagagcccaagcacgagcggcagcgccgagcccagatacgcaagaacatcacggagactctggtgtccctgagggtccacactgtggatgacatccagcagatcgctgctgcgctggcccagtgcatggggcccagcagggagctcgtatgccgctcgtgcctgaagcagacgctgcacaagctggaggccatgatgcgcatcctgcaggcagagaccaccgcgggcaccgtgacgcccaccgccatcggagacagcatcctcaacatcacaggagacctcatccacctggccagctcagacgtgcgggcaccacagcgctcagagctgggagccgagtcaccatcgcggatggtggcgtcccaggcctacaacctgacctctgccctcacgcccatcgtcacgcgctcccgcgtgctcaacgaggagcccctgacgctggcgggtgaggagatcgtggcccagggcaagcgctcggacccgcggagcctgctgtgctatggcggcgccccagggcctggctgccacttctccatcccctaggctttcagcagggccccggccaacctcagtgacgtggtgcagctcatctttctggtggactccaatccctttccctttggctatatcagcaactacaccgtctccaccaaggtggcctcgatggcgttccagacacaggccggcgcccagatccccatcgagcggctggcctcagagcgcgcctcaccgtgaaggtgcccaacaactcggactgggctgcccggggccaccgcagctccgccaactccgttgtggtccagccccaggcctccgtcggtgctgtggtcaccctggacagcagcaaccctgcggccgtgctgcatctgcagctcaactatacgctgctggacggccgctacctgtctgaggaacccgagccctacctggcagtctacctgcactcggagccccggcccaatgagcgcaactgctcggctagcaggaggatccgcccagagtccctccagggtgccgaccaccggccctacaccttcttcatttccccggggaccagagacccagtggggagttaccgtctgaacctctccagccacttccgctggtcggcgctggaggtgtccgtgggcttgtacacgtccctgtgccagtacttcagcgaggaggacgtggtgtggcggacagaggggctgctgcccctggaggagacctcgccccgccaggccgtctgcctcacccgccacctcaccgccttcggcaccagcctcttcgtgcccccaagccatatccgctttgtgtttcctgagccaacagcggatgtaaactacatcgtcatgctgacatgtgctgtgtgcctggtgacctacatggtcatggccgccatcctgcacaagctggaccagttggatgccagccggggctgcgccatccccttctgtgggcagcggggccgcttcaagtacgagatcctcgtcaagacaggctggggccggggctcaggtaccacggcccacgtgggcatcatgctgtatggggtggacagccggagcggccaccggcacctggacggcgacagagccttccaccgcaacagtctggacatcttccagatcgccaccccgcacagcctgggtagcgtgtggaagatccgagtgtggcacgacaacaaagggctcagccctgcctggttcctgcagcacatcatcgtcagggacctgcagacggcacgcagcaccttcttcctggtcaatgactggctttcggtggagacggaggccaacgggggcctggtggagaaggaggtgctggccgcgagtcacgcagccctgttgcgcttccggcgcctgctggtggctggctgcagcgtggcttctttgacaagcacatctggctctccatatgggaccggccgcctcggagctgtttcactcgcatccagagggccacctgctgcgttctcctcatctgtctcttcctgggcgccaacgccgtgtggtacggggctgttggagactctgcctacagcacggggcgtgtgtccaggctgaacccgctgagcgtcgacacagtcgctgttggcctggtgtccagcgtggttgtctatcccgtctacctggccatcctctttctcttccggatgtcccggagcaaggtggctgggagcccgagccccacacctgccgggcagcaggtgctggacgtcgacagctgcctggactcatccgtgctggacagctccttcctcacgttctcaggcctccacgctgaggcctttgctggacagatgaagagtgacttgtttctggatgattctaagagtctggtgtgctggccctccagcgagggaacgcccagttggccggacctgctcagtgacccgtccattgtgggtagcaatctgcggca

SEQ ID NO: 4190 - DNA, 2902 bp, Homo sapiens
gggcggcggagccgactcgtcgcggccgaggcgcgcgcggtccgtgccggcgtcagtctgggattggccggcccgcgacttcctccgccccctgccaatcgccggggacgacttccgtgggtttttccggctcccccgcgtcgctaaggagcgacgggctgtcggccagaccccgagttctcggtgcgctcagcggccgccgacgctaggaggccgcgctccgcccccgctaccatgaggccccggaaagccttcctgctcctgctgctcttggggctggtgcagctgctggccgtggcgggtgccgagggcccggacgaggattcttctaacagagaaaatgccattgaggatgaagaggaggaggaggaggaagatgatgatgaggaagaagacgacttggaagttaaggaagaaaatggagtcttggtcctaaatgatgcaaactttgataattttgtggctgacaaagacacagtgctgctggagttttatgctccatggtgtggacattgcaagcagtttgctccggaatatgaaaaaattgccaacatattaaaggataaagatcctcccattcctgttgccaagatcgatgcaacctcagcgtctgtgctggccagcaggtttgatgtgagtggctaccccaccatcaagatccttaagaaggggcaggctgtagactacgagggctccagaacccaggaagaaattgttgccaaggtcagagaagtctcccagcccgactggacgcctccaccagaagtcacgcttgtgttgaccaaagagaactttgatgaagttgtgaatgatgcagatatcattctggtggagttttatgccccatggtgtggacactgcaagaaacttgcccccgagtatgagaaggccgccaaggagctcagcaagcgttctcctccaattcccctggcaaaggtcgacgccaccgcagaaacagacctggccaagaggtttgatgtctctggctatcccaccctgaaaattttccgcaaaggaaggccttatgactacaacggcccacgagaaaaatatggaatcgttgattacatgatcgagcagtccgggcctccctccaaggagattctgaccctgaagcaggtccaggagttcctgaaggatggagacgatgtcatcatcatcggggtctttaagggggagagtgacccagcctaccagcaataccaggatgccgctaacaacctgagagaagattacaaatttcaccacactttcagcacagaaatagcaaagttcttgaaagtctcccaggggcagttggttgtaatgcagcctgagaaattccagtccaagtatgagccccggagccacatgatggacgtccagggctccacccaggactcggccatcaaggacttcgtgctgaagtacgccctgcccctggttggccaccgcaaggtgtcaaacgatgctaagcgctacaccaggcgccccctggtggtcgtctactacagtgtggacttcagctttgattacagagctgcaactcagttttggcggagcaaagtcctagaggtggccaaggacttccctgagtacacctttgccattgcggacgaagaggactatgctggggaggtgaaggacctggggctcagcgagagtggggaggatgtcaatgccgccatcctggacgagagtgggaagaagttcgccatggagccagaggagtttgactctgacaccctccgcgagtttgtcactgctttcaaaaaaggaaaactgaagccagtcatcaaatcccagccagtgcccaagaacaacaagggacccgtcaaggtcgtggtgggaaagacctttgactccattgtgatggaccccaagaaggacgtcctcatcgagttctacgcgccatggtgcgggcactgcaagcagctagagcccgtgtacaacagcctggccaagaagtacaagggccaaaagggcctggtcatcgccaagatggacgccactgccaacgacgtccccagcgaccgctataaggtggagggcttccccaccatctacttcgcccccagtggggacaaaaagaacccagttaaatttgagggtggagacagagatctggagcatttgagcaagtttatagaagaacatgccacaaaactgagcaggaccaaggaagagctttgaaggcctgaggtctgcggaaggtgggaggaggcagacgccctgcgtggcccatggtcggggcgtccacgccgaggccggcaacaaacgacagtatctcggattcctttttttttttttttaattttttatactttggtgtttcacttcatgctctgaatactgaataaccatgaatgactgaatagtttagtccagatttttacagaggatacatctatttttatcattatttggggtttgaaaaatttttttttacaccttctaatttctttatttctcaaagcagataattcttctgtgtgaaaatgttttctttttttaatttaaggtttaaaattccttttccaaatcatgttgattttgctctttgctttttcgttgtctgagaaattgttggcgtagatttggcttctggtatgtgtttctgattgcttcctgttgagcacaaagtgagagctgccactgagcagccctgccaggggtgctgtttcaggctgggcatcgccaggcggcctccctgcaaaccaagggctgggggcaaaggggcatgatccagggtcccccagggtgggctcagctccagggagaggccacccacgtggcagccccacctcttgagagcccccagtgccggagcagaaaggaccctggacccagaggcagatactgcggggtggtagaaaaggtagagtaggctgtggcaatggaataaaacacgattaaaaacgtt

SEQ ID NO: 4191 - DNA, 3146 bp, Homo sapiens
gcagccccggcggccgaacgcccgcggcgcgggactccatcgtcagagaagtcattcagaattcaaaagaagttctaagtttattgcaagaaaaaaaccctgccttcaagccggttcttgcaattatccaggcaggtgacgacaacttgatgcaggaaatcaaccagaatttggctgaggaggctggtctgaacatcactcacatttgcctccctccagatagcagtgaagccgagattatagatgaaatcttaaagatcaatgaagataccagagtacatggccttgcccttcagatctctgagaacttgtttagcaacaaagtcctcaatgccttgaaaccagaaaaagatgtggatgggtaacagacataaacctggggaagctggtgcgaggggatgcccatgaatgttttgtttcacctgttgccaaagctgtaattgaacttcttgaaaaatcaggtgtcaacctagatggaaagaagattttggtagtgggggcccatgggtctttggaagctgctctacaatgcctgttccagagaaaagggtccatgacaatgagcatccagtggaaaacacgccagcttcaaagcaagcttcacgaggctgacattgtggtcctaggctcacctaagccagaagagattccccttacttggatacaaccaggaactactgttctcaactgctcccatgacttcctgtcagggaaggttgggtgtggctctccaagaatacattttggtggactcattgaggaagatgatgtgattctccttgctgcagctctgcgaattcagaacatggtcagtagtggaaggagatggcttcgtgaacagcagcacaggcggtggagacttcactgcttgaaacttcagcctctctcccctgtgccaagtgacattgagatttcaagaggacaaactccaaaagctgtggatgtccttgccaaggagattggattgcttgcagatgaaattgaaatctatggcaaaagcaaagccaaagtacgtttgtccgtgctagaaaggttaaaggatcaagcagatggaaaatacgtcttagttgctgggatcacacccacccctcttggagaagggaagagcacagtcaccatcgggcttgtgcaggctctgaccgcacacctgaatgtcaactcctttgcctgcttgaggcagccttcccaaggaccgacgtttggagtgaaaggaggagccgcgggtggtggatatgcccaggtcatccccatggaggagttcaaccttcacttgactggagacatccacgccatcaccgctgccaataacttgctggctgccgccatcgacacgaggattcttcatgaaaacacgcaaacagataaggctctgtataatcggctggttcctttagtgaatggtgtcagagaattttcagaaattcagcttgctcggctaaaaaaactgggaataaataagactgatccgagcacactgacagaagaggaagtgagtaaatttgcccgtctcgacatcgacccatctaccatcacgtggcagagagtattggatacaaatgaccgatttctacgaaaaataaccatcgggcagggaaacacagagaagggccattaccggcaggcgcagtttgacatcgcagtggccagcgagatcatggcggtgctggccctgacggacagcctcgcagacatgaaggcacggctgggaaggatggtggtggccagtgacaaaagcgggcagcctgtgacagcagatgatttgggggtgacaggtgctttgacagttttgatgaaagatgcaataaaaccaaacctgatgcagaccctggaagggacacctgtgttcgtgcatgcgggcccttttgctaacattgctcacggcaactcttcagtgttggctgataaaattgccctgaaactggttggtgaagaaggatttgtagtgaccgaagctggctttggtgctgacatcggaatggagaaattcttcaacatcaagtgccgagcttccggcttggtgcccaacgtggttgtgttagtggcaacggtgcgagctctgaagatgcatggaggcgggccaagtgtaacggctggtgttcctcttaagaaagaatatacagaggagaacatccagctggtggcagacggctgctgtaacctccagaagcaaattcagatcactcagctctttggggttcccgttgtggtggctctgaatgtcttcaagaccgacacccgcgctgagattgacttggtgtgtgagcttgcaaagcgggctggtgcctttgatgcagtcccctgctatcactggtccgttggtggaaaaggatcggtggacttggctcgggctgtgagagaggctgcgagtaaaagaagccgattccagttcctgtatgatgttcaggttccaattgtggacaagataaggaccattgctcaggctgtctatggagccaaagatattgaactctctcctgaggcacaagccaaaatagatcgttacactcaacagggttttggaaatttgcccatctgcatggcaaagacccacctttctctatctcaccaacctgacaaaaaaggtgtgccaagggacttcatcttacctatcagtgacgtccgggccagcataggcgctgggttcatttaccctttggtcggaacgatgagcaccatgccaggactgcccacccggccctgcttttatgacatagatcttgataccgaaacagaacaagttaaaggcttgttctaagtggacaaggctctcacaggacccgatgcagactcctgaaacagactactctttgcctttttgctgcagttggagaagaaactgaatttgaaaaatgtctgttatgcaatgctggagacatggtgaaataggccaaagatttcttcttcgttcaagatgaattctgttcacagtggagtatggtgttcggcaaaaggacctccaccaagactgaaagaaactaatttatttctgtttctgtggagtttccattatttctactgcttacactttagaatgtttattttatggggactaagggattaggagtgtgaactaaaaggtaacattttccactctcaagttttctactttgtctttgaactgaaaataaacatggatctagaaaacc

SEQ ID NO: 4192 - DNA, 9130 bp, Homo sapiens
agagtttcactctgttgcccaggctggagtgcagtggcgcaatctcggctcactgcagcctctgccctctgagttcaagtgattctcctgcctcagcctcctgagtagctgggattacaggtgtctgccaccgtgcccagacatgaaaaaactgcttcctaacatgttaagtccggatccgagggaacttcagaaatccattgaagttcaattgttaagaagttctgtttgtttggcaactgctttaaacccgatagaacaagatcagaagtggcagtctataactgaaaatgtggtaaagtacttgaagcaaacatcccgcatcgctattggacctctgagactttctactttaacagtttcacagtctttgccagttctaagtaccttgcagctgtattgctcatctgctttggagaacacagtttctaacagactttcaacagaggactgtcttattccactcttcagtgaagctttacgttcatgtaaacagcatgacgtgaggccatggatgcaggcattaaggtatactatgtaccagaatcagttgttggagaaaattaaagaacaaacagtcccaattagaagccatctcatggaattaggtctaacagcagcaaaatttgctagaaaacgagggaatgtgtcccttgcaacaagactgctggcacagtgcagtgaagttcagctgggaaagaccaccactgcacaggatttagtccaacattttaaaaaactatcaacccaaggtcaagtggatgaaaaatgggggcccgaacttgatattgaaaaaaccaaattgctttatacagcaggccagtcaacacatgcaatggaaatgttgagttcttgtgccatatctttctgcaagtctgtgaaagctgaatatgcagttgctaaatcaattctgacactggctaaatggatccaggcagaatggaaagagatttcaggacagctgaaacaggtttacagagctcagcaccaacagaacttcacaggtctttctactttgtctaaaaacatactcactctaatagaactgccatctgttaatacgatggaagaagagtatcctcggatcgagagtgaatctacagtgcatattggagttggagaacctgacttcattttgggacagttgtatcacctgtcttcagtacaggcacctgaagtagccaaatcttgggcagcgttggccagctgggcttataggtggggcagaaaggtggttgacaatgccagtcagggagaaggtgttcgtctgctgcctagagaaaaatctgaagttcagaatctacttccagacactataactgaggaagagaaagagagaatatatggtattcttggacaggctgtgtgtcggccggcggggattcaggatgaagatataacacttcagataactgagagtgaagacaacgaagaagatgacatggttgatgttatctggcgtcagttgatatcaagctgcccatggctttcagaacttgatgaaagtgcaactgaaggagttattaaagtgtggaggaaagttgtagatagaatattcagcctgtacaaactctcttgcagtgcatactttactttccttaaactcaacgctggtcaaattcctttagatgaggatgaccctaggctgcatttaagtcacagagtggaacagagcactgatgacatgattgtgatggccacattgcgcctgctgcggttgctcgtgaagcacgctggtgagcttcggcagtatctggagcacggcttggagacaacacccactgcaccatggagaggaattattccgcaacttttctcacgcttaaaccaccctgaagtgtatgtgcgccaaagtatttgtaaccttctctgccgtgtggctcaagattccccacatctcatattgtatcctgcaatagtgggtaccatatcgcttagtagtgaatcccaggcttcaggaaataaattttccactgcaattccaactttacttggcaatattcaaggagaagaattgctggtttctgaatgtgagggaggaagtcctcctgcatctcaggatagcaataaggatgaacctaaaagtggattaaatgaagaccaagccatgatgcaggattgttacagcaaaattgtagataagctgtcctctgcaaaccccaccatggtattacaggttcagatgctcgtggctgaactgcgcagggtcactgtgctctgggatgagctctggctgggagttttgctgcaacaacacatgtatgtcctgagacgaattcagcagcttgaagatgaggtgaagagagtccagaacaacaacaccttacgcaaagaagagaaaattgcaatcatgagggagaagcacacagctttgatgaagcccatcgtatttgctttggagcatgtgaggagtatcacagcggctcctgcagaaacacctcatgaaaaatggtttcaggataactatggtgatgccattgaaaatgccctagaaaaactgaagactccattgaaccctgcaaagcctgggagcagctggattccatttaaagagataatgctaagtttgcaacagagagcacagaaacgtgcaagttacatcttgcgtcttgaagaaatcagtccatggttggctgccatgactaacactgaaattgctcttcctggggaagtctcagccagagacactgtcacaatccatagtgtgggcggaaccatcacaatcttaccgactaaaaccaagccaaagaaacttctctttcttggatcagatgggaagagctatccttatcttttcaaaggactggaggatttacatctggatgagagaataatgcagttcctatctattgtgaataccatgtttgctacaattaatcgccaagaaacaccccggttccatgctcgacactattctgtaacaccactaggaacaagatcaggactaatccagtgggtagatggagccacacccttatttggtctttacaaacgatggcaacaacgggaagctgccttacaagcacaaaaggcccaagattcctaccaaactcctcagaatcctggaattgtaccccgtcctagtgaactttattacagtaaaattggccctgctttgaaaacagttgggcttagcctggatgtgtcccgtcgggattggcctcttcatgtaatgaaggcagtattggaagagttaatggaggccacacccccgaatctccttgccaaagagctctggtcatcttgcacaacacctgatgaatggtggagagttacgcagtcttatgcaagatctactgcagtcatgtctatggttggatacataattggccttggagacagacatctggataatgttcttatagatatgacgactggagaagttgttcacatagattacaatgtttgctttgaaaaaggtaaaagccttagagttcctgagaaagtaccttttcgaatgacacaaaacattgaaacagcactgggtgtaactggagtagaaggtgtatttaggctttcatgtgagcaggttttacacattatgcggcgtggcagagagaccctgctgacgctgctggaggcctttgtgtacgaccctctggtggactggacagcaggaggcgaggctgggtttgctggtgctgtctatggtggaggtggccagcaggccgagagcaagcagagcaagagagagatggagcgagagatcacccgcagcctgttttcttctagagtagctgagattaaggtgaactggtttaagaatagagatgagatgctggttgtgcttcccaagttggacggtagcttagatgaatacctaagcttgcaagagcaactgacagatgtggaaaaactgcagggcaaactactggaggaaatagagtttctagaaggagctgaaggggtggatcatccttctcatactctgcaacacaggtattctgagcacacccaactacagactcagcaaagagctgttcaggaagcaatccaggtgaagctgaatgaatttgaacaatggataacacattatcaggctgcattcaataatttagaagcaacacagcttgcaagcttgcttcaagagataagcacacaaatggaccttggtcctccaagttacgtgccagcaacagcctttctgcagaatgctggtcaggcccacttgattagccagtgcgagcagctggagggggaggttggtgctctcctgcagcagaggcgctccgtgctccgtggctgtctggagcaactgcatcactatgcaaccgtggccctgcagtatccgaaggccatatttcagaaacatcgaattgaacagtggaagacctggatggaagagctcatctgtaacaccacagtagagcgttgtcaagagctctataggaaatatgaaatgcaatatgctccccagccacccccaacagtgtgtcagttcatcactgccactgaaatgaccctgcagcgatacgcagcagacatcaacagcagacttattagacaagtggaacgcttgaaacaggaagctgtcactgtgccagtttgtgaagatcagttgaaagaaattgaacgttgcattaaagttttccttcatgagaatggagaagaaggatctttgagtctagcaagtgttattatttctgccctttgtacccttacaaggcgtaacctgatgatggaaggtgcagcgtcaagtgctggagaacagctggttgatctgacttctcgggatggagcctggttcttggaggaactctgcagtatgagcggaaacgtcacctgcttggttcagttactgaagcagtgccacctggtgccacaggacttagatatcccgaaccccatggaagcgtctgagacagttcacttagccaatggagtgtatacctcacttcaggaattgaattcgaatttccggcaaatcatatttccagaagcacttcgatgtttaatgaaaggggaatacacgttagaaagtatgctgcatgaactggacggtcttattgagcagaccaccgatggcgttcccctgcagactctagtggaatctcttcaggcctacttaagaaacgcagctatgggactggaagaagaaacacatgctcattacatcgatgttgccagactactacatgctcagtacggtgaattaatccaaccgagaaatggttcagttgatgaaacacccaaaatgtcagctggccagatgcttttggtagcattcgatggcatgtttgctcaagttgaaactgctttcagcttattagttgaaaagttgaacaagatggaaattcccatagcttggcgaaagattgacatcataagggaagccaggagtactcaagttaatttttttgatgatgataatcaccggcaggtgctagaagagattttctttctaaaaagactacagactattaaggagttcttcaggctctgtggtaccttttctagaacattgtcagatcaagttcacttgaagatcagaatactgtgaatgggcctgtacagattgtcaatgtgaaaaccctttttagaaactcttgtttcagtgaagaccaaatggccaaacctatcaaggcattcacagctgactttgtgaggcagctcttgatagggctacccaaccaagccctcggactcacactgtgcagttttatcagtgctctgggtgtagacatcattgctcaagtagaggcaaaggactttggtgccgaaagcaaagtttctgttgatgatctctgtaagaaagcggtggaacataacatccagatagggaagttctctcagctggttatgaacagggcaactgtgttagcaagttcttacgacactgcctggaagaagcatgacttggtgcgaaggctagaaaccagtatttcttcttgtaagacaagcctgcagcgggttcagctgcatattgccatgtttcagtggcaacatgaagatctacttatcaatagaccacaagccatgtcagtcacacctcccccacggtctgctatcctaaccagcatgaaaaagaagctgcataccctgagccagattgaaacttctattgcaacagttcaggagaagctagctgcacttgaatcaagtattgaacagcgactcaagtgggcaggtggtgccaaccctgcattggcccctgtactacaagattttgaagcaacgatagctgaaagaagaaatcttgtccttaaagagagccaaagagcaagtcaggtcacatttctctgcagcaatatcattcattttgaaagtttacgaacaagaactgcagaagccttaaacctggatgcggcgttatttgaactaatcaagcgatgtcagcagatgtgttcgtttgcatcacagtttaacagttcagtgtctgagttagagcttcgtttattacagagagtggacactggtcttgaacatcctattggcagctctgaatggcttttgtcagcacacaaacagttgacccaggatatgtctactcagagggcaattcagacagagaaagagcagcagatagaaacggtctgtgaaacaattcagaatctggttgataatataaagactgtgctcactggtcataaccgacagcttggagatgtcaaacatctcttgaaagctatggctaaggatgaagaagctgctctggcagatggtgaagatgttccctatgagaacagtgttaggcagtttttgggtgaatataaatcatggcaagacaacattcaaacagttctatttacattagtccaggctatgggtcaggttcgaagtcaagaacacgttgaaatgctccaggaaatcactcccaccttgaaagaactgaaaacacaaagtcagagtatctataataatttagtgagttttgcatcacccttagtcaccgatgcaacaaatgaatgttcgagtccaacgtcatctgctacttatcagccatccttcgctgcagcagtccggagtaacactggccagaagactcagcctgatgtcatgtcacagaatgctagaaagctgatccagaaaaatcttgctacatcagctgatactccaccaagcaccgttccaggaactggcaagagtgttgcttgtagtcctaaaaaggcagtcagagaccctaaaactgggaaagcggtgcaagagagaaactcctatgcagtgagtgtgtggaagagagtgaaagccaagttagagggccgagatgttgatccgaataggaggatgtcagttgctgaacaggttgactatgtcattaaggaagcaactaatctagataacttggctcagctgtatgaaggttggacagcctgggtgtgaatggcaagacagtagatgagtctggttaagcgaggtcagacatccaccagaatcaactcagcctcaggcatccaaagccacaccacagtcggtggtgatgcaactgggggcttactctgaggaaacctaggaaatctcggtgcactaggaagtgaatcccgcaggacagctgcactcagggatacgcccaacaccatggcctgcaaccccagggtcaagggtgaaggaaagcaagctcaccgcctgaacacggagattgtctttctgccacagaacagcagcagacgtgtcgggaggttagctgcggaaagaaatcgggatgccgcggagcacagagtgatttggaactccattccacctgaccctgtgtgtacaatccaggaaaaaaacaaaccccactcagaaacagagaaaactggggtcgcgaagaaatcacagccaaggaagatttgatgcattcagattctcgtgtaacacttgttgcttggcaacagtactggttgggttgaccagtaagtagaaaaaggctaaaggctatgcgatatgaatttcagaaatggactgaaaatggagagctatgtaacagatacactacagtagaagaacttacttctgaaatgaagggaaaaaaaccaccccatcgttccctactcctccccaccacttacccgttccccctttacctaatctagtagattagccatctttcaaattcacttttatttcagtccttatatttcatatacttccgtctcgatgctgttaacaacttctgataacatggaaaattcaaggattgtttaaaggtctgatgatcacacacaaaatgtaattccggttatttaagtcatttctgtgattctatcatgtacagtttccagaattgtcactgtgcattcaaaagtaatgaatctaacagacatttgatttaatgtacactcccttttgcttatagtgtgcattttttttggaggtcattcaaattttccctcttctgtgatagctgtagtttctttcatagaaagtagctaatccagtgtaatcttttacctttttaaaaaccaagatagagtatctattagagttttacattgttgatgatagattaacaataaagtgatgttctggtggaggtagactgaaatttttttaattcatgtttttcatttgatacttttaatttacacttagtaaattaaaagttgtttaatttacttggcattttaggacatgtacatgaaacagtgaaaatgagatccaccaacatcttttattaagttcagttattagtctgtgaagtgctttactttttgcacaattttaatagcttgctattcagtaatacattatagtgaattcatgatcaaggtttccttaaatttagcatttgcatttcagtactgactgtgtaagctaaattgctgatccaaaataaaaacccagactagaatagggttcttaaaatcaagtatcaatacaaaatagaacacaattaaaatcttaattgttggctgggcacagtggctcacgcctgtaatcccagcactttgggaggccgaggcgggcggatcatgaggttaggagagcgagaccatcctggctaacacggtgaaaccccgtctttactaaaaatacaaaaaaaattagccgggcgtggtggcgggcgcctgtagtcccagctactcgggaggctgaggcaggagaatggcgtgaacccaggaggcggagcttgcagtgagccgagattgtgccactgcactccagcctgggcaacagagctagactctgtgtcaaaaataaatgactagat

SEQ ID NO: 4193 - DNA, 2193 bp, Homo sapiens
tttccgccatctttccgcgccgccacaatggtgcgcatgaatgtcctggcagatgctctcaagagtatcaacaatgccgaaaagagaggcaaacgccaggtgcttattaggccgtgctccaaagtcatcgtccggtttctcactgtgatgatgaagcatggttacattggcgaatttgaaatcattgatgaccacagagctgggaaaattgttgtgaacctcacaggcaggctaaacaaggttggagtgcagtggcacgatcttggctactgcaacctctgtctcccaggttcaagcgattctcctgcctcagcctccctagtagctgagattacagtgtggggtgatcagccccagatttgacgtgcaactcaaagacctggaaaaatggcagaataatctgcttccatcccgccagtttgggtaagttggcctttccttaattaaaagaagttaatgctaagaatttctgtggtgcagtttgacttaagggtttttttctttttttctgtttaaaacaaagcagtggtaatttgtctactcttaaccattttgacctaatagctcaagtgttatccatatttcttttctctctctttaaaaagagacagggttggccaggcacagtggctcacgcctgtgatcctagcattttgggaggctgaggcaggcggatcacctgaggttgggagttcgagaccaccctgaccaacatggagaaccccgtgtctacctaaaatacaaaattagccaggcctggtggcacacacctgtgatcccagctacttgagaggctgaggcaggaaaatagcttgaacccgggagagaggttgcggtgagctgagattgtgccattgcactccagcctgggcaacgagtgaaactctgtctcgagaaaaaagagagagagacagggtttcactttgttgcccaggctggagtgcagtggctgttcacaggtgcggtcataacacgctacagccttggcttcttggcctcgagcagtcctccccgctcagcctcttgtggatttgggaatacaggcgcctgccaccgtgcctggctatttgccacatttcatgtgttgagcttcaggttctgagaggcacatgagagcttagactggcagaaaaggggggtcgtgtccactttcatgtctgcccttttggctcactgcagatagttccctgtgatcccagatgagggccagaatcagttctaagcctaggcctttgggaaaacttagtttgggagtctttgtccttaaaagcctatctgagttcaaacccttgtttttctgctttaaagccatgagatcttgggcaagtcacagccttgatttcttcatccgtaaaagtggtaatagttcctctgtttatcacctgatttaattttggtaaagcactttatgagctgacacagtaaatgtgtatctttgtggttaagaatttataccctccaaattatgcgtctggtgccttggttgaaagtattctcacttcatggttgctgtattacaggtacggtattctcaccaaaatcatttctctttgtaattatgatactgattttaatgccgcacatttgcatactatatgcttgttacagtgatccccacagtaactcatgaagcagccactcattgtacaaatgaacgtctccatataatagtttagctattatacagtacatggcagaaacacaattcaaactcaagtttatacgaatactttcaagtctccttacctgagagcagaaagtgacatttaaatttaaaggagttcccagcctttgttttcagtgcagtttgtttcatggtgtaggcagaagtcagggctgtgtgattgtgtggctgggctctctggatttggctctttgggttgcaggagtcatggctcatacgctacatgaggcaccagctcatgtaggcactgtcagttcctatgtgccccacaggaaagcgcccttaaccactgatgagtgttgatgtttttctgcactagaaggcactatgttgaactattaaacttaccagcactttctttttccactccatagtttcattgtactgacaacctcagctggcatcatggaccatgaagaagcaagacgaaaacacacaggagggaaaatcctgggattctttttctagggatgtaatacatatatttacaaataaaatgcctcatggac

SEQ ID NO: 4194 - DNA, 1559 bp, Homo sapiens
caggccagggcctacgcgaacgcccacccttaagagcgcggggacagggaactggagcgttcctcccagcccccgacgtcgcgggcccagtgtccccgtccaggctggttgggcgcacgcgcggccccactcgcccccacgcgtgcgtccccgctggtcccgcccccggccggaagttccggcggcggagctgggccgggcccgagcggatcgcgggctcgggctgcggggctccggctgcgggcgctgggccgcgaggcgcggagcttgggagcggagcccaggccgtgccgcgcggcgccatgaagggcaaggaggagaaggagggcggcgcacggctgggcgctggcggcggaagccccgagaagagcccgagcgcgcaggagctcaaggagcagggcaatcgtctgttcgtgggccgaaagtacccggaggcggcggcctgctacggccgcgcgatcccagagcgcagaagctgggacgggccgtgggtcagagtgggcacgctgagcctacgccctcatgcggctggcccggccttggtccctagacccggaacccgctggtggccgtgtattacaccaaccgggccttgtgctacctgaagatgcagcagcacgagcaggccctggccgactgccggcgcgccctggagctggacgggcagtctgtgaaggcgcacttcttcctggggcagtgccagctggagatggagagctatgatgaggccatcgccaatctgcagcgagcttacagcctggccaaggagcagcggctgaacttcggggacgacatccccagcgctcttcgaatcgcgaagaagaagcgctggaacagcattgaggagcggcgcatccaccaggagagcgagctgcactcctacctctccaggctcattgccgcggagcgtgagagggagctggaagagtgccagcgaaaccacgagggtgatgaggacgacagccacgtccgggcccagcaggcctgcattgaggccaagcacgacaagtacatggcggacatggacgagcttttttctcaggtggatgagaagaggaagaagcgagacatccccgactacctgtgtggcaagatcagctttgagctgatgcgggagccgtgcatcacgcccagtggcatcacctacgaccgcaaggacatcgaggagcacctgcagcgtgtgggtcattttgaccccgtgacccggagccccctgacccaggaacagctcatccccaacttggctatgaaggaggttattgacgcattcatctctgagaatggctgggtggaggactactgaggttccctgccctacctggcgtcctggtccaggggagccctgggcagaagcccccggcccctatacatagtttatgttcctggccaccccgaccgcttcccccaagttctgctgttggactctggactgtttcccctctcagcatcgcttttgctgggccgtgatcgtccccctttgtgggctggaaaagcaggtgagggtgggctgggctgaggccattgccgccactatctgtgtaataaaatccgtgagcacg

SEQ ID NO: 4195 - DNA, 1847 bp, Homo sapiens
atcctgagcttcgtgagttgagcgctgctgctccgcggtggagtcaccgcaccgctcccgggatcatggtgttctacttcaccagcagcagcgttaattcatctgcctacactatttacatgggaaaagataaatatgaaaatgaagatctgatcaagcatggctggcctgaagatatctggtttcatgtggacaaactctcttcggctcatgtataccttcgattacataagggagagaatatagaagacatcccaaaggaagtgctgatggactgtgcccaccttgtgaaggccaatagcattcaaggctgcaagatgaacaacgttaatgtggtatatacgccgtggtctaacctgaagaaaacagctgacatggatgtggggcagataggctttcacaggcagaaggatgtaaaaattgtgacagtggagaagaaagtaaatgagatcctgaaccgattagaaaagaccaaagtcgagcggttcccagacctagcagcagagaaagaatgcagagatcgtgaagagaggaatgagaaaaaagcccaaattcaggaaatgaaaaagagagaaaaagaagaaatgaagaagaagagggaaatggatgaacttaggagctattcatcactaatgaaagttgaaaatatgtcttcaaatcaggatggcaatgattcagatgaattcatgtaaaaggagaaaaggagaaaaggacctttgaaagatgtgaatgtagagacaattgcagaccttttggtttcatctgtgttctgaaatataaaatacaaccaaaattctaccttcatcctacccagaaattattgattttcaagttttaaaaaaattgtaccttttttgctgacagaaaaggatcagatatgtataaaatagttgaacttgacagcatataacttaaagtgaaaatgtttttgccagaacatgtcttggtaccttgtgaaagcaggctgcccttgttcttgagatagactttaaaatgaaccagctctgaaaagtacttctgctgctctggtctatccctgaaaacagatgtcttgaaacacttttcatattcttaaaataatcttcacttctgttaagaagaacatgttggtgggtaattatgcgaatgtttccctgtccctgatttctcgattaggcgtatgggttttgaaaaagagatttttcagaagattgtcagcttcagtattcatgttccatcgtgtcatctgggtctgttagtgtagtgaccctcagtgcagtctgtcccagcgtttacgtccttgcttcctctgagcagaggcctccatcttagtatcaacatatttaaagaaattgatggtgttcatcaagctggggcctgtggcagttgttgcctgagcaccaagtaacccaagccacctatgtgacaacttctgggcccaggagtaatttctcagcattgagggtaaaataggatggagtgctctgttgatcatttgggagatgtaggttacctgatttgtgccttaggatgcagcgtgaagcagaagtccatattgcaattatgattttagaaggaactaagcattttactcacacccacagcagcaagaatgacctcctgcagcagatattccacctgtaatagcactttggaactgtgggcaaaaccaaaaggctagtgtttccatttattccatgttggtgtatggggttgaactggaaaattccctgaggcaaaactcactggccaaattttgagagggtatagaaaatgactttagagatgagtggttttgtgtatgtgtctgatgatattcagtctgatgttccgcaattttaaaagttataataaaataccattttttt

SEQ ID NO: 4196 - DNA, 835 bp, Homo sapiens
acagcctgcggcgcagcggaggcggaccgcagtcgagtctgcagagtgttgggtctgtagccagcaaattacttcatcatctagattatccattcagttgatcctaattagcaaggataacaagaatcgtccgcactaaagtcccctgcagcgtgaccatgtcgagaccccggaagaggctggctgggacttctggttcagacaagggactatcaggaaaacgcaccaaaactgagaactcaggtgaggcattagctaaagtggaggactccaaccctcagaagacttcagccactaaaaactgtttgaagaatctaagcagccactggctgatgaagtcagagccagagagccgcctagagaaaggtgtagatgtgaagttcagcattgaggatctcaaagcacagcccaaacagacaacatgctgggatggtgttcgtaactaccaggctcggaacttccttagagccatgaagctgggagaagaagccttcttctaccatagcaactgcaaagagccaggcatcgcaggactcatgaagatcgtgaaagaggcttacccagaccacacacagtttgagaaaaacaatccccattatgacccatctagcaaagaggacaaccctaagtggtccatgaagagtttgattttgttttgagcctggaggaaaaggaaccaagttaactgagatactgctgctggaatgggcgagacattgctgcaaagaagtcaagcttttttcagacaaaaggtgtgagggggcttgcttggtatgcttacctgggcttgtgtacctcagtggtttttgtgtacttttttcaataaaatatcaaa

SEQ ID NO: 4197 - DNA, 1562 bp, Homo sapiens
taacttacaagaaaagggctgggttttgaaaataacacaggctctaaaaaccctaagaagcggtgcaacttttggcaggaatcggggttagcgggacctcaagggctcactgcggctaagtgaacgctgactggtcctccagcgtgagctagaacagacgtctctatggtcaagtaaacagagcgtgtgctgtcttccccatgtggtggggttgcgcatgatcagtagctgcaccactagaaagatggcggagcaagagcaaagaaaaatccctttggttccagaaaatctcctgaaaaagaggaaggcttatcaagccctcaaagccacccaggcaaagcaggcacttttggcaaagaaggagcagaagaaaggaaaagggctcaggtttaagcgactggaatcattcctacatgattcctggcggcagaaacgtgacaaggtgcgtctcagacgactagaagtgaaacctcatgccttggaattgccagataaacattccttggcctttgttgtacgcatcgaaaggattgacggcgtgagtttactggtgcagagaaccattgcaagacttcgcctaaagaaaatttttagtggtgtctttgtaaaagtcaccccccagaatctaaaaatgctgcgtatagtggaaccttatgtgacctggggatttccaaatctgaagtctgtccgagaactcattttgaaacgtggacaagccaaggtcaagaataagaccatccctctgacagacaatacagtgattgaggagcacctggggaagtttggcgtcatttgcttggaagacctcattcatgaaattgccttcccagggaagcatttccaggagatctcatggttcttgtgccctttccacctctcagtggcccgtcatgctaccaaaaatagagtgggcttcctcaaggagatgggcacacctggctatcggggtgaacgcatcaatcagctcatccgtcagctgaactagacccaggtgaggcagggctgaaaactgcccttgggctgacttttgataggccatgccttgccactttacaagttctttttgcatttactagtatttaagagtaaccttgagattgggaggaatagaggaggctggtacaaatagatggagacctgctgggatcagtgaatgcctgattaggacatggggctatgcatagcctaagagttataggcttaaagatgtcgagtaactaaaaactgtattgctggccgggcgcggtggctcacgcctgtaatcccagcactttgggaggccaaggcgggcagaccatgaggtcaggagattgagaccatcctggccaacatggtgaaaccctgtctctactaaaaatacaaaaatgagctgggtgtggtggcgcgtgcctgtagtcccagctactcgagaggctaaggcaggaaaatcgcttgaacccaggaggcagagattgcagtgagccaagattgcaccagtgcactccagctgggcgacagagcgagactccatctcggaaaaaaaaaaaaaaaaactattgctgcagtcattcagatggaaatga

SEQ ID NO: 4198 - DNA, 6060 bp, Homo sapiens
atctcactgaggaccaacctttcgacattcttcagaaatccttgcaagaggccaatatcactgaacagacattggcagaagaggcatatttggatgccagtataggttcaagccaacagtttgcacaagctcagcttcatccttcttcatcagcatcctttactcaggcttctaatgtttctaattactcaggtcagacgctgcagcctataggggtgacgcatgtgcctgttggagcatcgtttgcaagcaatacagtgggtgtacaacatggctttatgcaacatgtggggatcagtgttcccagccagcatttgtctaatagcagtcagattagtggttctggtcaaatacagttaattgggtcatttggtaatcatccttccatgatgactattaataacctagatggatctcaaatcatattaaagggcagcgggcagcaagccccatcaaatgtgagtggagggctcctggttcatagacagactcctaatggcaactccttgtttgggaactctagttccagtccagtagcacagcctgttaccgttccatttaacagcacaaattttcaaacatctttacctgtgcataacatcatcatacaaaggggtcttgcaccaaattcaaataaagtcccaattaatatacagccaaagcctatccagatgggtcagcaaaatacatacaatgtgaacaatttgggaattcagcagcaccacgtacaacaagggatctcttttgcttctgcaagctcaccccagggctcagtagttggtccacacatgtctgtgaacattgtaaaccaacagaacacaagaaagccagtcacctcacaggcagtgagcagcactgggggcagtattgttattcattcccccatgggccaacctcacgcaccccaaagtcagttccttatacctacaagcctttctgtcagttccaactcggtacaccacgtccagactataaatgggcaacttcttcaaactcaaccctctcagctcatttctggccaagtggcctcagagcatgtcatgttgaacagaaactcttccaacatgctcaggaccaaccaaccatatactggaccgatgcttaacaaccagaatactgctgtccacttagtgtctgggcagacatttgctgcctctggaagtccagtgatagccaatcatgcctctcctcagcttgtgggtggacagatgcccttgcagcaggcatccccaactgtattacacctgtcacctgggcagagcagcgtttcccaaggaagacctggcttcgccaccatgccatcggtgacaagcatgtcaggacctagtcggttccctgctgtcagctcagccagcactgcccatcctagtcttgggtctgcagttcagtctggttcatcaggatcaaactttacaggagatcagctgacccagccaaacaggactccagtaccagtcagtgtgtctcatcgtcttccagtttcttcttccaagtctaccagcaccttcagtaacacacctggaacaggaacccagcaacaattcttctgccaggctcagaaaaaatgtctgaatcagacttcccccatttctgctcccaagaccacagacggcctgaggcaagcacagatccctgggctcttgagcaccacactgccagggcaggattctggaagcaaagttatatccgcatccttaggaaccgcacaaccacagcaggaaaaagtagttggatcatctcctggccatccagctgtgcaggtggagagtcattcgggaggacaaaaaaggcctgctgcgaaacagctaacgaaaggagctttcattctccagcagttgcagagggaccaagcccacactgtgacaccagacaaaagtcacttccgatcactaagtgatgcggtacagagactgctctcctaccacgtgtgccagggctccatgcccactgaagaagacttgagaaaagtggacaatgaatttgagacagttgccactcagctcctaaaaaggacccaagctatgcttaacaaatacagatgcctgctcctagaagatgccatgcgaatcaatccctctgctgagatggtgatgatcgataggatgttcaaccaggaggaaagagcttccctgtcccgagacaagcgtttggcacttgtagaccctgagggttttcaggctgatttctgttgttccttcaaacttgataaagctgctcatgagacacagtttggccggagtgaccagcatggcagtaaagcaagcagctctctgcaaccgccagccaaggcccaaggcagagaccgagccaaaaccggtgtgacggaacccatgaatcatgaccagtttcatctagtgcctaatcacatcgtggtctctgcagaaggaaacatttctaaaaaaacagaatgccttggcagagcactgaaatttgacaaagtgggcttagtgcagtaccagagcacgtctgaagagaaggccagccggagagagcctctgaaggccagtcagtgctctcccggccctgaggggcaccggaaaacctcatccagatcggatcatggtactgagagcaaactgtcaagcatcctagcagattcgcacttggagatgacgtgtaacaattccttccaggacaaaagtctgaggaattctccaaagaatgaagttttacacacagacatcatgaaagggtcaggcgaaccccagccagatctccagctgacaaagagcttggaaaccacatttaagaacatcttggaactcaaaaaggcgggacggcagccccagagtgaccccacggttagcggctctgttgagttagatttccccaacttttctcctatggcttcacaggaaaactgcctggaaaagttcatcccggaccacagtgaaggtgttgtagaaactgactccattttagaagcagctgtaaatagtatcctagagtgttaatagcagcagtcctccccctaccccgccccgagaccccaccccgagaccccaccccggaccagttacattcgttcctggcaaaagcaaatggaaatggtctcctgtctccagcctgcttgatctttcatcacaggttattctttctaatctcaatcctgttctttgtttaagagcaatacttgtcgtgattacagggagatcctttagtaaaattaatccttggcagaaagcagtctgataggccccactcatttcaagtgttatgaaagtgcttataggcattttgtttatttgttttgttttttaaaaacactgtaactcaatgagaccacagtatacttggcccttggtaaaattttgacaatcataagtcatttgaaaagaacagacttactaaaatcaaacgagacggatagaagctactttttaaagaatatcccactgcatctgcaaatttagttttgggtttttttattattattattttgagtttttttgtgtgtgttttgttgttattgttgaggggaagaccacatggttcttccccctcagccatctttgagcagtaaattgctggctgtgctgccagggacccgcagccctggtggaaaagccagtagcacatacgcagggcattgcagggcttccctattgatggttcaagtgcttttctgatgcttccggagcaaaacctcatgcttttaggcatatctatgttgaatttcacctagggaatgttctgttcttagttacagcagcaaaatttgaaataatttcaccaggctaaataaaggaaaatggaaaccagttaagaggcacagtgtacagaggaggccgggatagagccatgagggttataatattaatatgtatatatgtaaaagcatatatatgttaactattgagaaaaaacaagttttgcattttataattggatatagtcaacatataatgtatgtttttgtttgttgctggattttgtttcatttaacctctctttgcaccctctcccacaacaaataccaagcatcaaaagcactttcatttgaaaattattatgttgtaatttttcagtttaaactttaaggagactctggccttgtttatgcttcttgtctgagaacagtagtgacccctggcagcaattcattaccaaaacacagacaaaccaaaggtaaccagctagcccaccactgaaaggaaagatctgagacatgggattcccatttgagagccaaaggatatgccctgtcatggtttctgtttggcctgtgttcatattagtgagcatggcttactgctttatttatttttatttcttgtcagggagtattctccgttttcctttctcgtatacctgccccaggttatcccatttctgttgttacctttattcttaatgtcattgtaaccatcacttatctcctctcattgggaaagctacatgatagtatttttatgcactcttctcccacacatacacacacgtgcatgtatctgagctgctcggatccagaggtcatttttgttacagtgtgtgcacactcactctccttcttagtgtgcatactctctcatttattctgtttatctccctggctctggaggtgcagccactggtcttcactttaatgtgttgccagaatctgcttctggctgtcgccaacatggggatgacccccattgtcatcatgttgggcatttcttttccagattggcctgtgatggaaaggaaggcttctaattagaaaacacagcaacagaagacctataccccggtgcccctgtgtcccactacacacagaaaaccctgtgagatggccagtcttcataatagcaacgtaccttcaccccagccacatgccccagccaatacaaattggaaaatctggcccattttagggttaccattttttccttatttgtgccaatgtccaagttgcagatttcccctttttcctgtattgtaacatattagataagttggtgtcgccagttggtactttctgtttgggtagtcctagggtaacaccctgccctaaactccatgatttcataggcttttcttcccttggggctcatgctcccctaattcctagcaagatgatccttcctaatcaaattcttctcattgcagaactttatccctggaagccttcatgtgggctgctagtgagttacattaattactgcaaatcagtggaattctcaagagacaagataagcttcatgtacatttgtcacctctctttcttccctatcctgccctgctgtcccaatcctagcttttctatataccatcctaaagggtttttaagccctaacacttgtctagcaaatggagagcctaatttaccaaaatgaaacttgtaaatttttgtgtcattgtatgtaagtttactttttatggaggaaggattctagataatgacaaatgaagattatgacatgtatttcactcctgtgattaggttctacgcacatgggtcataactcgcatgtcgagccccctctagtgaagggtaggagagctcagcctcggatggccaacattcagttgttcaggttcattcgtcaaagttaagttttagaactatttgtactcagtaacaaaaatcattttctttttttttttttttttctgttgtggaaaagcgtgaatttgttattaagcatttgattttctgtgtccttaagtacttcctgaagatgaagcaaaattttaatctggcaattatgaaaaagaaatattttagctctgaaggatttagtagattctgttagattagggaggccttacagactgactttacttaaagaggacgcgtcactcgctgtcagtgtggtgtgggctttatttgcttaaataccttcatttgtatagtacgtctcacttgaaattgctttgtatacattttgtaaaaatatttataaaatgttttgtaaaaaaaaaaaaactataacaaattgcagtttattttgttatgttggataaatactgttaaaagaaaccagtcagtaactatattgttaatccatggttaggaaatgtttagttggagattacaaattgaaacaaccattgcaatacagccaaagatttggg

SEQ ID NO: 4199 - DNA, 2894 bp, Homo sapiens
actcaccaagagaacggaattgaaatttgcatggactttctgcaaggcacttgtatttatggcagggattgtttgaagcaccacactgtcttgccatatcattggcagatcaaaaggacaactactcaaaagtggcagagtgtattcaatgattctcaggagcacttggaaagattttactgtaacccagaaaatgatagaatgagaatgaagtatggaggacaagaattttgggcagatttgaatgccatgaacgtgtatgaaacaactgaatttgaccaactacgaaggctgtccacaccaccctctagcaatgtcaactctatttaccacacagtctggaaattcttctgtagggaccactttggatggagagagtatcccgagtctgtcattcgattgattgaagaagccaactctcggggtctgaaagaggttcgatttatgatgtggaataaccactacatcctccacaattcattcttcaggagagagataaaaaggagacccctcttccgctcctgttttatactgcttccatatttacagacacttggtggggttcccacacaagctcctccacctcttgaagcaacttcatcatcacaaattatctgcccagatggggtcacttcagcaaacttttaccctgaaacttgggtttatatgcatccatctcaggacttcatccaagtccctgtttctgcagaggataaaagttatcggatcatttacaatctttttcataagactgtgcctgagtttaaatacagaattttgcagatattgagagtccaaaaccagtttctttgggagaaatataaaaggaaaaaggaatatatgaacaggaaaatgtttggccgtgacaggataataaatgagagacatttatttcatggaacatcccaggatgtggtagatggaatctgcaaacacaactttgaccctcgagtctgtggaaagcatgctacaatgtttggacaaggcagttattttgcaaagaaggcaagctactctcataacttttctaagaagtcctccaaaggagtccacttcatgtttctggccaaagtgctgacgggcagatacacaatgggcagtcatggcatgagaaggcccccgccagtcaatcctggcagtgtcaccagtgacctttatgactcttgtgtggataatttctttgagcctcagatttttgtcatttttaatgatgaccagagttacccttattttgttatccaatatgaagaagtcagtaacactgtttccatttgaaaaatcttggtactgctaaattatttgatatgaactcaatccagcatttgtagcaggttttgaatgggtgggactgggtggggaacagcattggacattaatagggcacttttcagacccattttttaaagtgctagaaaatgctttttttaaaaaaaaaatacaagttttaaaatgaccacttactctttaattatttactaattgctagtgtactcagtgtggaaaagactacagattacacactcttttcattcacacttgtacatatagacagcaatgttattaggagcattaaattaaaaaactgaacagcctaatttaaatgtggcttgggcctggtagaagtttgaccaaatggaatggaggctgtgagcaatgtgaggattctatttatttatttacgtttgataaaacttactggaactagtactaccatgcgtattccctgtccaaagcatcactgctttggtatagtataagttcatgaaattctggtgggtagaaagaaatttttatttctatcagcagtactaaaatgtatcagccaaccagagaacatcagtgactttaacttctgcagagtttgccccagaattcagagttctatttagaggaagttaaaacaacaacaaaaaacaaccatttgaaaaatttttgtcaccagcaaaacttttcactaattagtgatatgaaatgtgatttttgtgttgttaaacttcagctttggaaaactcagtctctttcattatcatccattccaatttgaaggagttgggcagctaatttggttaaaggcagtcttgagggttagaagtattacttccttttcgggttccagacctagcttgtgactgaaagttttagaaaaaggaagtacatctatagccaaattgataaggttattactgtgttttgcacaaagtatattagcaaaagtatttgctggaattattggtagatggcagtcccactcctacacctgctttgtcagatacagctgggttccctggctgactctgtaccttacttacactacttacttaatagaaacacaaacttggaaattgtgccagtggtccagctggagcacaacgtttggtgaatatgctgtttcctcagttcagagaggtagcaactaggtaaactccttataaaaagcaaatacctggatttacaaaagtgaaagtagttgttcacaaaagaattcgccatggaattctttcagttaccaagctctcctggtaatgtttgtggttatatcatttacacaaaacttttcaggaacttctgtgttgtttaagcaagatgtatctgtactgatgtctcagtgaatcagtctgtttattaagcacttatcagggcttccacacacttatttattttgccctagttaatcctgttgtttgctgccattggcatgaaatggccaactgtggctgttacagttctttcattcaattataacttgtaaaccagtgactcctaatctttttcaagttaagacaccttaccattgcttatttggttttatgagacttgttcctttttttctccctaaggaaaaagaaagctttatgacatatttatttttttaataaaactaagcaaaaataaaa

SEQ ID NO: 4200 - DNA, 2002 bp, Homo sapiens
  misc_feature (89)..(112): n is a, c, g, or t
agagccgagtgggacaaagcctggggctgggcgggggccatggcgctgccatcccgaatcctgctttggaaacttgtgcttctgcagannnnnnnnnnnnnnnnnnnnnnnnggttcctgggtacccgccgctgctggcagctccgtggtgttcgagtccgccgtgagcttggaagcgggcgcccgggcggtgctgcgctgccagatcccgcgcatggtgtggacccaggaccggctgcacgaccgccagcgcgtgctccactgggacctgcgcggccccgggggtggccccgcgcggcgcctgctggacttgtactcggcgggcgagcagcgcgtgtacgaggcgcgggaccgcggccgcctggagctctcggcctcggccttcgacgacggcaacttctcgctgctcatccgcgcggtggaggagacggacgcggggctgtacacctgcaacctgcaccatcactactgccacctctacgagagcctggccgtccgcctggaggtcaccgacggccccccggccacccccgcctactgggacggcgagaagtaggtgctggcggtggcgcgcggcgcacccgcgcttctgacctgcgtgaaccgcgggcacgtgtggaccgaccggcacgtggaggaggctcaacaggtggtgcactgggaccggcagccgcccggggtcccgcacgaccgcgcggaccgcctgctggacctctacgcgtcgggcgagcgccgcgcctacgggcccctttttctgcgcgaccgcgtggctgtgggcgcggatgcctttgagcgcggtgacttctcactgcgtatcgagccgctggaggtcgccgacgagggcacctactcctgccacctgcaccaccattactgtggcctgcacgaacgccgcgtcttccacctgacggtcgccgaaccccacgcggagccgcccccccggggctctccgggcaacggctccagccacagcggcgccccaggcccagaccccacactggcgcgcggccacaacgtcatcaatgtcatcgtccccgagagccgagcccacttcttccagcagctgggctacgtgctggccacgctgctgctcttcatcctgctactggtcactgtcctcctggccgcccgcaggcgccgcggaggctacgaatactcggaccagaagtcgggaaagtcaaaggggaaggatgttaacttggcggagttcgctgtggctgcaggggaccagatgctttacaggagtgaggacatccagctagcctcctctcctcccacagattacaaaaacaacatcctgaaggagagggcggagctggcccacagccccctgcctgccaagtacatcgacctagacaaagacccttctgggctctgcccgctgggggcctgaagacattcctggaggacactcccatcagaacctggcagccccaaaactggggtcagcctcagggcaggagtcccactcctccagggctctgctcgtcgggggctgggagatgttcctggaggaggacactcccatcagaacttggcagccttgaagttggggtcagcctcggcaggagtcccactcctcctggggtgctgcctgccaccgagagctcccccacctgtaccaccatgtgggactccaggcaccatctgttctccccagggacctgctgacttgaatgccagcccttgctcctctgtgttgctttgggccacctggggctgcaccccttgccctttctctgccccatccctaccctagccttgctctcagccaccttgatagtcactgggctccctgtgacttctgaccctgacacccctcccttggactctgcctgggctggagtctagggctggggctacatttggcttctgtactggctgaggacaggggagggagtgaagttggtttggggtggcctgtgttgccactctcagcaccccacatttgcatctgctggtggacctgccaccatcacaataaagtccccatctgattttt

SEQ ID NO: 4201 - DNA, 646 bp, Homo sapiens
gagtgttcgggacgccggcctgcaggcgccatggtcttcctcaccgcgcagctctggctgcggaatcgcgtcaccgaccgctactttcggatccaggaggtgctgaagcacgccaggcacttccggggaaggaaaaatcgctgctacaggttggcggtcagaaccgtgattcgagcctttgtgaaatgcaccaaagcccgatacctgaagaaaaagaacatgaggaccctctggattaatcgaattacagctgctagccaggaacatggactgaagtatccagcgctcattgggaatttagttaagtgccaggtggagctcaacaggaaagtcctagcggatctggccatctacgagccaaagactttcaaatctttggctgccttggccagtaggaggcgacacgaaggatttgctgctgccttgggggatgggaaggaacctgaaggcattttttccagagtggtgcagtaccactgaggactgttgctgtattgattaggaaaagagacagagtaatttgcagtttgtttgatttatacttttgtttatctacaacccaataacagacatgagggatggccctgtctctctgggacagagcctcacagatgatgtccatgttttgtgtgaatgaaactcaaac

SEQ ID NO: 4202 - DNA, 2673 bp, Homo sapiens
agagccgcgggatttgcggccgccgccatgccgtcgtccccgctgcgggtggcggtggtgtgctcgagcaaccagaaccggagcatggaggcgcacaacatcctcagcaaacggggattcagcgtccgatcctttggaacagggactcacgtgaagcttccaggaccagctcccgacaagcccaatgtttatgatttcaaaaccacatatgaccagatgtacaatgatcttcttaggaaagacaaagaactgtatcccagcgggttgccctttaaaaaccccccgtgtggtcctccctggaaggtgttacgtgtggctcgggcacaggaggcgtgtcaccctgtgcagtgcacacactggctcctctgtctttgcgagagcttggtttctattcctggtgcacgtcggatcgtccacgggttagttccagtgccacccatggcagtaggcgtggtgaggcgcacagacacggtgtggggttcaccctgacgtggttcagcagagggtcgtgacatagcgtagaccagggatgcttaggtgaggaggtggaacccacaaaatcccattgcttttcacactgcagggctgccccgttatttcctttgcaggttggtgtgcgtgcgtgtgtgcgtgcgtgcctgatacacatggagccgggctgcttcacacatctggtgaggtcgttagaaggtcagataaagaagagggcggagcttgctaaccaagctgttagaagaaataatgggagagaacattccttcatttcaggaggacacagagcaggctaggtctgccgcgaagactcctatagagagaagagtattcttaaactagattctgatggacgcaacaccagttgcataatggttatgacaatcagtgcccgggtttttgaccaggcatttcatggtcacccccacgctaatggaaagtttctggatcttattttgttatagtgagtgatttgtagttttcagaacggaggccaggccaaacgtattccaaatgaaaagagaataggtgtcaaatgctaaaccttttatcttcgtgttggcactgttgccatccccgccctctcccgacatccccgcccttgaccagcatctctggccttgcccagcattgtctatgtattggcactcttgccatccccgccctttcccagcagagtctcactgtgtcaccccggctggagtgcagtggcgagatcttggctcactgcagactcactgcaacatccacctcccgggttccagtgattctcctgcttcagcctcctgggtagctgggattacaggcacgcgccaccacacctggctaatttttgtatttttagtagtcacagggtttcaccatgttggccaggctggtcttaaactcctgacttcaggtgatccaccctcctcgtcctcccaaagtgctgggattacaggcgtgagccaccatgctcagccctactcttgtattttttttttttttttttttttgagatggagtcagagtctcaccctgttgcccaaggtggagtgtagcggcttgatctcagctcactgcaacctccccctcccaagttcaagcgattctctgcctcagcctcccgaatagctgggattacaggcatccgctgtcatgcctggctaatttttgtatttttagtagagacgggggtttcaccatcttgaccaaactggtcttgaactcttgacctcgtgatccagctgcctcggcctctcagagtgttgggattacaggcgtgagccaccatgcctggcctcttggaatatttaataagctaaaaaattcttatacacaggtagattaattaggtagccaggagtggcccctgaaagtatgtctggcaaaacctagaactgcatcctagccatcactgtaccttctgccctccctgctgtctcctctgccagttacagttaaaaggttgtgggtgaggacgctgggcagagtcccaggcgtctgctgtcagctccccagcccggcctgcctgccgagccatctgggcgtcccacggtggagagtgtggtgcttgtgacgcggtggtgctgggagccatcctggtggcagatgtgggctctcactgcaagtcagtgtaagtccccagggactgtcagcagcacgtcctgctgcccctctctctgcagaagccctggtaacctgcgtttggaaaaatctctaaggatttctgaggagctgtcaggccatgtccttgtccaccctgtgtggggcacggcttcgacatggctctgctcccgtcgtgggctgagaaggagcaggtggggctgtgccttggaaaggaggccctcccgacatgcctttgtgcgaggtccctgtccatgctgtctccatcccggagccttacggcgatgggtggccacagagcctattccaagagtctggtttagggctgggtcttcccatcttcacctctgagtcttaggcgatgcgtgaccacgcagccccttccaggagtctggtttagggctgggtcttcccatcttcacctctgagtcttaggcggtgcatgaccacgcagccccttcccggagtctggtttagggctgcgtgctcaagagtctggtttggggctgggtcttcccatcgccctggaggaggcttttgtctcatctcatgattcacattaaactctgtgccatg

SEQ ID NO: 4203 - DNA, 2199 bp, Homo sapiens
gctgtgtggcccaggcttttctcaaactcctgagggcaagcgatcctcccacctcagcctcctgagtagctgggactacaggcatgtgccactagacctggctctaaagacatatatgacacacgaaaccatttatttttcatttcacaatgtttattcacatatatggtattagtattctaatgtagtgatgcactctaaatttgcattatatttcctagaacatctgaacagagcataggaaattccctattttgccattatcagttctaacaaaaatcttaaaagcactttatcatttcatttccctgcactgtaatttttttaaatgatcaaaaacagtatcataccaaggcttacttatattggaatactattttagaaagttgtgggctgggttgtatttataaatcttgttggtcagatgtctgcaatgagtaaatttagcaccattatcaggaagctttctcaccaatgacaacttcattggaagattttaatgaaagtgtagcatactctagggaaaaaatatgaatattttagcatctatgtattgaaaattatgttgaataaatgtcagactattttttacataacgttgcttctgtttaattttgtcacgttcagaggtggggggtaggagatgtaagcccttgacagcaaaataattccttttgcttgatttcagacagttgcatcagctcctttgttctgtgttcatgttacacttatttaggtggctgaatccacagaggagcctgctggttctaatcggggacagtatcctgaggattcctcaagtgatggtttaaggcaaagggaagttcttcggaacctttcttcccctggatgggaaaacatctcaaggcctgaagctgcccagcaggcattccaaggcctgggtcctggtttctccggttacacaccctatgggtggcttcagctttcctggttccagcagatatatgcacgacagtactacatgcaatatttagcagccactgctgcatcaggggcttttgttccaccaccaagtgcacaagagatacctgtggtctctgcacctgctccagcccctattcacaaccagtttccagctgaaaaccagcctgccaatcagaatgctgctcctcaagtggttgttaatcctggagccaatcaaaatttgcggatgaatgcacaaggtggccctattgtggaagaagatgatgaaataaatcgagattggttggattggacctattcagcagctacattttctgtttttctcagtatcctctacttctactcctccctgagcagattcctcatggtcatgggggccaccgttgttatgtacctgcatcacgttgggtggtttccatttagaccgaggccggttcagaacttcccaaatgatggtcctcctcctgacgttgtaaatcaggaccccaacaataacttacaggaaggcactgatcctgaaactgaagaccccaaccacctccctccagacagggatgtactagatggcgagcagaccagcccctcctttatgagcacagcatggcttgtcttcaagactttctttgcctctcttcttccagaaggccccccagccatcgcaaactgatggtgtttgtgctgtagctgttggaggctttgacaggaatggactggatcacctgactccagctagattgcctctcctggacatggcaatgatgagtttttaaaaaacagtgtggatgatgatatgcttttgtgagcaagcaaaagcagaaacgtgaagccgtgatacaaattggtgaacaaaaaatgcccaaggcttctcatgtctttattctgaagagctttaatatatactctatgtagtttaataagcactgtacgtagaaggccttaggtgttgcatgtctatgcttgaggaacttttccaaatgtgtgtgtctgcatgtgtgtttgtacatagaagtcatagatgcagaagtggttctgctggtacgatttgattcctgttggaatgtttaaattacactaagtgtactactttatataatcaatgaaattgctagacatgttttagcaggacttttctaggaaagacttatgtataattgctttttaaaatgcagtgctttactttaaactaaggggaactttgcggaggtgaaaacctttgctgggttttctgttcaataaagttttactatgaatgac

SEQ ID NO: 4204 - DNA, 1572 bp, Homo sapiens
gaggagcagagcatgtttgggacataacaaaggatctgagtagtaaacaccgtacgccacccaactcctcttgtaacgccatcgcgcgtggcattgtgttgggttctgcgtgtgtggcatcggagtcgtggaatttagggggaacaaggcttttccccccgtccccccggggtctcccttgggtgggggcgacacggccaaggcggcgcgccctgggggtgcccgggggcgcttcttccccagggcgttacgcaccggcggcccggcgcggaggagctactctcctcctggtgaggtggaaattccagcaagaatagaggtgaagacaagccaccaggactcaggagggaaacgctgaccattagaaacctctgcataagacgttgtaaggaggaaaataaaagagagaaaaacacaaagatttaaacaagaaacctacgaacccagctctggaaagagccaccttctccaaaatggatatgtttcctctcacctgggttttcttagccctctacttttcaagacaccaagtgagaggccaaccagacccaccgtgcggaggtcgtttgaattccaaagatgctggctatatcacctctcccggttacccccaggactacccctcccaccagaactgcgagtggattgtttacgcccccgaacccaaccagaagattgtcctcaacttcaaccctcactttgaaatcgagaagcacgactgcaacttgctgtctgcttggaaaatttcactcacaagccgcagctttgcctgactcagtgcaatccaaggccaccatctctggtgaacttcccttgactcctccctccagccacttgcagaaatgcaaatcctgggcacccacaggctgtttgggggcctgtatagaagctgtgggcagaaaccagaggccactgtggtactgctggactcctgcagccaaaggacaaaagggcgagactacgggccgtctgggcaaacagagagaagccactttattccctgtggagtggaggatgctaggatgttgctgctccggcagacagaggcctttcgcttgagtcatcagccaacagactgaatgttatggttttagaaacccatacacaaagttgagtggttttttccatttctaaaatttaaaatgtatgtatttttaaaacacccacctgcatgtaatacacagcttgttcaggagttctcaaacagccccagcacccaccccatcccagaggctcaaccaaataaaaccaaaaccaggaggctgggtccttttaagcactggtaatttctacctgtaattccagccctttgggaggccgaggcaggcaggtcacctgaggtcaggagttcgagaccagcctggtcaacatggtgaaaccccgtctctactaaaaatacaaaaaaaattagccaagcttggtggtgcgtgcctgtaatctcagctactctggaggctgaggcaggagaatcacttgaacctgggaggcagaggctgcagtgagctgagattgtgccactgcactccggcctgggtgaaagagtgagactctgtctcaaaaaaaaaaaaaaaa

SEQ ID NO: 4205 - DNA, 2730 bp, Homo sapiens
atggatatgtttcctctcacctgggttttcttagccctctacttttcaagacaccaagtgagaggccaaccagacccaccgtgcggaggtcgtttgaattccaaagatgctggctatatcacctctcccggttacccccaggactacccctcccaccagaactgcgagtggattgtttacgcccccgaacccaaccagaagattgtcctcaacttcaaccctcactttgaaatcgagaagcacgactgcaagtatgactttatcgagattcgggatggggacagtgaatccgcagacctcctgggcaaacactgtgggaacatcgccccgcccaccatcatctcctcgggctccatgctctacatcaggttcacctccgactacgcccggcagggggcaggcttctctctgcgctacgagatcttcaagacaggctctgaagattgctcaaaaaacttcacaagccccaacgggaccatcgaatctcctgggtttcctgagaagtatccacacaacttggactgcacctttaccatcctggccaaacccaagatggagatcatcctgcagttcctgatctttgacctggagcatgaccctttgcaggtgggagagggggactgcaagtacgattggctggacatctgggatggcattccacatgttggccccctgattggcaagtactgtgggaccaaaacaccctctgaacttcgttcatcgacggggatcctctccctgacctttcacacggacatggcggtggccaaggatggcttctctgcgcgttactacctggtccaccaagagccactagagaactttcagtgcaatgttcctctgggcatggagtctggccggattgctaatgaacagatcagtgcctcatctacctactctgatgggaggtggacccctcaacaaagccggctccatggtgatgacaatggctggacccccaacttggattccaacaaggagtatctccaggtggacctgcgctttttaaccatgctcacggccatcgcaacacagggagcgatttccagggaaacacagaatggctactatgtcaaatcctacaagctggaagtcagcactaatggagaggactggatggtgtaccggcatggcaaaaaccacaaggtatttcaagccaacaacgatgcaactgaggtggttctgaacaagctccacgctccactgctgacaaggtttgttagaatccgccctcagacctggcactcaggtatcgccctccggctggagctcttcggctgccgggtcacagatgctccctgctccaacatgctggggatgctctcaggcctcattgcagactcccagatctccgcctcttccacccaggaatacctctggagccccagtgcagcccgcctggttagcagccgctcgggctggttccctcgaatccctcaggcccagcccggtgaggagtggcttcaggtagatctgggaacacccaagacagtgaaaggtgtcatcatccagggagcccgcggaggagacagtatcactgctgtggaagccagagcatttgtgcgcaagttcaaagtctcctacagcctaaacggcaaggactgggaatacattcaggaccccaggacccagcagccaaagctgttcgaagggaacatgcactatgacacccctgacatccgaaggtttgaccccattccggcacagtatgtgcgggtatacccggagaggtggtcgccggcggggattgggatgcggctggaggtgctgggctgtgactggacagactccaagcccacggtagagacgctgggacccactgtgaagagcgaagagacaaccaccccctaccccaccgaagaggaggccacagagtgtggggagaactgcagctttgaggatgacaaagatttgcagctcccttcgggattcaattgcaacttcgatttcctcgaggagccctgtggttggatgtatgaccatgccaagtggctccggaccacctgggccagcagctccagcccaaacgaccggacgtttccagatgacaggaatttcttgcggctgcagagtgacagccagagagagggccagtatgcccggctcatcagcccccctgtccacctgccccgaagcccggtgtgcatggagttccagtaccaggccacgggcggccgcggggtggcgctgcaggtggtgcgggaagccagccaggagagcaagttgctgtgggtcatccgtgaggaccagggcggcgagtggaagcacgggcggatcatcctgcccagctacgacatggagtaccagattgtgttcgagggagtgatagggaaaggacgttccggagagattgccattgatgacattcggataagcactgatgtcccactggagaactgcatggaacccatctcggcttttgcagatgaatacgaggtggactggagcaattcttcttctgcaacctcagggtctggcgccccctcgaccgacaaagaaaagagctggctgtacaccctggatcccatcctcatcaccatcatcgccatgagctcactgggcgtcctcctgggggccacctgtgcaggcctcctgctctactgcacctgttcctactcgggcctgagctcccgaagctgcaccacactggagaactacaacttcgagctctacgatggccttaagcacaaggtcaagatgaaccaccaaaagtgctgctccgaggcatga

SEQ ID NO: 4206 - DNA, 1786 bp, Homo sapiens
atggatatgtttcctctcacctgggttttcttagccctctacttttcaagacaccaagtgagaggccaaccagacccaccgtgcggaggtcgtttgaattccaaagatgctggctatatcacctctcccggttacccccaggactacccctcccaccagaactgcgagtggattgtttacgcccccgaacccaaccagaagattgtcctcaacttcaaccctcactttgaaatcgagaagcacgactgcaagtatgactttatcgagattcgggatggggacagtgaatccgcagacctcctgggcaaacactgtgggaacatcgccccgcccaccatcatctcctcgggctccatgctctacatcaggttcacctccgactacgcccggcagggggcaggcttctctctgcgctacgagatcttcaagacaggctctgaagattgctcaaaaaacttcacaagccccaacgggaccatcgaatctcctgggtttcctgagaagtatccacacaacttggactgcacctttaccatcctggccaaacccaagatggagatcatcctgcagttcctgatctttgacctggagcatgaccctttgcaggtgggagagggggactgcaagtacgattggctggacatctgggatggcattccacatgttggccccctgattggcaagtactgtgggaccaaaacaccctctgaacttcgttcatcgacggggatcctctccctgacctttcacacggacatggcggtggccaaggatggcttctctgcgcgttactacctggtccaccaagagccactagagaactttcagtgcaatgttcctctgggcatggagtctggccggattgctaatgaacagatcagtgcctcatctacctactctgatgggaggtggacccctcaacaaagccggctccatggtgatgacaatggctggacccccaacttggattccaacaaggagtatctccaggtggacctgcgctttttaaccatgctcacggccatcgcaacacagggagcgatttccagggaaacacagaatggctactatgtcaaatcctacaagctggaagtcagcactaatggagaggactggatggtgtaccggcatggcaaaaaccacaaggtatttcaagccaacaacgatgcaactgaggtggttctgaacaagctccacgctccactgctgacaaggtttgttagaatccgccctcagacctggcactcaggtatcgccctccggctggagctcttcggctgccgggtcacagatgctccctgctccaacatgctggggatgctctcaggcctcattgcagactcccagatctccgcctcttccacccaggaatacctctggagccccagtgcagcccgcctggttagcagccgctcgggctggttccctcgaatccctcaggcccagcccggtgaggagtggcttcaggtagatctgggaacacccaagacagtgaaaggtgtcatcatccagggagcccgcggaggagacagtatcactgctgtggaagccagagcatttgtgcgcaagttcaaagtctcctacagcctaaacggcaaggactgggaatacattcaggaccccaggacccagcagccaaaggtaggctgttcttggaggcctctgtaacgttaccctcaacagggaggctaagtgtggtacagggagttgagactgatgatgtcccatctaaacagtcgtcatccaactcctgaaatccaataaaacaaatatcgtttgagagatt

SEQ ID NO: 4207 - DNA, 3350 bp, Homo sapiens
atggatatgtttcctctcacctgggttttcttagccctctacttttcaagacaccaagtgagaggccaaccagacccaccgtgcggaggtcgtttgaattccaaagatgctggctatatcacctctcccggttacccccaggactacccctcccaccagaactgcgagtggattgtttacgcccccgaacccaaccagaagattgtcctcaacttcaaccctcactttgaaatcgagaagcacgactgcaagtatgactttatcgagattcgggatggggacagtgaatccgcagacctcctgggcaaacactgtgggaacatcgccccgcccaccatcatctcctcgggctccatgctctacatcaggttcacctccgactacgcccggcagggggcaggcttctctctgcgctacgagatcttcaagacaggctctgaagattgctcaaaaaacttcacaagccccaacgggaccatcgaatctcctgggtttcctgagaagtatccacacaacttggactgcacctttaccatcctggccaaacccaagatggagatcatcctgcagttcctgatctttgacctggagcatgaccctttgcaggtgggagagggggactgcaagtacgattggctggacatctgggatggcattccacatgttggccccctgattggcaagtactgtgggaccaaaacaccctctgaacttcgttcatcgacggggatcctctccctgacctttcacacggacatggcggtggccaaggatggcttctctgcgcgttactacctggtccaccaagagccactagagaactttcagtgcaatgttcctctgggcatggagtctggccggattgctaatgaacagatcagtgcctcatctacctactctgatgggaggtggacccctcaacaaagccggctccatggtgatgacaatggctggacccccaacttggattccaacaaggagtatctccaggtggacctgcgctttttaaccatgctcacggccatcgcaacacagggagcgatttccagggaaacacagaatggctactatgtcaaatcctacaagctggaagtcagcactaatggagaggactggatggtgtaccggcatggcaaaaaccacaaggtatttcaagccaacaacgatgcaactgaggtggttctgaacaagctccacgctccactgctgacaaggtttgttagaatccgccctcagacctggcactcaggtatcgccctccggctggagctcttcggctgccgggtcacagatgctccctgctccaacatgctggggatgctctcaggcctcattgcagactcccagatctccgcctcttccacccaggaatacctctggagccccagtgcagcccgcctggttagcagccgctcgggctggttccctcgaatccctcaggcccagcccggtgaggagtggcttcaggtagatctgggaacacccaagacagtgaaaggtgtcatcatccagggagcccgcggaggagacagtatcactgctgtggaagccagagcatttgtgcgcaagttcaaagtctcctacagcctaaacggcaaggactgggaatacattcaggaccccaggacccagcagccaaagctgttcgaagggaacatgcactatgacacccctgacatccgaaggtttgaccccattccggcacagtatgtgcgggtatacccggagaggtggtcgccggcggggattgggatgcggctggaggtgctgggctgtgactggacagactccaagcccacggtagagacgctgggacccactgtgaagagcgaagagacaaccaccccctaccccaccgaagaggaggccacagagtgtggggagaactgcagctttgaggatgacaaagatttgcagctcccttcgggattcaattgcaacttcgatttcctcgaggagccctgtggttggatgtatgaccatgccaagtggctccggaccacctgggccagcagctccagcccaaacgaccggacgtttccagatgacaggaatttcttgcggctgcagagtgacagccagagagagggccagtatgcccggctcatcagcccccctgtccacctgccccgaagcccggtgtgcatggagttccagtaccaggccacgggcggccgcggggtggcgctgcaggtggtgcgggaagccagccaggagagcaagttgctgtgggtcatccgtgaggaccagggcggcgagtggaagcacgggcggatcatcctgcccagctacgacatggagtaccagattgtgttcgagggagtgatagggaaaggacgttccggagagattgccattgatgacattcggataagcactgatgtcccactggagaactgcatggaacccatctcggcttttgcaggtgagaattttaaagggggcaccctcctgccagggaccgagcccacagtggacacggtgcccatgcagcccatcccagcctactggtattacgtaatggccgccgggggcgccgtgctggtgctggtctccgtcgcgctggccctggtgctccactaccaccggttccgctatgcggccaagaagaccgatcactccatcacctacaaaacctcccactacaccaacggggcccctctggcggtggagcccaccctaaccattaagctagagcaagaccgtggctcgcactgctgagggccgaagcaagaacagcacccaaaacaaacgagaaagactgcaaacatgttgcctcgattttgcacttttttctcctcgcctagtttctgtgtgaactctcagacatctctttcccggatccccaaccctgagcactcttatcaatcccaaccatcctccttgggttcattttggtttctggtttttctttttcctttttgttgattccaaaccaacaaacccaactctaatgctgcatcttggactatccgaagagatccacccccaagcactccacaactcaaggctcagctggttttgttccagagactggttcgcttgttttttccccttgccttatcccatacctcctctcagtgggcagtctgccaggagacgtgaggggaagcctggatctgtgtgtatgtacatagtagacatgtgtgtgtgtgaatagctctctgtgtgtgggtgtgtgagagagcggctggttcattgtgtgtgtgtttgggcgaggggtgagtgttcagagagggcccctttaactcttatgttacttctcctggggtacattttacaagaaaataatatactgtacaagttttgtttacttggagaagagattgaagctttttgttgccttatct

SEQ ID NO: 4208 - DNA, 2601 bp, Homo sapiens
tcgatcgtgtcagtttgtaaggcgagggcggaagttggattcctggcctgagaatattaggcgtagttttccagtttttggcaaagcggaaatacttaaggcccctgggttgactgggttctttgttttatctaccggcttctgctttacgacaggtcacaaacatgtcagacaaaagtgaattaaaggctgagttggaacgtaagaagcagcgactggcccaaatcagagaggaaaagaagagaaaagaagaagaaaggaaaaaaaaagaaacagaccagaagaaggaagctgttgctcctgtgcaagaagaatcagatcttgaaaaaaaaaggagagaagctgaagcattgcttcaaagcatggggctaactccagaatcccccattgttttttctgaatactgggtccctcctcctatgtctccatcctccaaatctgtgagcactccaagtgaagctggaagccaagactctggagatggcgccgtgggatctaggacgctgcattgggatacagatccatcagttcttcagcttcactcagattccgatttgggacgaggacctattaaacttggaatggctaaaatcacgcaagtcgactttcctcctcgagaaattgtcacgtatacaaaggaaactcagactccagttatggctcaacccaaagaagatgaagaggaagatgatgatgtagtggctcctaaaccacctattgaacctgaagaagagaaaactttaaagaaagatgaggaaaatgatagtaaagctccccctcatgagctgactgaagaagaaaagcaacaaatcttgcactctgaggaatttttaagtttctttgaccattctacaagaattgtagaaagagctctttctgagcagattaacatcttctttgactatagtgggagagatttggaagacaaagaaggagagattcaagcaggtgctaaactgtcattaaatcgacaattttttgacgaacgttggtcaaagcatcgggtggttagttgtttggattggtcatctcagtatccggagttactcgtggcttcctataacaacaatgaagatgcccctcatgagcctgatggtgtggcccttgtatggaatatgaaatacaaaaaaactaccccagagtatgtgtttcactgccagtcagctgtgatgtctgccacatttgcaaaatttcatccaaatcttgttgttggtggtacatattcaggccaaattgtgctttgggataaccgtagcaataaaagaactccagtgcaaagaactccactgtcagcagctgcacacacacaccctgtatattgtgtaaatgttgttggaacacaaaatgctcacaatctgattagcatctctactgatggaaaaatttgttcatggagtctggacatgctttcccatccacaggatagcatggagttggttcataaacagtcaaaagcagtagctgtgacatctatgtccttccctgttggagatgtcaacaactttgttgttgggagtgaagaaggttctgtgtacacagcatgccgccatggcagcaaagctggaatcagtgagatgtttgaggggcatcaaggaccaatcactggcatccattgtcatgcagctgttggagcagtagacttctcacatctttttgtcacttcatcgtttgactggacagtaaagctttggacaactaagaataacaagcctttgtattcatttgaagataatgcagactatgtttatgatgttatgtggtcacctacccacccagccctgtttgcctgtgtggatggcatggggagattggatttgtggaatctcaataatgacacagaggtaccaactgccagcatttctgtggagggtaatcctgctcttaatcgtgtgagatggacccattctggcagagagattgctgtgggtgattctgaaggacagattgttatatacgatgtgggagagcagattgctgttccccgcaatgatgaatgggcacggtttggccgaacacttgcagaaattaatgcaaaccgagctgatgcagaggaggaagcagctacccgaatacctgcttagttcctgaaaaggggagtgtaactagtggatttgggaaaggttcttaagtagatcctgagactatttgcatgcttctgtctaaatgataattaaaaggaaatttcatggattaaaccatgggtttaatgcagcaaggaaacttacaatgtccctttatatataacatgcatcttgttttggatttgtgtcattttttaatatagctgattgacttcacagaaagcagcttttttgaattctaatacataggtgtatatttggtattagttattttgagttcttttcaacttataacactgtatacagttatttctaaagcacagatgaaataagttctgcatatttttaaataatcacagttccctgttatacagataatgttctcactacccataatatgtaggaacattgtttctccttagccgtagtatgcatacacctatccatgttcattctgacatcctttgttgtctttataattcatgtggtagttacctataaataaaaacaaatatgcgtt

SEQ ID NO: 4209 - DNA, 1522 bp, Homo sapiens
gcggaccccagagagccctgagcagccccgccgctgccggcctagttaccgtcataccacgggaggagccgcagctgccgcagccggccccagtctccatcaccgcaaccaatgagcagcaaggccgagacccagcagccacccgccgcccccgcctttccccccaccgcccccctcccgtccccccgccgcccccgccctcagcgccgccgacaccaagcccggcactacgggcagctgcgcagggagcggtggtccgggcggcctcacatcggcggcgcctgccagcgtggacaagaaggtcatcgcagtgaaggttttgggaacagtaaaatggttcaatgtaaggaacggatatggtttcatcaacaggaatgacaccaaggaagatgtatttgtacaccagactgccataaagaataaccccaggaagtaccttcgcagtgtaggagatgaagagactgtggagtttgatgttgttgaaggagaagagggtgcggaggcagcaaatgttacagatcctggtggtgttccagttcaaggcagtaaatatgcagcagatcgtaaccattatagacgctatccacgtcataggggtcctccacgcaattaccagcaaaattaccagaacagtgagagtggggaaaagaccgagggatcggagaatgctcccgaaggccaggcccaacaatgccggccctaccgcaggcaaaggttcccaccttactacatgtggagaccctgtgggtgtcgaccacagtattccagccctcctgtgcagggagaagtgatggagggtgctgacaaccagggtgcaggagaacaaggtagaccagtgaggcagaatatgtatcggggatatagaccacgattccgcaggggccctccttgccaaagacagcctagagagtacggcaatgaagaagataaaatcaaggagatgagacccagggtcagcagccacctcaacgtcggtaccgcagcaacttcaattaccaacgcagatgcccagaaaaccctaaatcacaagatggcaaagagacaaaatcagccaatccaccagctgagaattcgtctgctcccgaggctgagcagggcggggctgagtaaatgccggcttaccatctctaccatcatccggtttagtcatccaacaagaagaaatatgaaattccagcaataagaaatgaacaaaagattggagctgaagaccttaagtgcttgctttttgcccgttgaccagataaatagaactatctgcattatctatgcagcatggggtttttattatttttacctaaatatgtctctttttggtaataacaaacgtgttttttttaaaaagccttgtttttctcaatacgcctttaaaggtttttaaattgtttcatatctggtcaagatgagatttttaagcactttatttttaatttgtaataaaagtttacaacttgattttttcaaaaaagtcaacaaactgcaagcacctgttaataaaggtcttaaataataataataaaaa

SEQ ID NO: 4210 - DNA, 796 bp, Homo sapiens
gaaagatggcggctaccttactagctgctcggggagccgggccagcaccggcttgggggccggaggcgttcactccagactgggaaagccgagaagtttccactgggaccactatcatggccgtgcagtttgacgggggcgtggttctgggggcggactccagaacaaccactgggtcctacatcgccaatcgagtgactgacaagctgacacctattcacgaccgcattttctgctgtcgctcaggctcagctgctgatacccaggcagtagctgatgctgtcacctaccagctcggtttccacagcattgaactgaatgagcctccactggtccacacagcagccagcctctttaaggagatgtgttaccgataccgggaagacctgatggcgggaatcatcatcgcaggctgggaccctcaagaaggagggcaggtgtactcagtgcctatggggggtatgatggtaaggcagtcctttgccattggaggctccgggagctcctacatctatggctatgttgatgctacctaccgggaaggcatgaccaaggaagagtgtctgcaattcactgccaatgctctcgctttggccatggagcgggatggctccagtggaggagtgatccgcctggcagccattgcagagtcaggggtagagcggcaagtacttttgggagaccagatacccaaattcgccgttgccactttaccacccgcctgaatcctgggattctagtatgcaataagagatgccctgtactgatgcaaaatttaataaagtttgtcacagag

SEQ ID NO: 4211 - DNA, 1563 bp, Homo sapiens
agttggtgagcatcatggcaaccgttacagccacaaccaaagtcccggagatccgtgatgtaacaaggattgagcgaatcggtgcccactcccacatccggggactggggctggacgatgccttggagcctcggcagcttcctgatgtggtagaaatgccatggtagccccacaggaaatcacctcatgtgcgcctcccacccacaggcttcgcaaggcatggtgggtcagctggcggcacggcgggcggctggcgtggtgctggagatgatccgggaagggaagattgccggtcgggcagtccttattgctggccagccgggcacggggaagacggccatcgccatgggcatggcgcaggccctgggccctgacacgccattcacagccatcgccggcagtgaaatcttctccctggagatgagcaagaccgaggcgctgacgcaggccttccggcggtccatcggcgttcgcatcaaggaggagacggagatcatcgaaggggaggtggtggagatccagattgatcgaccagcaacagggacgggctccaaggtgggcaaactgaccctcaagaccacagagatggagaccatctacgacctgggcaccaagatgattgagtccctgaccaaggacaaggtccaggccggggacgtgatcaccatcgacaaggcgacgggcaagatctccaagctgggccgctccttcacacgcgcccgcgactacgacgctatgggctcccagaccaagttcgtgcagtgcccagatggggagctccagaaacgcaaggaggtggtgcacaccgtgtccctgcacgagatcgacgtcatcaactctcgcacccagggcttcctggcgctcttctcaggtgacacaggggagatcaagtcagaagtccgtgagcagatcaatgccaaggtggctgagtggcgcgaggagggcaaggcggagatcatccctggagtgctgttcatcgacgaggtccacatgctggacatcgagagcttctccttcctcaaccgggccctggagagtgacatggcgcctgtcctgatcatggccaccaaccgtggcatcacgcgaatccggggcaccagctaccagagccctcacggcatccccatagacctgctggaccggctgcttatcgtctccaccaccccctacagcgagaaagacacgaagcagatcctccgcatccggtgcgaggaagaagatgtggagatgagtgaggacgcctacacggtgctgacccgcatcgggctggagacgtcactgcgctacgccatccagctcatcacagctgccagcttggtgtgccggaaacgcaagggtacagaagtgcaggtggatgacatcaagcgggtctactcactcttcctggacgagtcccgctccacgcagtacatgaaggagtaccaggacgccttcctcttcaacgaactcaaaggcgagaccatggacacctcctgagttggatgtcatcccccgaccccaccctgttttccaccagagttctgacactgtgactctgtataaaatggttgggaagctgcaccc

SEQ ID NO: 4212 - DNA, 1972 bp, Homo sapiens
ttgctcaccactgaaaaatgtcagtgtaaatgtgaccgctttaaagatgagtcaagtaattcttggaacagggaaaaaaatgaatttgccaggtcaggagttcacctgcctttgtcagagttgaacccaaccactcttgacctcgactcactcccttagggttaagaaagcccaaacacattcctgagcacagagcaaacactcccatgtcactgaaaagaaacaaaagaatgctaaaaagtgctcagacctgatcacattttttccaatattttttcctttttttttttttttttgagacagggtcttgctctatcacctaggctggagtgcatgtttttgagacagggtcttgctctatcacctaggctggagtgcatgatcatggctcactatagccttgaactcctgggctcaagccatcctcagcctcccaagttgcgaggactacaggtgtgcaccacaacgtcccagctactttttaaatttttagtagaaacgaggtctcactatggtgcccagactggtctcgaactccggagctcaagtgatcttcctgctttggcctcccaaagtgttagaattacaggcatgagccacctcgcctggctggtttttgcctttcttatagaccctgggcatgtaagcatttattagtttgcatttttgaaacagtaatttcaatattttagtgccaatgtcaggccgcttaaacactgtattacatatcttcatctgtctggtggaactattggtgtgatcctagagaactgagtcctattctgccattcatttaaagtgttttaaactctaatctctctacttaatgcacagtagtcagattattctcttaaacatttgcctagtagaggttaaaatagtttaatccttatgaagatggaataacttcaaactcacattgtggcacttagatcttccaccaagacttcatccgtgaaatccacacctccctgttgggttcccaattacattccaaatttacatttcttttgagaatctctgcatactccagctctgtcctgttgatcctattctagaagtgcttaatgcagcaagacacagaaagttaaacgcaaattgctgcaaaattcaccctcagtggaggactagaaacacaacatgtccaatttaaagctcagttcacaagcagttcaattctgctggcatcagaaaaggagattctaattaaacattcttagggaaggacatcaaatgaggttaatgggaaacgttaccagattaaaagcagttttttgacaaagtaacagatttggaaattctgactctctgaaagccttgatttgaacctcaaacttgatttcaccatgagaagtggggatcaagggcctgcgcagttcttttcctaaatcgattcggtgctccccaccccgacgcaggcacaggtccgcaaccagatagggagatgcctgaatttcaggctacctttgacaaagctttcttcctccctccctccctttgcacgctgcatcccacgctgcctgcttaaagcgccctcatgtgtctacagatggtaaaacgtttatttctcaacagacattccagtgatagcatccaatgacctatgtaacggcacccttttttgctgtacgcgttttttgagatggagtctcgctctgtcgcccaggctggagtgcagtggcgcggtctcggctcactgcaagctccgcctcccgggttcacgccattctcctgcctcagcctcccgagtagctgggactacaggcacccgccaccacacctggctaattttttgtatttttagtagatacagggtttcaccgtgttagccaggatggttttgatctcctgacctcgtgatccacccccctcggcctcccaaagtgctgggattacaggggtgagccactgcgcccggccccagtcacttgttcttaagtttcttaagcaaactataaaatagcaaaagacc

SEQ ID NO: 4213 - DNA, 1664 bp, Homo sapiens
gcagtcagctgcgtgattcccgtgattgcgttacaagctttgtctccttcgacttggagtctttgtccaggacgatgagacactcaaagagaacttactgtcctgattgggatgacaaggattgggattatggaaaatggaggagcagcagcagtcataaaagaaggaagagatcacatagcagtgcccaggagaacaagcgctgcaaatacaatcactctaaaatgtgtgatagccattatttggaaagcaggtctataaatgagaaagattatcatagtcgacgctacattgatgagtacagaaatgactacactcaaggatgtgaacctggacatcgccaaagagaccatgaaagccggtatcagaaccatagtagcaagtcttctggtagaagtggaagaagtagttataaaagcaaacacaggattcaccacagtacttcacatcgtcgttcacatggggtatgaaattgttgatactttaggtgaaggagcttttggaaaagttgtggagtgcatcgatcataaagcgggaggtagacatgtagcagtaaaaatagttaaaaatgtggatagatactgtgaagctgctcgctcagaaatacaagttctggaacatctgaatacaacagaccccaacagtactttccgctgtgtccagatgttggaatggtttgagcatcatggtcacatttgcattgtttttgaactattgggacttagtacttacgacttcattaaagaaaatggttttctaccatttcgactggatcatatcagaaagatggcatatcagatatgcaagtctgtgaattttttgcacagtaataagttgactcacacagacttaaagcctgaaaacatcttatttgtgcagtctgactacacagaggcgtataatcccaaaataaaacgtgatgaacgcaccttaataaatccagatattaaagttgtagactttggtagtgcaacatatgatgacgaacatcacagtacattggtatctacaagacattatagagcacctgaagttattttagccctagggtggtcccaaccatgtgatgtctggagcataggatgcattcttattgaatactatcttgggtttaccgtatttccagacacacgatagtaaggagcatttagcaatgatggaaaggattcttggacctctaccaaaacatatgatacagaaaaccaggaaacgtaaatattttcaccacgatcgattagactgggatgaacacagttctgccggcagatatgtttcaagacgctgtaaacctctgaaggaatttatgctttctcaagatgttgaacatgagcgtctctttgacctcattcagaaaatgttggagtatgatccagccaaaagaattactctcagagaagccttaaagcatcctttctttgaccttctgaagaaaagtatatagatctgtaattggacagctctctcgaagagatcttacagactgtatcagtctaatttttaaattttaagttattttgtacagctttgtaaattcttaacatttttatattgccatgtttattttgtttgggtaatttggttcattaagtacatagctaaggtaatgaacatctttttcagtaattgtaaagtgatttattcagaataaattttttgtgcttatg

SEQ ID NO: 4214 - DNA, 1893 bp, Homo sapiens
gcgggggacgtcagcgctgccagcgtggaaagagctgcggggcgcgggaggaggaagtagagcccgggaccgccgggccaccaccggccgcctcagccatggacgcgtccctggagaagatagcagaccccacgttagctgaaatgggaaaaaacttgaaggaggcagtgaagatgctggaggacagtcagagaagaacagaagaggaaaatggaaagaagctcatatccagagatattccaggcccactccagggcagtggacaagatatggtgagcatcctccagttagttcagaatctgatgcatggagatgaagatgaggagccccagagccccagaatccaaaatattggagaacaaggtcatgtggctgtgttgggacatagtctgggagcttatattttgactctggacgaagagaagctgagaaaacttacaactaggatactttcagataccaccttatggctatgcagaattttcagatatgaaaatgggtgtgcttatttccacgaagaggaaagagaaggacttgcaaagatatgtaggcttgccattcattctcaatatgaagacttcgtagtggatggcttcagtgggttatataacaagaagcctgtcatatatcttagtgctgctgctagacctggcctgggccaatacctttgtaatcagctcggcttgcccttcccctgcttgtgccgtgtaccctgtaacactatgtttggatcccagcatcagatggatgttgccttcctggagaaactgattaaagatgatatagagcgaggaagactgcccctgttgcttgtcgcaaatgcaggaacggcagcagtaggacacacagacaagattgggagattgaaagaactctgtgagcagtatggcatatggcttcatgtggagggtgtgaatctggcaacattggctctgggttatgtctcctcatcagtgctggctgcagccaaatgtgatagcatgacaatttctccttcctctggaaacctctgttttcttagatttggagcagggtggtcacactgaccttgcagagttccgagaatcagagacagaacataaaaggcctggaaaacattctccaaaaagaagctgcaacatgtgtggacaatgggcttttcatgcctctcttactgtctgttgacctggtgcaagaaacatgctctggtgatggctgtgagggaggaatgaggatagacatagacactcctgtgtctcaaacatgcctctttattactctgttatgactctgtcttccctggggcaggaccccagcctgcctacatttgcagacagacacagtggcatgtggagacaacagtgtgtcccaatgacttttctttactccccagctgtcggcagtactcagtggaagggtgatattatgacactgatactgctattttgaaacctggaggatggaaaggtgcaaaaatctatcaccagcaacagaaggtgcagaccgtgttggtggcggtaattttgtccatcaaatgaatatgtgtgaaaacattcccttcttcggccctacaggtcagaatggcggcagcggagcatcgtcattcttcaggattgccctactggccctacctcacagctgaaactttaaaaaacaggatgggccgccagccacctcctccaactcaacaacattctataactgataactccctgagcctcaagacacctcccgaatgtcttcttattccccttccaccctctcctcttccaccctccgtggatgataatctcaagactcctcccttagctactcaggaggccgaggcagaaaaatcactgaaacccaagaggcagaggttgagtaagctgagaacaggtcattgcactcaagcctgggcaataagaagaaatc

SEQ ID NO: 4215 - DNA, 2396 bp, Homo sapiens
cagcagcgggcggccgcggcgtgacatcggcaccatcctgcagatcctgaacgacctcctgagcgccacccggcactaccagggcatgcccccttcgctggcccagctccgctgccacgcccagtgctccccggcctcaccggcccccgacctggcccccagaactacctcctgcgagaagctcacggctgccccctcagcctccctgctgcagggccagagccagatccgcatgtgcaagcccccgggggaccggcttcggcagacagaaaaccgcgccacgcgctgcaaggtggaacggctgcagctgcttctgcagcagaaacggctccgtagaaaggcccggcgggacgcgcggggtccgtaccactggtcacccagccgcaaggccggccgcagcgacagcagtagcagcgggggcggcggcagccccagcgaggcctccggcttgggcctcgacttcgaggactccgtgtggaagccagaagtcaaccctgacatcaagtcagagttcgtggtggcttaggatcttcggatcggccaccctcgcccctcgcaccccagcccagggcggcggggactccgagagccccggagagaacgtggcccagccctggagggcaggcggccactcccccagccagaagtctttttttcttttcttcttttttattatttttttctttttttaaaaagttctgaccgtggtttcctggactcttcatgggctttgcttcctacctccttcacccttcactcctgccctcctcttcctcctcctcctcctcctccgtctgtctcctttcacctctgcgccaggtcggtcctccctgccaaccttccccagctccaatatgtagcagtctctctggatggcggagagtgaaggagacggagaaacgcgccccatcccttccgccgcctcctttcccccccgaccctattcaggttttaagtcaaaaatgtcgatatgtcattatgcactttacagatgaggggaggggccgcagtgcgcagaacccaccccaccccccagtgcagacttcggggtctccaccccaggccagcagcgcccactgggctacagcaagccaacaggtcacagaagccaacgaggggactgtttctcttccactcctatcctcttttcttgatcttttttttgcattttccttcatttctttaacaaggagagcaaagctgttttagcagaggctggggctgaggtccccatggggtttgggtgcaggggcatggcaccctttcctgtcgggaagggagaggggaactacccccccagcctgccctccgccccgccccagccggcggactgtgctgtttcctccgcccccactcccgtgttttctgacctcctgcctgagtttggggtatttatagactattaattttctgactgagccaatagtggttggggaactcttgaaaaaggggagagaatggctgggtgctggggagttcccccctccgagccctccttcccggcccaacctgagggatgtggatttgggactgtctgggggcccctcctgcagcgaggatgggagggggtgctgagctgtgaatcccctgggcagggggcgacaactccgtgtagcattaacccccgtggcggggtccgctgctggtctaatttggaccccctgcctctcagtgcccctgccctaggggtgtctgtctccagaggggagggacaaatcccctactggggccatttcaatggggtagtttttggatttttttccccactcactttttattttttaatgataatggagatgtctggacccttcctcaccccacctgtcggtcttgtcctggctctgcctgtcccccaccgttgttctcgtaggtgaaccccaggtcctcaactccccccctttatgtgttgaaagttaatggtttcagatgtgaacatcacgtgttataactgtagcgctgtaaatttttttgtgggagggtgggcagggaggggtcccagagggtagagctcaaggattttgggttttgttttgttttcatttttccaaaaaaaaaagaaaaaaaaatagaaaaaaaaggagtaaaaggggcgggtttgttttttgaagaactgtcttggatacctatttaaatgtgtgttctgttttgttttttaacgatttttaaataacgtctgtgcctccactggttgagggtggaacctccaggcaggaaccggctcgccaccctctgcccggtaagggctgcccaagaaagcattacccgccctcggggggtcgggctgtgggggtcccggcacctggcgtgagtttcatgtatgaaaacataaaattgaaaaaaaaaaaaaaacctacacgagcaccgtgatttcaagtaataaacagaaaatgaaacac

SEQ ID NO: 4216 - DNA, 1317 bp, Homo sapiens
ttgctgtaacagtgtttattgatgatgagtccagggctcctgctgaagccctggtggggaggggcacagagcgagatggggcgtaatggaatgcttgaaggctgctccgtgatgtcggtcggagcttccagactaggcgagggcagggtgaggcctcgggcacacagccggcgcccagtcacccggcccagatggagggcggccgggccctgcacaggcacttgccaaggtggctcacactcacgcacactcgtactgagactcaaggccgtctccacaactccaaccagtgcaaatgacttagtgcaaattaaattcagaagggacgggggaaacagagtcgtggaggctttgaatctctcagaaaaaaggaaagacaggaaagctcagaaacaaagagacagaaggatgaaaaagaagaagagggaggtggtggggacggcgtcatcccgctggaggagctcagctctgggatgatgtggtggctggtggtcaaccgtccgccgcagggggtggccatgaagatggagtcgccggtgcggggtgggtgctgcgggcgctgctgttccgatggtgtctttgatgttgggctgatgaggtctggttcctctagcttccagagccgattcctgagtcaggtagtgcagtggttgtaaagtgcagcatattcatttccaagctagagggttttgtgtccggattcaaaggcccaggcttgagctgggtagcaccatttctttcatgttgtgggttctgggagcccagagggcagccatagtgtgccgactccgtggaggaagtaaagaaacagacccgcttcttgccgcagccccaccagcctaaggtgttcaggaaggccggacgcgcctcctctgtcctcgccgtcacaccggaccatgtcatgtcctgcttgtcacgtccaccggacctggcgtcttggccttcggcagctggtgggcacgtccaccccagctggagacctggcctcgtctccagcccgaacgctgaggcaccgatcccggctccgtcgccgcccgcgaggcccgccttggccacgggctctggaggccagtgcctcccgctcgccgcccgctgcgctcctcacccctgcctgcaccatcctccctcctgagagctcattcactccgccccgcccgcctcgcctagtctggtctcgccccatgcccttgactcccctggatgctgtactgtctgccaagccagccccaggggctgagcggtgagggcatacagcgtcaccaagtccactgtgggccctctccgcaccagaccctgggccgcagtgcctcgtgggac

SEQ ID NO: 4217 - DNA, 2953 bp, Homo sapiens
acaggcgcctgcgccgcagcggggctgccgctggttggtccgcacgtggaacctctcctggtcctgttgacccgggcccctcggaacctccagcttggtccggtctgggactggaagcctgccatggcggcttctgcggcggagacgcgcgtgtttctggagagaaccgaaagaaggaggtatgcccatgaatatttccataatgccatcttcactccagatgaaaacccctgaaggctgcacagaaatccagcttccagcagaggtcaggcttgtaccttcctcttgccgtgggctacagtttgttgttggagatggactgcacctgcgactgcagacgcaagcaaaattaggcacaaaactgatttcaatgtttaatcaaagctcgcaaacccaagaatgttgcacgttttattgccaatcctgcggtgaagtcataataaaagacaggaagctcctcagggtgctcccactgccgagtgagaactggggagctctagttggagaatggtgttgtcatcctgacccctttgctaataaatcacttcatccgcaagagaatgactgttttattggagactctttcttcttggtgaatttaagaaccagtttgtggcagcaaagacctgaactatccccagtggagatgtgctgtgtttcttctgacaaccattgtaaattggaaccaaaggcaaataccaaagtaatttgtaagcgttgcaaggtaatgttgggagagaccgtgtcatcagccaggtcatgctgatgcaagaggtgggctcccatggccttgaacagctctgttcctgtggttttgccggaaaccaccaagttttatatgacagagataattattcagtcatctgagaggagttttcctatcataccaaggtcttggtttgtccagagcgtgatcgcccagtgtctggtgcagctctcctctgctagaagcacttttagattcacgattcaaggtcaggatgacaaagtgtatatcttgctatggcttttaaattcagacagtttggtgattgaatctttgagaaattccaaatatatcaaaaaattccccttgttggaaaacacattcaaagccgattctagttctgcctggagtgctgtcaaggtcctctaccagccatgcatcaaaagcaggaatgaaaagtaagttgtgcatttgttttctctttccacattatgttttagcttttgttgtcatgttggtgttaagaaattaatgaattaaatgccactataccatttccctacttgaagcttctaggagccaatactgctaaatattatatgtttaaaataggttgaattattacagatgattcatgttaatatgcagaaagcttgcttttaccaaaaattattgtttttttcttgtaatctaagctgtctgtacatatggctgcagtgctaaatcagacttcaacagtgatgaatatttaccaataagcactttccaggcatcaggatacaataatgaacaaaccccagcccctacctcttagcattgttgttctaatagggggaaggcagaccataaacaaaacagattcttacgtctcttactatgtgtcaggcactcatctaagaactcgtagctcatttaagcctaacaacaacctgtgtggtatgtaccattatcatccccactttaaagataagcacactaagacactggtagtaaatcactctagtgaaaaatgaagcaaggtaaggtagttggcgaggggtaggatgggagtaggatgtcattttatattgcaaagtcagggaagattctttagataaggtgatatttaagcaggtaacttgaaggaagtgaagtggtgagccatatctgatggaagatcattcccagaaaaggaaacagcaggttattttaattgtaacagaatcaaagtttgtacttgtcctgtactcttagatgggtttgatcaaatttatcctaagaacggaagggtcttagtctttttctggaaagtaaataagacattgaaaaaattaattaggtttcttatgcaagtagtaccagtcataaaatattcaaacactaagagatatatacaaggtaaaattatatcccgctccagaagtaaaacgtttgttgtctactcttccacttccttttctgttcattttgcacctaaacatgtgtattttttacacttaaaaaaagcccatgtcttagagattctttccattgtgagtgcttgacattttatgaaatggaggtactataaattatttagccagttttcttttaatggatatttggtttattacttttttgctgttataattagtgttgtgatcttgtatgtttgttttctgattataagttttttatattagaggaatttctagaggtacaattgttgagtcaaagggtatggacatttaaaattttgagaggtaatatcaaagtattttgtaaaaaggcatcatgaatttatattcccacctgaagtttttataaatgtccattaccctgcactctcacccaaatttccatttagatttttgcctatctgatgtgattctaaaggaaacaggtttacttgacactatccttatattttattgagacatgttcaatggatgcatctcagttttatgcttttgagactctttttgagggcttgggtttttttttgtgtgtgtgcccttatgcatagtcaactagtaagctgtacattgattatattctcttttgatgtatgtgtttgtgtgtatctttatatatttaggtttatatcatcaaatttattaaaaccctttatattcatcttttctgtttattaaaatgtggacttttgtgacaggtatgttgaatcttatattatgattatgtaagtaattttcttctgttttgatactagttttcacattatgtattttaaagctgtgttattagaggaataaaagtttgtggcatgac

SEQ ID NO: 4218 - DNA, 5839 bp, Homo sapiens
caattccaatggttgtgtctgattttgatcttccagaccaacagatagaaatacttcagagttctgactcgggatgttcacagtcctctgctggggacaacttgagttacgaagttgatcctgaaaccgtgaatgcccaagaggattctcaaatgcccaaggaaagctccccagatgatgatgttcaacaggtagtatttgacctgatatgtaaagttgtaagtggcctcgaagtggaatctgcatcagttacatctcaattagaaattgaagctatgcccccaaagtgcagtgatatagatccagatgaagagacgattaaaattgaagatgactccattcaacagagtcagaatgctttgctgagtaatgaaagttctcagtttctgtctgtgtctgcagagggaggccatgagtgtgtggcaaatggaatctccaggaatagctcctcaccttgtatttcaggaaccacacacactcttcatgactcttctgttgcttccatagaaaccaaatctagacaaaggagtcacagtagtattcaattcagcttcaaagaaaaattatcagaaaaagtttcggagaaggaaacaatagttaaggagtcaggtaaacaaccaggagcaaaacctaaagtaaaacttgccagaaaaaaggatgatgacaagaaaaaatcttcaaatgaaaaactcaaacaaaccagtgtattcttcagtgatggtctggatttagagaactggtatagctgtggagagggagacatttctgaaattgagagtgacatgggttctccaggatctcgaaaatctcccaatttcaacattcatcctctctatcaacatgtgctcctgtatctccagttgtatgattcatccaggactttgtatgctttctctgccatcaaagccatcttgaaaactaaccctatagcttttgtaaatgccatttcaactactagtgtaaataatgcatatactcctcagttgtctctccttcagaatctattggccagacaccggatttctgttatgggcaaagatttttatagtcacattccagtggactcaaatcataacttccggagttctatgtacatagaaattcttatttctctctgcttatattacatgcgtagccattacccaactcatgtcaaggttactgcacaagatttaataggcaatcgaaacatgcaaatgatgagcatagaaattctgacactactcttcactgagctggcaaaagtaatagaaagctcagcgaagggtttccctagttttatttctgatatgttatctaagtgcaaagttcagaaagtgattcttcattgtttgctgtcatctatctttagtgctcagaaatggcatagtgaaaaaatggcaggtaagaacctggttgctgtggaagaaggtttctcagaggacagccttattaatttctcagaggatgaatttgacaatggcagcacgttgcagtcacaacttcttaaggtgcttcagaggctgattgttctagaacacagagtaatgactattcctgaagagaatgaaacaggttttgattttgttgtatctgacttagaacacatcagtccccatcaacccatgacttctcttcagtatttgcatgctcagccaatcacatgtcaaggcatgttcctctgtgcagtgatacgagctttgcatcagcactgtgcatgtaagatgcacccacaatggattggtttaatcacatctactctgccttacatgggaaaagttctgcagagagtggttgtttctgtgacactacaactgtgcagaaatttagataatctaattcagcagtacaaatacgaaacaggattatctgatagtaggcctctgtggatggcatcaattattccaccagatatgattcttactcttttggaagggattacagccattatccattactgtttgttggatccaactacacagtatcaccaacttttggtcagtgtagaccagaaacacttgtttgaagcacgcagtggaatcctctcaatccttcatatgatcatgtcctctgtgacactgctttggagcatactgcatcaagctgattcttcagaaaagatgactattgccgcatccgcatctcttaccactattaatcttggagctacaaagaacttgagacaacagattcttgaattgttgggccccatttcaatgaatcatggtgttcactttatggctgccattgcatttgtgtggaatgaaagaagacagaataaaacaaccaccaggaccaaggtcattcctgcagccagtgaagaacagcttttattagtggaattggttcgttcaatcagtgtcatgagagcagaaactgttatccagactgtaaaagaagttttaaagcagccaccagccatagccaaggacaagaaacatctttctttggaagtctgcatgcttcagtttttctatgcttatattcaaagaattccagtgcccaatttagtggatagctgggcgtcactgttgatacttctgaaagactctatacaactgagtcttccagctccagggcagtttcttatacttggggttctgaatgagtttattatgaaaaaccctagtttggaaaataaaaaagaccaaagagaccttcaggatgtaactcacaaaatagtggatgcaattggtgcaattgctggttcttctctggaacagacaacatggctgcgacgaaatcttgaagttaagccttctcccaaaataatggtagatggaaccaatttggaatctgatgttgaagatatgttatcacctgcaatggaaaccgcaaacataactccttctgtatatagtgtccatgcattgacattactctctgaggttttggctcatcttttggatatggttttctatagtgatgaaaaggagcgggttattcctttacttgtaaatattatgcattatgttgtgccctacctcagaaatcacagtgcacataatgcccctagttatcgagcttgtgtccagctgctcagcagtcttagtgggtatcagtacacacggagagcttggaaaaaagaagcttttgacctctttatggatcccagtttctttcagatggatgcctcttgtgttaatcattggagagcaattatggacaatctgatgacacatgataaaacaacatttagagatttgatgactcgtgtagcagtggctcaaagcagttcacttaatctctttgcaaaccgtgatgtggagctagaacagagagctatgcttcttaaaagattagcatttgctatttttagcagtgaaattgaccagtaccagaaatatcttccagatatacaagagagattggttgagagtctccgtttgccacaggtgccaactctccattctcaagtgttcctgtttttcagagtgttacttttaagaatgtctccccaacatcttacctcactctggcctaccatgattacagaacttgtacaagtatttttactgatggagcaggaactcactgctgatgaagatatttcacggacttcagggccctctgtggctggtctggagacaacgtacacaggaggtaatggcttctctacttcatataacagccagcggtggttaaacctctatctctctgcttgcaaatttttggatttggctctcgcattgccctctgaaaaccttcctcagtttcagatgtaccgatgggcctttattccagaagcctcagatgattcaggtttggaagtcagaaggcagggtatacatcaacgagaatttaaaccttacgtggtacgactagcaaaacttcttcggaaaagagcaaagaaaaatccagaggaagacaactcagggagaacattgggttgggagccagggcacttgctgctcaccatctgcaccgtgcgcagtatggagcagctcctgccgttcttcaatgtgctcagtcaagtcttcaacagcaaagtcacaagccgatgtggaggacactcagggagtcctatcctctactcaaatgccttccctaataaggacatgaaactggagaaccacaaaccatgttccagcaaagccaggcaaaaaatagaagagatggtagaaaaagattttctggaagggatgataaaaacttgagcaccattgctggttccatttagcttacatgtaaatgtaattatttaaaacacacacactgctctgcgttgtatagtttttccttttttgtatgtaacagaacacatttcagattgtatttaatttaaatatttgtatataagagcaaatgtctgaatgtggcctgaatcaagtttaaatattgttggctcatactgattatggtgcctaagagagctatatatatacacatgtaaagtccattgtttttattgtcctgagttgtcttaaacctgcaaaatatacactacccattttttttttccattggtttcagacttggttcaattaagattggttggggatttttctcttttccttattaaccatgttctggtatcagaatggtgttccttctccatcagaggctgggaaacgtattataattagtttttctcccacataccttcaccaagagcagtgaagaataactgaaggctggaccatgcatccttaaaagtattgcatgagcatctccacctcagtatggaagagggatggacaaccccctattcatacctctgagttcctgatggcattagtcatatagtaacaaattccaaagcccttaaataaacggaaaacagaccaaattcttctaaataagaactatcccagcttacttgtgagtctgcttctgcatatactcggacgacatcttctgtaccagagggccggacaaaagctcgagaaagcttgtacttcttcaccaggtcattgattgcctcctgtaatcctgggggtgtaactgcttgtctttcagcatcggtagtgctaataactctcctgtctgcaacctaagtgcaagcatttcatatttgttactctattacacttcctttcagaagcttaacctgttaaacatacattctacgaaaagtgccagactaaatataaaattacattaaaacttctttctccaaggtcagggtaattaatttcaacatttgtgcaacttttctctttttcttcagtctataaagaattacctttggcaaaaaatatttccacaaatgcttagagttaccactaagataatggccagtaaatacgatatgactaagtcccatatcacacacaaaaacaggataagtggtagcccattatataagaagaccgataagaatttcttaaatatgccaaaaataatctgaacaatcagccatttctgtgaactgtggctttagtacctccaattgtctttcacaaattctgttggtgaatgtgtaaactggcataaacatgtacagaaatcaattagcaatttatctgaattctctccctcaggaagtactctgtgaactaaacataatgcagagtaagtactttcacttgaaatgacagggcatctgagttttgcttcaaaataatgttggggccaggtgcagtagctcacacctgtaatcctagcactttgggaggccaagggagaaggatcacctgagctcaggagttcaagaccagcctaggcaacatagtgagatctcgtctctaaataaaatatacaaaagagtattgggagggggtatgaagaatgtatagggcaataattgaaatctgttgaagctgggtacacaaaagttcattatgttgtttctctacatttatatctatttttaatttttttatatctatttttaattttccataataaaatctcttta

SEQ ID NO: 4219 - DNA, 2191 bp, Homo sapiens
gttgttgcttgggcgcttctccgctgcgtgtaggtgaagggggcttcctgaccgaggaagacaatggtgtaaaattggttgatcctttgggtgaaatgttggcaccatcctgggaggaacatgccacctgtttagcaaatgctgaggaacaagatatgcagagagtgcttattgacatcagcgagaaagaagctgtgaatctgcaacaagatgcctttgtagttattggtagagataccaggcccagcagtgagaaactttcacaatctgtaatagatggtgtgactgttctaggaggtcaattccatgattatggcttgttaacaacaccccagctgcactacatggtgtattgtcgaaacacgggtggccgatatggaaaggcaactatagaaggttactaccagaaactctctaaggcttttgtggaactcaccaaacaggcttcttgcagtggagatgaatacagatcacttaaggttgactgtgcaaatggcataggggccctgaagctaagggaaatggaacactacttctcacagggcctgtcagttcagctgtttaatgatgggtccaagggcaaactcaatcatttatgtggagctgactttgtgaaaagtcatcagaaacctccacagggaatggaaattaagtccaatgaaagatgctgttcttttgatggagatgcagacagaattgtttattactaccatgatgcagatggccactttcatctcatagatggagacaagatagcaacgttaattagcagtttccttaaagagctcctggtggagattggagaaagtttgaatattggtgttgtacaaactgcatatgcaaatggaagttcaacacggtatcttgaagaagttatgaaggtacctgtctattgcactaagactggtgtaaaacatttgcaccacaaggctcaagagtttgacattggagtttattttgaagcaaatgggcatggcactgcactgtttagtacagctgttgaaatgaagataaaacaatcagcagaacaactggaagataagaaaagaaaagctgctaagatgcttgaaaacattattgacttgtttaaccaggcagctggtgatgctatttctgacatgctggtgattgaagcaatcttggctctgaagggcttgactgtacaacagtgggatgctctctatacagatcttccaaacagacaacttaaagttcaggttgcagacaggagagttattagcactaccgatgctgaaagacaagcagttacacccccaggattacaggaggcaatcaatgacctggtgaagaagtacaagctttctcgagcttttgtccggccctctggtacagaagatgtcgtccgagtatatgcagaagcagactcacaagtaagaaagtgcagatcaccttgcacatgaagtgagcttggcagtatttcagctggctggaggaattggagaaaggccccaaccaggtttctgaagataattttcatattcctgagaaactggactttttacaagtctttacaaaactgtcaataataatggcagtactaagagatttataatcataatgtttacaatgcagcctactggattgtctctagatctgtttttcttaaacactaacagaataattctttataaataggtaagccttacacttgttaaagaaatttacctctaatttcagtctcactaatgtaaaatactgggacttaagtatacaattcagtcactaactgtacagttttatgtggggaacaattcatgcaggctactggaaaattaaatcttattaccaactccttgtgatatctttgccatcaccatcacatgagcaagatgatgttttgcagcattccccattgctgatacaaatggagagggcagagaagactttatacaaccagtttttccattgcagagtcttaagaaagattattagatgacttacctatatgactaatgccatcaggaactcagaggtatgaatagggggttgtccatccctcttccatactgaggtggagatgctcatgcaatacttttaaggatgcatggtccagccttcagttattcttcactgctcttggtgaaggtatgtgggagaaaaactaattataatacgtttcccagcctctgatggagaaggaacaccattctgataccagaacatggttaat

SEQ ID NO: 4220 - DNA, 1364 bp, Homo sapiens
gtgtatttcagcagtataccacagctatttaatgtgtatttcagcagtataccacagctatttaatgtgtatttcagcagtataccacagctatttaatgtgtatttcagcagtatgccacagctatttaatgtgtatttcagcagtatgccacagctatttaatgtgtatttcagcagtatgccacagctatttaatgtgtatttcagcagtatgccacagctatttaatgtgtatttcagcagtatgccacagctatttaatgtgtatttcagcagtatgccacagctatttaatgtgtatttcagcagtatgccacagctatttaatgtgtatttcagcagtatgccacagctatttaatatgtatttcaaaatgcaggcagtccttgctttgcatggtaatgtggagccataaaaatgaccatgctgctgagactctgcaaagcaatgttaatcatcagtgaagggaaattattattctgtgacctttacatttttttgtgaaaatattaaaaactgcaatagtcaactataaaggtacaaattaggaaaaagtgaaaaatatattaaagttaatattgttaatacatggtaatttaaaacggaaacattgataatgttttacttatttgcaaaaaaaaaaaatgtatcaaagagaagaacaatccaaacctaaagcaaacagaagggtggaaataataaagattagagcagaaattaatgaaataggtaatagaaaagatgtaagaagacagacaaaactgaaagttggtcctttgaaaaaaaaatcaacaaaatgacaaaccttcagaccagccaagaaaaaagagagaaggctgaaatttctgaaagcaagcatgaaagagggaaaacaagagactattatgagtaactatgtgctaatacctgaggtaacttagatgaaattgacagattgctagaaagacataaactaccacttctaatcagtgttatagttgagattctatccagggcaataagaaaagaaaaagaaaaagaaaatcagattagaaaggaagaaataggccgggcgcggtggctcacgcctgtaatcccagcactttgggaggccgaggcgggcggatcacgaggtcaggagatcgagaccatcccggctaaaacggtgaaaccccgtctctactaaaaatacaaaaaattagccgggcgtagtggcgggcgcctgtagtcccagctacttgggaggctgaggcaggagaatggcgtgaacccgggaggcggagcttgcagtgagctgagatcccgccactgcactccagcctgggcgacagagcgagactccgtctccaaaaaaaaaaaaaaaaaaaaaaaaaaaaaaaaaaa

SEQ ID NO: 4221 - DNA, 4794 bp, Homo sapiens
acagccgcgcgacgccgccgccttagaacgcctttccagtactgctagcagcagcccgaccacgcgttaccgcacgctcgcgcctttcccttgacacggcggacgccggaggattggggcggcaatttgtcttttccttttttattaaaattatttttcctgcctgttgttggatttggggaaattttttgtttgttttttatgatttgtatttgactgagagaaacccactgaagacgtctgcgtgagaatagagaccaccgaggccgactcgcgggccgctgcacccaccgccaaggacaaaaggagcccagcgctactagctgcacccgattcctcccagtgcttagcatgaagaaggccgaaatgggacgattcagtatttccccggatgaagacagcagcagctacagttccaacagcgacttcaactactcctaccccaccaagcaagctgctctgaaaagccattatgcagatgtagatcctgaaaaccagaactttttacttgaatcgaatttggggaagaagaagtatgaaacagaatttcatccaggtactacttcctttggaatgtcagtatttaatctgagcaatgcgattgtgggcagtggaatccttgggctttcttatgccatggctaatactggaattgctctttttataattctcttgacatttgtgtcaatattttccctgtattctgttcatctccttttgaagactgccaatgaaggagggtctttattatatgaacaattgggatataaggcatttggattagttggaaagcttgcagcatctggatcaattacaatgcagaacattggagctatgtcaagctacctcttcatagtgaaatatgagttgcctttggtgatccaggcattaacgaacattgaagataaaactggattgtggtatctgaacgggaactatttggttctgttggtgtcattggtggtcattcttcctttgtcgctgtttagaaatttaggatatttgggatataccagtggcctttccttgttgtgtatggtgttctttctgattgtggtcatttgcaagaaatttcaggttccgtgtcctgtggaagctgctttgataattaacgaaacaataaacaccaccttaacacagccaacagctcttgtacctgctttgtcacataacgtgactgaaaatgactcttgcagacctcactattttattttcaactcacagactgtctatgctgtgccaattctgatcttttcatttgtctgtcatcctgctgttcttcccatctatgaagaactgaaagaccgcagccgtagaagaatgatgaatgtgtccaagatttcattttttgctatgtttctcatgtatctgcttgccgccctctttggatacctaacattttacgaacatgttgagtcagaattgcttcatacctactcttctatcttgggaactgatattcttcttctcattgtccgtctggctgtgttaatggctgtgaccctgacagtaccagtagttattttcccaatccggagttctgtaactcacttgttgtgtgcatcaaaagatttcagttggtggcgtcatagtctcattacagtgtctatcttggcatttaccaatttacttgtcatctttgtcccaactattagggatatctttggttttattggtgcatctgcagcttctatgttgatttttattcttccttctgccttctatatcaagttggtgaagaaagaacctatgaaatctgtacaaaagattggggctttgttcttcctgttaagtggtgtactggtgatgaccggaagcatggccttgattgttttggattgggtacacaatgcacctggaggtggccattaattggcaccactcaaactcaaactcagtccatctgatgccagtgttgagtaaactcaactactatgaaatttcacctaatgttttcagtttcacttccttttgaagtgcagattcctcgctggttcttctgagtgcagaataagtgaacttttttgttttgttttgtttttttaagaaacttatctgtatgttagaaatggatatgaacaacaaaaccacgagtctcgggttaagggaagtgacaattttattccattccagagaatggacaaactcttaacttttatcaagccacatgcttggctgtgtcattgtttaacttggatattttatgattttacttgaatgtgcctaatggaaccatttgatgtgagaaacaattctttttaatttacagcaaaatattgaataaccattgacaaaaacactattattttttgtaccaaaaatacttaaagacctcagaagcactcttttacttttaagaaattgcttttttgaactttattcagaagcagttatcaataaattccataaaataatgtcattggtatttaaaaatgaatattaatataatgaaatggtttgcctttttgtaggcataataagccaaatacttttttacccaaaataatttttagagaaaatgatgtaatgaaaaattgtaccatgaattaggagcatagttttttccatttaaacgtcaccattacttaaaagatgattgattattgctataccaaatcagatgaactctgttcatcacttttcttctctgtccccaaacaatttggttcattcagactgaaatgtttgtgtcttcaacttattagaatggaagataatgcagatatttctgtgggaaataaaataactaattttgaggtaccaaatagtgcaattgggtaaaacagggtttattcagttgcatctgtctccagtgttgtattgacagctctgggtctttttttgggccagcccttttttgacattgcttccagcagtggaaaatgggcatttgatggcaataggccaaaattattgtgtccagagagtacactttttcaaaatgctcacctactggaagtgtgaattacttgacaatgtatggcttagttgtgttcatgttttgtctacagtagaggtctaatccacaggttacacctatgtttgatatgatataagttctctttgcgtaggccactgggtttctcatgcagtaagctttataaaaactcatttgcactggactgtcatctcattcttgtacaacgtagaattacttgtttacatccaacaaatggttagctagggaaaacagtgcaaactgagtgttagtagtcattttggtccaactgcatgtcaacccttccatttcaatcccagttagaaatgaaaataattactttgaaacttggctttaagagcacatttatcgtacgtcacagtgtatggtgaatatattattaaataatgtggtacttcgctcatcaggcataatgtctaaaatctaatatacataattccattaagtggttgaaggaagcaaataatggaattgtcaattggtcatctggctgtaaggtttgcccttgaactaaaaatgttgtttggggcaagggccagaaatgtggagacatggtttttgttacgcattcttgtattatatgtgactaaatttacaaacaagatacatgtgtaattaaagacccttatggaactggaagacgtcttgtagtgctacattgggtgaaaccgttggtccatttttgtctgtttctatgaagataaaataattgggggccatctagaaatagaaaggcagtgggaagacagattctacggcactgctttcatttaattgggctttaggcactccattcgaatgcagaacctcacctctagttgagaccaagaattggcaaatttgcatgagctcctggaaagagttgctgactttgtatctaagacctgccagggaataccaagagttgtttctacagacttttttttttttttttgtatgggagaagatactgtggcaaccaggaaggaatggaaaaaaaattcttttctctacagcaaattaatgtgaggaagctcctccaatcctctggctatttaaggttcaaaatcaagtgcctagggaaaattccaatggatgattttctgggagctatcttgtctaccttgaggttcctgaacaatgaattcccattaatgagcagtcttcagtattaaaaccactgtcttgtcacctcattttgcattactgtcttccgtggatgtttcagttacaactgtaatgttatttatagaacaacattaatccattaaagctaacctatttttcaatatttatgataatctatgtacatatattgtctgtccatatgtatttgtaaataggttgtatataatgtcaggtttgggtcttgggttcaagtgtatatattcctgtaagtttcttaactgcattttgatgaattcacattatgtaactataagaattgtcccaaaagtacctgtacagaaaattgaatattgaaaaattgacaaattgtgtacaaacactaaaaaaaacttgtttaaattgtatttgcaataaacaacatcaaattttttcatgaaatcttggtacaaattcagatctcttatttaaaatttaaataaggaatacattttcaaaatgcagtaatcaaaatgtgatctagtgtaatgaaataaaatgtgatctagtgtaatggaagacctttgagaacctgggtgtattaactttgtgtatatagtgtaaatatccccactgtactgttagaggccaacaattctagtatggcttgttggcaaagagtgctacaccgtttcaatgaaacaatgtatgtttgttttaactgaactaaaataaatacatgcttaatcctg

SEQ ID NO: 4222 - DNA, 5243 bp, Homo sapiens
agctcaggtgcctaaaaggccagaggggcttctcaggccaacctccttttgatggaatccacattgtcaaccatttaataggagatgatgaatcattccattcctccgatgaagattttatagataattccttacaggaaactggtgttggttttcctttgcacggaaaatctggttcgatgtctttggaccccgcagtggcagatggtagtgagagcgaaacagaagacagtgtgctggagaccagagagagcaaccaagtggttcaaaaggagcggcccccgagaagaagagagtcgtattcaaccactgtctgaccatcactgtgacctagactatggatttatttaagggatcagttatcatatgattagggctttttggaaataatttgtttcatatatatatatatatatatatatatatattttacagtcttatctgcctttttatctttgccaaatctttaccactgatttaccattgccataaagtagactggtatatggttaatgtgtaaaacaaggttctaacagtattactgaatattaatgtttcttgtttagaaaatgcaactatatctatatgtgggaaccattctgaagttcaaaactatggaaaattgaattttcttcagacaaaactgctcttgtgcaatattttatgctcagtgagcaaattgtgtatttatgtttatcaatttgttctcaaggtggctgtctacagacatttgaccaagacatacatctgatttaccttgtgtttttttttttattgttgtttttttttttaagacagagattcagtctgtcacccaggctggagtgctgtggtgtgatcttagctcactgcaacctccgcctcccaggttcaagcaattttcctgcctcagcctcccgagtacctgggactatatgtgcgcaccaccacgcctggctaattttttgtatttttagtagagatggggtttcaccatgttggctgggctggtctcgaactcctaacctcaagtgatccacccgcctcagcctcccaaagtgctgggattacaggtgtgagccactgcacccagcctaccttgtctgtttgtgtctgggaggttttttttttctatttttattttttcatgaaaattattggtgggccactgaaagtccccacacacaaagcctttattctatataattttataaacacaaattcatgattatctgttttgagagttttaagttttgttttaatgtttaacttttatgtgcatatgatgcttccatgtgttggttactagagtagtaggttaactacagacatactgttttgtttgtacatatttataaatctgtaccacctaacattgaacatcattttatatgaagaacatacatgttgcaaaatgactgctttcagcatctaacaggacttctgtaaataataggttaaaagttaaaaataaaacactaatgttttaagagctttagtattttgcttagcattcaatactagcagattcataactgatgcctgttcaaaaacactgttggtggaatcttttatttcatgtgtatgtaactactaaatttttcatgactgaagaggttatagcacatattagttagtgctaatattctactgaatataatttaagcaatgggctaaggtccaagaaacatagcaattatatctacaaataatctattaacatgatcttcagaatctctagtttttgttctatagataaagccataagaatcctttcctaccagtttttcctatatcatttagatattatttcctagaaaacaggatgcctgtcactgataagttagagaaaacacccaaattatacttgcactatggaaagacgacatgaatatgttgactgggtactttctactctcatttttgttagcctatgaaaaaaaaaacattttgttaacctatggaaaaagccttggaagagaaaagtagaattcagtatgtatggaggcacagttttgcacagtatgttgcatgcggcaaaaaaaaaaatatgaaatagagtagaagagataaaagtagttttctgtcaaaaactaggagttaagccttcaggtacgttgtggactaggctttccagcaaggtttttgtagctatttgcttgcctgagaaatgaaattgaaaacatacccctgcgtgtctgtccttaacaccaggctaaattctggtggttaaataacttatctgtggttacaagctagtaagtagcagagccaagattttttttaatatagagacaggtgtctcactgtgttgtccaggctggtcttgaactcctggcctcaagtggtcctcctgcctcagcctcccaaagtgtggggattacaggtgcgagctactgctcccagcaagagccaagattttaacctagatctccctaacaccaaagcttttgaaagggttcagctgaagaatttctcaattctctgttttgttttgtttttatttttgttttttgagatgaagtctcactgcactcaggctggagtgcagtggtacgatcttggctcactgcaacctccacctcccgggttcaagcgattctcctgcctcagctcccaagtagctgggactacaggtgcacgccaccacaactggctaatttttgtatttttagtagagatggggtttcgctatgttggccaggctgatctcaaacttctgacctcaggtgatccacccactttgacctcccaaagtgctgggattactagacgtaagccaccacacctggcaattccctgcttttttgacaacataatttaaatgaatttgatttaaatgtttcctgaatatatatacagatagatagatgagtatcaacacttacaagctctacacagtctgtgagtgtagatactacttactcgtaggattgtcttgtgctttggggatttttgttcggagttctatactatcagcccagaaagctatcaatgtccaagtgaagtgagatgatgcatggccacattattgctttgaccctcacatcaagaaatctgaatgatctggaccaggggtcagcaaagtgcagcctacaagctattgcagtcagctgccagtttttacttttttaaatagttgggaaaaaaattccaaagactgatattttgtgtcacatgaaaattatatgaaattcaaattgcagtgtccataagtaaagttttattggggcacacccatgctcacccttttaaatattgtgtatggccgctttgtgctacagtagcagagttgagtcattgcaagggagaccatatggcccaggtagcctaaaatatttatctgatcctttacagaaaaagtttgctaacccttgataacagatactctaaaatgcaggtttttcttcttcaatttagctcagtggtaggtcaaattgtttgcttttgctattaagcttatgatttggaaacgtaaaatttcatggtggatattataatcagaactattcaaaagggaaaacatgccagccattttatatgatgaagtctcttattccatagaaaactgtagaaagatatctgtatctttggagaaggagaaagaaaggaaagaactccagaatcccatcactgttctttaaagcatgcatcacagacctttaagagtatgctttattgagtaaaggttatagtttgactttaagataagaaattttctagaatcatgtttgaattctaaacgttgatattcttaagtaccatttctgattaggaattaggtgttaaaagaatcatggtaaggaaaccttaatccgttgaaactcttgtaatttggacaacaaaaaactagaaataacactcttttctttgaagatctgattcaaatacaccttagaagagtttaaaatctcccaggcctttaggatgcaataggatattatgccttggtttgactccttttcattcaaattaatgtaagtatgttgttcaagactttgaagcattgaacaatgttctcgatgaattttatttaattactgacattttgtgatatttgaatgttattaagttaaacacttagagttgagtatattcaggggagaaaagtgaatgaaatgactcataataagaaagcttgctcccttgggacagttaccttcctggtgtcattgccatcctgggttgacaagctgagagtagaggatacaagtgatgtgaataaaatggaaattgcattgagttaatgaaacagacacttttagatcaagaaaacacttcaacagcctttttagaaattggcacactcctatagtcccacctactcaagaggctgaggcaggaggatcactagagtacaggagtttggggctgtagtgtgtaatgatcacacctgtgaaagaataaccactgcactccaacctgggcaacatggcaagaccctgtctctttaaaaaaaaaaaaaatcctgggaaaagaagtcaaagatgtaattttacacaatttctgcccccaccgtcttttttgtttgtttgtttgtttgtttgttttttggctagatactaggtattcagtgtttgctgagatgacaggtttctactaatcagccagttatttgggaaggagaaaaactttttctcaattctgaacatgatgcagcttgttaactctccagatagtgcctttgattgaaaataaggtctacacctttttaagtatattatttctgacatcgtaagaaataatttagttccttattctcatttatcttttatataatgtactgtaatattcaggtttaaagtaaaataagtatatgaattatattttggtaaaactgtttcatgaccagcttgattaatgtatattaacataccagacattgacagcgaacatttcatgaaatcagttatttacttaccaaaacaatgagttttagcttgaaagttactgctgctctattattaacaaaactaagttttaaaaattaattttaattctactgaagtttaatttctggttaaaggtatagtggatgctatttatgatccaagtttttacatcacatccattgatctgcctatcccttctttttactccaaagaggagatgatagaataatacattcagtatactaccaagaagcaaagttataatgtgtttcattttgctattggaattttttattgtaacattgtatgataacctgaaatgtttacttgtgccttttctttaaacaattaaagttttccattttataagaa

SEQ ID NO: 4223 - DNA, 807 bp, Homo sapiens
ggtgccttcacctgctatttggatgcaggccttgccagaactaccactggcaataaagtttttggtgccctgaagggagctgtggatggaggcttgtctatccctcacagtaccaaacgattccctggttatgattctgaaagcaaggaatttaatgcagaagtacatcggaagcacatcatgggccagaatgttgcagattacatgcgctacttaatggaagaagatgaagatgcttacaagaaacagttctctcaatacataaagaacagcgtaactccagacatgatggaggagatgtataagaaagctcatgctgctatacgagagaatccagtctatgaaaagaagcccaagaaagaagttaaaaagaagaggtatgtcgtctttttttttgtcttttcaagaaaacaggttgggaatggttcccacgtggggcagactgttggtgtaattgtgcaaactcgatcactagctctgcgtgatgtggcagaagcgaagggaaccaggtttgcaaaagtaactgtggtgatggaaatgtgttagcctcagacactactgaggtggttctttctatcctagtacagtctaagtactggttactgcatttttttattggctgacaagttgctttttgttgatctttcatgttttgatctttaaatggaatagaaagtaatacttaatgaacatgtaagcataaagtgatgtgatggcccacaaatacaatgtatagtaattaaatcaatgtatttaacatattcacctcaaatacttaacactttgtggcaacaacatttgaaattt

SEQ ID NO: 4224 - DNA, 3567 bp, Homo sapiens
gttactcaaagactacctactgcgtggtgctccaagtgaaattcgtgaagaattagaaaagcagctttattcttgtattgctctcaaagtcacagcaaatcaaatggaaatggaacattctttgatactaaataacctaaaaacattattgtggaagaaaatttcctacactaatgactcttagttcatttggacataattaccattttaagaaacctgccacttttaaagaacaattttgagcattaaaaaaaaatggcttcaaattccggccagttacacaaaactccttccccccaggcctgagaagccatcagtatgtgatcactgaagtaatggcaggtgtaggatcaacaggtccccaagatgtcattcctgcccttttagaagccctgttacatctccgaagtacattcattgtgtaactattttgactgactttaaaaaccaatgctgtgaaaagcttcattccataaacatcaacagtgagtgatttgtagatttaccttagccaaaataccaatgctggaagcattgtgtttgcattgaagctgctgttcaacaagaaaatttataaatttactaatgtcttagcatggtaaagtttgcacattaacagaaattaagactgcaaagcaggttaaacttgcttctttataaaacagatgttgggttaatagcatggtttactgtattaaagacttatacacccatttttaacctcattcagacatcaagttatgtgtagcttcacaatggttcaagtggcttacttcaagaaatcttatacttgacagtacaccaattttattgactaaaaatggatgaactttcctaaagattcaaagggcccatcttagtatcacgcagctgactgagcccttcaaaactgacatcttaaggcccaatcaagatccacatatcctgattttgaactatgtgaaagtgggactgtaagtgcaagactaaaataaattatagcagactttttagtaataactttccattttcaaacagtatatcctgtgggccaaagggctatttcttaaagaggcatgtaaatgtatttatttatctaatgtttttttccccatgtaaacttgatatacaaggtttagtatttgctcctctttcatattattttcacacgtatactcagatttggcatgtacctttcaacatctccataaaattaaacaccttttggagaaaagaaccactattttctgctcaaaggtttcgcctacctaaagtggaacatgttaaaaatctatgtgaccatcactggacagctttctctcaaaactttccttcaacgccatggattagcaccagttttgtttactttaaggtacttttcccattcatcatctggttataataaatggatggaagaaatatttcccactgatggttggtctgttgcttgccaaatttttagggagagctgttcatcatacaacataagggataatgactcctgtcaggtaaaacagaagcccaagaaataacaactttttttcttaaaaagttagttacacttgttttcttggagaaaaaaacctgtcaactcctttgcttttccaaaatatttcagggtatttcctataaggttcataagaataagagcttaacacagaaatagttgctgttcataagtttattatctatatctgaaaaaatcatagaaaattgctgggtttagctctcagcagcccgctcctgagctctgaggaagcttgccttcttttgagctacccgatccttcttctgagcaagggacattttgggacggttccacctacaaaagataggaatatatattttttaaactataactgaagagaatagaatatttaatttaaaattttaataaaatttaattttgatagagaatatttaagactttgcaatcagaaggttaaataatccaagttcaaatacatttacttatgtatgatcttaagctaactttcccaaaccccaacttctgtgatgtcctactaccatagggccaaaagtcaaatagaagacatgttagattcagtaataccacttctaggtatttgcccaaatgttttgaaatcagtttgtccaagagagtggcactcccatgttcattgcagcactatatattaatagcaacagataaatggataaaggaaatgtggtatacatatacataatggattattacccagtctttaaaaatgatggaaattctgtcatttgcaacatgaatgaagtggagaatattgtgctcagtgaaataagccaggcacaaaaagacaaatacttcatattcatatagaatctaaaacaatggaactcacagaagcagagagcagaatggtggttacagaggctggtgggtgcaaagaatgggcagatgatagtcaagtataaaatctccaacaggaggagtatgattttgtttttagttctattgcacagcatgatgaatatagaatatcgtacatttcacaattaagagaataaatttcaaatgttgttgccacaaagtgttaagtatttgaggtgaatatgttaaatacattgatttaattactatacattgtatttgtgggccatcacatcactttatgcttacatgttcattaagtattactttctattccatttaaagatcaaaacatgaaagatcaacaaaaagcaacttgtcagccaataaaaaaatgcagtaaccagtacttagactgtactaggatagaaagaaccacctcagtagtgtctgaggctaacacatttccatcaccacagttacttttgcaaacctggttcccttcgcttctgccacatcacgcagagctagtgatcgagtttgcacaattacaccaacagtctgccccacgtgggaaccattcccaacctgttttcttgaaaagacaaaaaaaaagacgacatacctcttctttttaacttctttcttgggcttcttttcatagactggattctctcgtatagcagcatgagctttcttatacatctcctccatctgaaacaaaggaaagcaaacagtacttggtttcatttcatgtgccctactatattaatgcaaccataacttatcttgtccttctaagccagattctcaaaaggaactaaactaaatcaatgttggtaaacactttaacttctaaatgtaactcaccttttcctaacaaattcccaattttcaccttatgcaatgtgaattatcactacagaactccatcttactcaagaaaaaaatcaggccaggtgtggtggttcatgcctgtaatctcaagcactttgggagtctgaagtgggaggatcacttcagcccaggagtttgagaccagctaaggcaacacagtgagacctgtctccataaaaaaactaattagccaggtggcaattattaatggtggcatgcacctgtagtcccagctacaggactacacgtgagtccaggaggtcaaggctgcagtggcacaatcacagctcactggaccccagcctagatgacagaatgagacctcatctctaccaaaaattaaaaaaaaaaaaaaaaaattagcaggg

SEQ ID NO: 4225 - DNA, 664 bp, Homo sapiens
ggagaccagtatgatgtctgtgccatttgcctggatgaatatgaggatggggacaagctgcgggtactcccctgtgctcatggtgaggccctcactgcctgcccatgcccctctgccaccagcagccaccaggtgcttcaccttgttcctctctgcagcctaccacagccgctgcgtggacccctggctcactcagacccggaagacctgccccatttgcaagcagcctgttcatcggggtcctggggacgaagaccaagaggaagaaactcaagggcaagaggagggtgatgaaggggagccaagggaccaccctgcctcagaaaggaccccacttttgggttctagccccactcttcccacctcctttggttccttagccccagctccccttgtttttcctgggccttcaacagatcccccactgtcccctccctcttcccctgttatcctggtctaataaccccccacacatacacctctggtgacctatttgcacagaccgtcgtcttccctccagtcttctgagggataggggacattccatcccaagcttctcccttacccacacctatccttttgaggggctttggggtggagctggggcaagcagagggactgggtcttcacttcttgggctaataaaattgtttctttgtggact

SEQ ID NO: 4226 - DNA, 2998 bp, Homo sapiens
  misc_feature (481)..(481): n is a, c, g, or t
  misc_feature (1825)..(1825): n is a, c, g, or t
  misc_feature (1832)..(1832): n is a, c, g, or t
ggtgcgcggagggcgcgtctctgacggaagccggggcggacggtcggagtccggaagaaaaacagtccgcgacagctaggcgcgtgagaccggccgcccgcagggctgctctggccgggacccgctggccgggagacgcgaacctgccggaccaccgcgcggggacgacggcggccatgagctcgcggaagctgagcgggccgaaaggcaggaggctcagcatacatcaggaggtctgcctgatcccatggtgaaccccgggaatccgaaatcagattgagataagatcctttagggaagtgacttagcctggtctcttgcctgctctttcacggggaacaacgctaatcgcccacttagtctaagtcacgatgcttggatttgctgctaatcgtcggatttgagagtgggaacaagaaatccggacttttgctctccatcctcttagacatacacgtcgtgacttggaacgtggcttcgncagcgccccctctagatctcagtgacctgcttcagctgaacaaccggaacctcaatcttgacatatatgttattggtttgcaggaattgaactctgggatcataagcctcctttccgatgctgcctttaatgactcgtggagcagtttcctcatggatgtgctttcccctctgagcttcatcaaggtctcccatgtccgtatgcaggggatcctcttactggtctttgccaagtatcagcatttgccctatatccagattctgtctactaaatccacccccactggcctgtttgggtactgggggaacaaaggtggagtcaacatctgcctgaagctttatggctactatgtcagcatcatcaactgccacctgcctccccacatttccaacaattaccagcggctggagcactttgaccggatcctggagatgcagaattgtgaggggcgagacatcccaaacatcctggaccacgacctcattatctggtttggagacatgaactttcggatcgaggactttgggttgcactttgttcgggaatccattaaaaatcggtgctacggtggcctgtgggagaaggaccagctcagcattgccaagaaacatgacccgctgctccgggagttccaggagggccgcctactcttcccgcccacctacaagtttgataggaactccaacgactatgacaccagtgagaaaaaacgcaagcctgcatggaccgatcgcatcctgtggaggctgaagcggcaggcctgtgctggccccgacactcccataccgccggcgtcacacttctccttgtctctgaggggctacagcagccacatgacgtacggcatcagcgaccacaagcctgtctccggcacgttcgacttggagctgaagccattggtgtctgctccgctgatcgtcctgatgcccgaggacctgtggaccgtggaaaatgacatgatggtcagctactcttcaacctcggacttccccagcagcccgtgggactggattggactgtacaaggtggggctgcgggacgttaatgactacgtgtcctatgcctgggtcggggacagcaaggtctcctgcagcgacaacctgaaccaggtttacatcgacatcagcaatatccctaccactgaagatgagtttctcctctgttactacagcaacagtctgcgttctgtggtggggataagcagacccttccagatcccgcctggctccttgagggaggacccactgggtgaagcacagccacagatctgagccaggatgggagtgaatcccaggcggaggccagagctggcagccagctctgcctttccactgccgggagtgnctggggncccagcctggccccctgaagagacagccaagtgtcgtccacatactcctcccagagtgagctctaaccaggctcatttgctctctccactactcatctctggaattagccgcttaaatacaggtttttgttgctgagatgtgagtgaaaccagctagtgtgtcaacagtgaagacctggggacagttctgcgtctcatttctggattcctaccccctcttctagtcttgcccaagtagtcctgccaggcacatgccccatttggcacaggcctgcattcttgtcgtgccgtcctgggcctcaggctgtctgggaggggagatgctcacatttgtacaggctacatagactggtgcaagcagtgctggattccaggagtcttggcatctcatagcttgtccccgtgaggagtgagcagagggtctgggatttctgctttcagcaaaagcagtctgactcagtgggcagaatggaggggcccctctagccaggctcttacgccatggttatgagcaggttgatgagggtccttcggccagcacaaccttcctccctactcacggcatggagtctgactgcatggaagttccagatcctgacagagagaactgggaaggatccaggttcgcttccgttggtagcttgagtcccatgcctccaccctgccatctgaggaaggggtgacaagtggtcaaggagctgtggccacagacttttccagggtggtccttggcaggtgaggtgcgtctgtgccacccttgtcaggagccattgacgacgggccccccctggaccccccgggacctcagagtgggggcaggcagaagggagaaccagctcaagacattttggaggatctggccctggggttcttcagagaacaccctctaggggctttggggacatggcctgtccccacatccagcacttgcctccgccatggtcactcggcagcccttttcccaggagaagacacctctgggagcctgctcagtgcttgtcctgccatcctgtgtcctgggactgagggttactccagttgctctgtgttgcatactctcccccgcaagcctgtgtatgaagaattgtcccctggcttccagcaggccatggctggctgttttgtgactgttacattgtgcaggggtaattattagcgtggctttt

SEQ ID NO: 4227 - DNA, 2064 bp, Homo sapiens
aggtgggggccggggcgggatggctgcagcggcggccggggccgggagcgggccctgggcggcccaggagaagcagttcccgccggcgctgctgagtttcttcatctacaacccgcgcttcgggccgcgcgaaggacaggaggaaaataagattttattttatcatccaaatgaggtagaaaagaatgagaagattagaaatgtcggattgtgtgaagctattgtacagtttacaaggacatttagcccatcaaaacctgcaaaatctttacatacacagaagaacagacagttcttcaatgaaccagaagaaaatttctggatggtcatggtatttacacacacagtgtatctttctgaaattgtatggtgaagttatgggtgatctttactgttcagaatttaggaaagttctctggctgttgcatccaagtaaaattaaaataaaattggttgcaattttaaaatcaagttcttcctatttgctttattcattcttggggctgttttaagaagttgtgtttctggtgctgtagcatgttcaaagtttttaaattaaggcaaaataaacatggtctaatgaattcattgtataatttcagtttatcaaactttgtaggttgttcggaatcctataattgaaaaacagagtaaagatggaaaaccagttattgaatatcaagaggaggagttgttggtaatgtgtcattgtttgtttatttatttatttttttaaatgtattgctgagtatgttgaatgccttacttggtcggatttaaactaggaggcttttgcagaagtttctcggggtatatagcaaaggtttatgtttatcatttacatgagcacaatctttttaaaatgtatatgcacccaatctcactaataccttctactcttcatctatattgaaagccctcctaaagtaaggcttactgattgacaaattagagtttaaacacttctggctgggaacagtggctcacacctgtaatcctagtactttgggaggtcaaggcaggcagattacttgaggtcaggggttcgagaccagcctggccaatatggcggaaccctgtctctactaaaactacaaaaactggccagggatggtggcgcacacctgtcatcccggcttctcaggaggctgaggcaggagaatcgcttgaaccggggacgcaaatgttgcagtgagccaggattgtaccactgcgctccagcctggacaacagagcgagactccatctcaaaaaaaaaaaaaaaaaaaaagaacgcaaacactttttttcagcacgcaactattgtgggatgaagtttataaacattatactgtttggccaagagtcagtgtacctttgccatctatccagtagacattgtttttcccttgaactgagctgtgtgctgtgttttcgcgtctgcaggacaaggtttatagctcggtgctgcggcagtgctacagcatgtacaaggtaagcgtggcgttctttctcaactcagagtccaaccacttacccctatctctaggctccagggttgtttaaagagaagtctataaatgactgcaaagtgactctgtatttgtcttagagaagaaaataatgaggcctttgaaacaggtagtgaggtttatgcctacatttattcagtaagtattgaactcccttctcttttctcagccttatagtaggaatgtgtccccattgatgaaaaagtgtatctatgtgctcaaggaacatacagaatgcagataattttatgatttaaaagtttcagtgaggcagggcacagtggatcacacctgtaatttcagcattctgggaggctaaggtgggaggattgcttgagcccaggaattcaggaccagtctgggcaatatagcaagaccccatctctacaaaaaaattttataaaagttagccaggtatcatggtgcatgcctgtagtcccagctacctgggaggctgaggtgggaggatcgctcgcaccttggaggtcgaggctgcagtgaactgtgattgcaccactgcactctaccctgggcaacagcgagattccatctc

SEQ ID NO: 4228 - DNA, 1074 bp, Homo sapiens
ggtagtagtcccaagttctcagagatctcagtgctgatctgggacgatgcccgggagggcaaggactccaaggagaagctggtgctggagttcaccttcaccaagccagtgctttctgtgcgcatgcgccatgacaagatcgtgatcgtgctgaagaaccgcatctatgtgtactccttccccgacaatccccgaaagctgtttgagtttgatacccgggacaaccccaaggccgcccaccccaccccccatcttcacaccctagggctctgtgacctctgccccagcctggagaagcaactgctagtgttcccgggacacaagtgtgggagtctgcaacttgtggacctggcgagcacaaagcctggcacctcgtctgctccattcacgatcaatgcacatcagagtgacatagcctgtgtgtctctaaaccagccaggcactgtagtggcctcagcctcccagaagggtacccttattcgcctctttgacacacaatccaaggagaaactggtggagctgcgccgaggcactgaccctgccaccctctactgcattaacttcagccacgactcctccttcctctgcgcttccagtgataagggtactgtccatatctttgctctcaaggatacccgcctcaaccgccgctccgcgctggctcgcgtgggcaaggtggggcctatgattgggcagtacgtggactctcagtggagcctggcgagcttcactgtgcctgctgagtcagcttgcatctgcgccttcggtcgcaatacttccaagaacgtcaactctgtcattgccatctgcgtagatgggaccttccacaaatatgtcttcactcctgatggaaactgcaacagagaggctttcgacgtgtaccttgacatctgtgatgatgatgacttttaaggaccctgggggctgtgctagggacctgcagtggcagaactgcagagctgagccttggcagtggggcgtgcttggaagccaccagccagcaagcattaatggggctggtgcccactttccactcagcagagctatgtctaaataaagagctcacttcccccc

SEQ ID NO: 4229 - DNA, 1174 bp, Homo sapiens
gttgcaggcacccaggtgttgactgcgtgtccattgttgttatagttggttgaatctgtcccattaattctccttccccaggcaagactcgtggctgtgacccatgggcctctgaggaggcgttgtaagtccgcccagctccccacttgctgtgctctcactcaatgcgaagggaaccaaggtaccagggccaagtgggtccagacatccacacggattctgaaagggcaggtcaagcaggcacgtggggcccaggttaccccttattccccgctgtggcatgggaagctgggaagggctgggggttggggtatcatgggatgtgcttccttaacggttcctttgtgtcactgccagactttgtccagccatcagccacggcctctcgacagcaccaagatggaagtcaaaggtcagctgatcagctctcctaccttcaatgccccagctgccctgttcggagaggctgccccccaggtgaagtcagagcgtctgcgggggctgcttgaccggcagcggaccctgcaggaggccctgagcctgaaacttcaggagctccgcaaagtgtgtctccaggaggcggtgagggcctggccctaggggtatcaggcggggaggttgggaggaggtgaggagctggggcccctaggtagacagacttgggtggcaattcctcaaccacttgtcttggctgtagattccctgtcacctactttctcctcaaagctcagcttagatgtgttagaatgaatgaaataggctgggcgctatggctcacgcctgtaatcccagcactttgggaggccgaggcaggtggatcacctgaggtcgggagttccagaccagcctgaccaacatggagaaatcccgtctctactaaaaatgcaaaattaggctgggcgcggtggctcacgcctgtaatcccagcactttgggaggccgaggtgggcggaacacgatgtcaggagatcgagaccatcctggctaacacggtgtaaccccgtctctactaaaaatacaaaaaattagtcaggcgtggtggcgggcacctatagttccagctactcgggaggctgaggcaggagaatggcatgaacccgggaggcggagcttgcagtgagccgagattgcgccactgcactccagcctgggtgacagagcaagactctgtctc

SEQ ID NO: 4230 - DNA, 3275 bp, Homo sapiens
tgggcgggggatgactcacagcccatcccatctcccagacgccgcccgcccgcgcagtgctagctccatggcttagcggaggaggcggcagtggcgagctggggggaggggggactcttattttgttagggggaccgggccgaggcccgaccggcctggcagggctcgcccggggccgggcgtcatgtctcatgcggccgaaccagctcgggatggcgtagaggccagcgcggagggccctcgagccgtgttcgtgctgttggaggagcgcaggccggccgactcggctcagctgctcagcctgaactctttgcttccggaatccgggattgttgctgacatagaattagaaaacgtccttgatcctgacagcttctacgagctcaaaagccaacccttaccccttcgctcaagggggctccaggacccctgccatgtcgtcatcttcttcatcgagggtcttgctgcggcagcagctaatgcgggcccaggcgcaggagcaggagaggcgtgagcgtcgggaacaggccgccgcggctcccttccccagtcctgcacctgcctctcctgccatctctgtggttggcgtctctgctgggggccacacattgagccgtccaccccctgctcaggtgcccagggaggtgctcaaggtgcagacccatctggagaacccaacgcgctaccacctgcagcaggcgcgccggcagcaggtgaaacagtacctgtccaccacactcgggcccaagctggcttcccaggccctcaccccaccgccggggcccgcaagtgcccagccactgcctgcccctgaggctgcccacactaccggccccacaggcagtgcgcccaacagccccatggcgctgctcaccatcgggtccagctcagagaaggagattgatgatgtcattgatgagatcatcagcctggagtccagttacaatgatgaaatgctcagctatctgcccggaggcaccacaggactgcagctccccagcacgctgcctgtgtcagggaatctgcttgatgtgtacagtagtcaaggcgtggccacaccagccatcactgtcagcaactcctgcccagctgagctgcccaacatcaaacgggagatctctgagaccgaggcaaaggcccttttgaaggaacggcagaagaaagacaatcacaacctaattgagcgtcgcaggcgattcaacattaacgacaggatcaaggaactgggcactctcatccctaagtccagtgacccggagatgcgctggaacaagggcaccatcctgaaggcctctgtggattatatccgcaagctgcagaaggagcagcagcgctccaaagacctggagagccggcagcgatccctggagcaggccaaccgcagcctgcagctccgaattcaggaactagaactgcaggcccagatccatggcctgccagtacctcccactccagggctgctttccttggccacgacttcggcttctgacagcctcaagccagagcagctggacattgaggaggagggcaggccaggcgcagcaacgttccatgtaggggggggacctgcccagaatgctccccatcagcagccccctgcaccgccctcagatgcccttctggacctgcactttcccagcgaccacctgggggacctgggagaccccttccacctggggctggaggacattctgatggaggaggaggagggggtggtgggaggactgtcggggggtgccctgtccccactgcgggctgcctccgatcccctgctctcttcagtgtcccctgctgtctccaaggccagcagccgccgcagcagcttcagcatggaagaggagtcctgatcggcctcacccctcccctgggactttcccacccaggaaaggaggaccagtcaggatgaggccccgccttttcccccaccctcccatgagactgccctgcccaggtatcctgggggaagaggagatgtgatcaggccccacccctgtaatcaggcaaggaggaggagtcagatgaggccctgcaccttccccaaaggaaccgcccagtgcaggtatttcagaaggagaaggctggagaaggacatgagatcagggcctgccccctggggatcacagcctcacccctgcccctgtgggactcatccttgcccaggtgagggaaggagacaggatgaggtctcgaccctgtcccctagggactgtcctagccaggtctcctgggaaagggagatgtcaggatgttgctccatcctttgtcttggaaccaccagtctagtccgtcctggcacagaagaggagtcaagtaatggaggtcccagccctgggggtttaagctctgccccttccccatgaaccctgccctgctctgcccaggcaaggaacagaagtgaggatgagacccagccccttcccctgggaactctcctggccttctaggaatggaggagccaggccccaccccttccctataggaacagcccagcacaggtatttcaggtgtgaaagaatcagtaggaccaggccaccgctagtgcttgtggagatcacagccccacccttgtccctcagcaacatcccatctaagcattccacactgcagggaggagtggtacttaagctcccctgccttaacctgggaccaacctgacctaacctaggagggctctgagccaaccttgctcttggggaaggggacagattatgaaatttcatggatgaattttccagacctatatctggagtgagaggcccccacccttgggcagagtcctgccttcttccttgaggggcagtttgggaaggtgatgggtattagtgggggactgagttcaggttaccagaaccagtacctcagtattctttttcaacatgtagggcaagaggatgaaggaaggggctatcctgggacctccccagcccaggaaaaactggaagccttcccccagcaaggcagaagcttggaggagggttgtaaaagcatattgtaccccctcatttgtttatctgatttttttattgctccgcatactgagaatctaggccaccccaacctctgttccccacccagttcttcatttggaggaatcaccccatttcagagttatcaagagacactcccccctccattcccacccctcatacctacacccaaggttgtcagctttggattgctggggccaggccccatggagggtatactgaggggtctataggtttgtgattaaaataataaaagctaggcgtgtttgatgcgcttttaactttggc

SEQ ID NO: 4231 - DNA, 1020 bp, Homo sapiens
agttactttcaggctcggggagtgaaggcctcgttgagagaaggtctcattcggtgttttgggaagagagtcgtgtgggcccaggtatcgtagcggcgacacgagagagacgggcggtgtgacagccttccactacctgcacgagtgtattggtctgtctgctatcagctatgccgctgcccgttgcgctgcagacccgcttggccaagagaggcatcctcaaacatctggagcctgaaccagaggaagagatcattgccgaggactatgacgatgatcctgtggactacgaggccaccaggttggagggcctaccaccaagctggtacaaggtgttcgacccttcctgcgggctcccttactactggaatgcagacacagaccttgtatcctggctctccccacatgaccccaactccgtggttaccaaatcggccaagaagctcagaagcagtaatgcagatgctgaagaaaagttggaccggagccatgacaagtcggacaggggccatgacaagtcggaccgcagccatgagaaactagacaggggccacgacaagtcagaccggggccacgacaagtctgacagggatcgagagcgtggctatgacaaggtagacagagagagagagcgagacagggaacgggatcgggaccgcgggtatgacaaggcagaccgggaagagggcaaagaacggcgccaccatcgccgggaggagctggctccctatcccaagagcaagaaggcagtaagccgaaaggatgaagagttagaccccatggaccctagctcatactcagacgccccccggggcacgtggtcaacaggactccccaagcggaatgaggccaagactggcgctgacaccacagcagctgggcccctcttccagcagcggccgtatccatccccaggggctgtgctccgggccaatgcagaggcctcccgaaccaagcagcaggattgaagcttcggcctccctggccctgggttaaaataaaagctttctggtgatcctg

SEQ ID NO: 4232 - DNA, 513 bp, Homo sapiens
atgccgctgcccgttgcgctgcagacccgcttggccaagagaggcatcctcaaacatctggagcctgaaccagaggaagagatcattgccgaggactatgacgatgatcctgtggactacgaggccaccaggttggagggcctaccaccaagctggtacaaggtgttcgacccttcctgcgggctcccttactactggaatgcagacacagaccttgtatcctggctctccccacatgaccccaactccgtggttaccaaatcggccaagaagctcagaagcagtaatgcagcagtaagccgaaaggatgaagagttagaccccatggaccctagctcatactcagacgccccccggggcacgtggtcaacaggactccccaagcggaatgaggccaagactggcgctgacaccacagcagctgggcccctcttccagcagcggccgtatccatccccaggggctgtgctccgggccaatgcagaggcctcccgaaccaagcagcaggattga

SEQ ID NO: 4233 - DNA, 1012 bp, Homo sapiens
atgccgctgcccgttgcgctgcagacccgcttggccaagagaggcatcctcaaacatctggagcctgaaccagaggaagagatcattgccgaggactatgacgatgatcctgtggactacgaggccaccaggttggagggcctaccaccaagctggtacaaggtgttcgacccttcctgcgggctcccttactactggaatgcagacacagaccttgtatcctggctctccccacatgaccccaactccgtggttaccaaatcggccaagaagctcagaagcagtaatgcagatgctgaagaaaagttggaccggagccatgacaagtcggacaggggccatgacaagtcggaccgcagccatgagaaactagacaggggccacgacaagtcagaccggggccacgacaagtctgacagggatcgagagcgtggctatgacaaggtagacagagagagagagcgagacagggaacgggatcgggaccgcgggtatgacaaggcagaccgggaagagggcaaagaacggcgccaccatcgccgggaggagctggctccctatcccaagagcaagaagggtaagctgggcagaatggggctcggtgagaccaacaaggtgcagggtgcactgcgtgaggaagccttccctcaaaaagatgcctggacctggggctagaggagggtgctgtggtacatggcagccaggggcttcatttcttcttgtggggtggggctcagtgatcaggggctcctggtgcctctattgaagactttgccctgccacttccacagcagtaagccgaaaggatgaagagttagaccccatggaccctagctcatactcagacgccccccggggcacgtggtcaacaggactccccaagcggaatgaggccaagactggcgctgacaccacagcagctgggcccctcttccagcagcggccgtatccatccccaggggctgtgctccgggccaatgcagaggcctcccgaaccaagcagcaggattga

SEQ ID NO: 4234 - DNA, 1144 bp, Homo sapiens
atgccgctgcccgttgcgctgcagacccgcttggccaagagaggcatcctcaaacatctggagcctgaaccagaggaagagatcattgccgaggactatgacgatgatcctgtggactacgaggccaccaggttggagggcctaccaccaagctggtacaaggtgttcgacccttcctgcgggctcccttactactggaatgcagacacagaccttgtatcctggctctccccacatgaccccaactccgtggttaccaaatcggccaagaagctcagaagcagtaatgcagatgctgaagaaaagttggaccggagccatgacaagtcggacaggggccatgacaagtcggaccgcagccatgagaaactagacaggggccacgacaagtcagaccggggccacgacaagtctgacagggatcgagagcgtggctatgacaaggtagacagagagagagagcgagacagggaacgggatcgggaccgcgggtatgacaaggcagaccgggaagagggcaaagaacggcgccaccatcgccgggaggagctggctccctatcccaagagcaagaagggtaagctgggcagaatggggctcggtgagaccaacaaggtgcagggtgcactgcgtgaggaagccttccctcaaaaagatgcctggacctggggctagaggagggtgctgtggtacatggcagccaggggcttcatttcttcttgtggggtggggctcagtgatcaggggctcctggtgcctctattgaagactttgccctgccacttccacagcagtaagccgaaaggatgaagagttagaccccatggaccctagctcatactcagacgccccccggtaagtgacaacccctcttgactcagtacgtggacaccatcctccggcctccttcctccattcctcattgggaccaggtgggctgtgtccgccacatcacccatccccatcccctgactctttcaccggcaggggcacgtggtcaacaggactccccaagcggaatgaggccaagactggcgctgacaccacagcagctgggcccctcttccagcagcggccgtatccatccccaggggctgtgctccgggccaatgcagaggcctcccgaaccaagcagcaggattga

SEQ ID NO: 4235 - DNA, 2458 bp, Homo sapiens
atagcacagctgccagtagacccccggtcaccctgaggctggtggtccctgctagtcagtgtggctctctcattggaaaaggtggatgcaagatcaaggaaatacgagaggctggagtgcagtggcgcagtcatggctcactgcagcaaaacatcgaccttcccagcctcaggcgatcctctcatctcagcctcccaaggagccgggactgcaggctcccaccaccacacccaaatttttgtatttttttgtaaaaatggtgttttgccatgtggcccaggctggtttcgaactcctgagctcaagcaatccacccacctcaggctcccagtgttattactacaggcttgagccagcacacttgcttgcctgcagcgtcatttttcttgaccagacttataaacaacaaggagaaaaataggaagatgtattgggaaatagatgtaattctacatctttttttttttttttgagacagggtctcactcaggctgaagtgcagggcataatcgtgatcatggcttactgcaacctcgacttctgggctcatgtaaccctcctacctcaagcctcctgagtacctggtaccataggcgcgctccacaatgcccggctaatttttcttctttctgttgttgtagagacgagtctcactgttttgctcaggctggtctccaactcctgagcttccgatgattcgactgccttggtctcccaaagtgctcggattacagatgtgagccactgtgcctggcccctacttcctgtttaactatggaagttacgttgaattatggaagattttaattgtatctagatgttactgaatttggtgttggaatgaaactcgaatggctgcttgagtttttgggagcgtatcgtacatggcacgacagagatcttaattttgttaattgctatattcgaagcacttctcatggtacctggcacatagaatggccttgatgtaaatattttttcagtaacataatgaaaggtgggtgatacttgtggggcttttgcttcgcccagagaactatcattagttgaaaggcaactatttagaaggaccttttgcttgagagtaggttaaatttaggctgttattcacgcttattcttgtctttcagtggctaatttatttttaactctaattcactaaacagtcctatctggaataagggaagagtgggacaaagaacaaaaagggaagattggaaatggataaatatctactagagttttaggctctgaaattgctgctggaggaattggaagagcatgaactgtttttctctgattttgaatttctttttactccaaagagtacaggggctcaggtccaggtggcaggggatatgctacccaactcaactgagcgggccatcactattgctggcattccacaatccatcattgagtgtgtcaaacagatctgcgtggtcatgttggagactctctcccagtcccccccgaagggcgtgaccatcccgtaccggcccaagccgtccagctctccggtcatctttgcaggtggtcaggacaggtacagcacaggcagcgacagtgcgagctttccccacaccaccccgtccatgtgcctcaaccctgacctggagggaccacctctagaggcctataccattcaaggacagtatgccattccacagccagatttgaccaagctgcaccagttggcaatgcaacagtctcattttcccatgacgcatggcaacaccggattcagtggcattgaatccagctctccagaggtgaaaggctattgggcaggtttggatgcatctgctcagactacttctcatgaactcaccattccaaacgatttgattggctgcataatcgggcgtcaaggcgccaaaatcaatgagatccgtcagatgtctggggcgcagatcaaaattgcgaacccagtggaaggatctactgataggcaggttaccatcactggatctgctgccagcattagcctggctcaatatctaatcaatgtcaggctttcctcggagacgggtggcatggggagcagctagaacaatgcagattcatccataatccctttctgctgttcaccaccacccatgatccatctgtgtagtttctgaacagtcagcgattccaggttttaaatagtttgtaaattttcagtttctacacactttatcatccactcgtgattttttaattaaagcgttttaattcctttctctgttcagctgttgatgctgagatccatatttagttttataagcttctccctggttttttttttttggctcatgaatttttctgtttgtcatggaaatgtaagagtggaatattaatacatttcagtttagttctgtaatgtcaggaatttttcaaaaaaattaaaagatggactggagctttttctttgtgaatagaaactggatgccacagtgattcatgtgggttttat

SEQ ID NO: 4236 - DNA, 2318 bp, Homo sapiens
agagcgacgcggaaccccgggcgcctgggtccccagcatgatcctcggcagcctgagccgggcagggcccctgcctctgctacggcagcccccgatcatgcagcccccactggacctcaagcagatcctgcccttcccactcgagccagcccctacccttggcctcttcagcaactacagcaccatggaccctgtgcagaaggctgtgctctcccacacttttgggggacccttgctcaagaccaagcggcccgtcatttcctgtaatatctgtcaaatccgcttcaattctcagagccaggctgaggcgcactacaaaggtaatcgccacgcccgacgagtcaaaggcattgaggctgccaagaccagaggcagggagcctggcgtccgagaacctggagacccagctcccccaggcagcaccccaacaaatggggatggtgtagcaccccgtccagtttccatggagaatggactggggccagccccaggatccccagagaaacagcctggctccccatcccctcccagcattccggagactggtcagggtgtaaccaagggtgaaggggggactccagccccggcttccttgcctgggggtagcaaggaagaggaggagaaagccaagcggctgctctactgtgctctgtgcaaggtggctgtgaactccctgtcccagcttgaggcacataacaaaggtactaagcacaagacaattctggaggcccgaagtgggctcgggcccatcaaagcttaccctcggctggggcctcccaccccgggggaaccagaggctcctgcccaggaccgaactttccactgtgagatctgcaatgtcaaggtcaactcggaggtccaactgaaacagcacatctccagccggcggcaccgagacggcgtggccgggaagcccaacccactactgagccgtcacaagaagtctaggggcgccggggagctggcgggcacgctgactttctccaaggagctgcccaagtccctggcgggcggcctgctccccagccccctggcggtggctgcagtgatggcagcggcagcaggctcgccgctgtccctgcgcccggctccagccgcacctcttctccagggaccgccgatcactcaccctctgcttcacccggcccccggacccatccgaactgcgcacggacccatcctcttctccccgtactgacctcaaccctgaacccctcccattcaactccccacctccagccgggacccaggcgtccgggctcccagcccgcccctcctcccggcactccctaaatgatctctccttccccccccccaccccgagatacggggttccaggaaaggggaggggtagcgggggaggggggcttcagaagggggggaacaccccagatctcagggaaccccgccccctgcctttccctctcccctagaaaagggggggccgtctcacccccgagcccccttggagacaccccccctcccaaaagccatgtccatccagcccttccccccaaacctagcacaaaacggggttcacaagccatggtcggggtccgggggggacagaaatggattttcttggcaataagcggactctgggactccggctccctaccccaaactgaagcgcttccgtgaacacccccgtcctccgtagggggaggggagcaggcgggatcctgggtccctcataagcactttggttttaccgcctgcaacctcactgtgcccgccccgcaccatgccctagccccaggtctagccgggcccattgcagggggcagcacttgggggcatctccggcacttgggtgggaccaaggagatgccaccatagacctttccctcgccttcttcctccctagtccgggttccattcttttcaccagcacccatcgcccaaggggtaccgaggggggcaaggggtgtccagtccaagcccacccccgcctcgccttccgcaaaactgtgagcaaaaagcaatagaagcctcgcccccgcccttccccttcgcaggattcgccgagtctgtagcctccccgatccaagttcctagacctcatggctgtcccctcccaccagtcacctccactgcacaactcgggcgggggtgtgacacctctcccccacccccgactccgtggtttccgtatcgtcaacccttcagccgccgacccgggaggggtctggcctacactggtcttccccttcccatcaactctttctgcttgacaatgtagcaacccaggccccccacccacggtcctcccctttttcctctccctgacaataaagtctgaatttgttctgccctcc

SEQ ID NO: 4237 - DNA, 2076 bp, Homo sapiens
agagcgacgcggaaccccgggcgcctgggtccccagcatgatcctcggcagcctgagccgggcagggcccctgcctctgctacggcagcccccgatcatgcagcccccactggacctcaagcagatcctgcccttcccactcgagccagcccctacccttggcctcttcagcaactacagcaccatggaccctgtgcagaaggctgtgctctcccacacttttgggggacccttgctcaagaccaagcggcccgtcatttcctgtaatatctgtcaaatccgcttcaattctcagagccaggctgaggcgcactacaaaggtaatcgccacgcccgacgagtcaaaggcattgaggctgccaagaccagaggcagggagcctggcgtccgagaacctggagacccagctcccccaggcagcaccccaacaaatggggatggtgtagcaccccgtccaggtactaagcacaagacaattctggaggcccgaagtgggctcgggcccatcaaagcttaccctcggctggggcctcccaccccgggggaaccagaggctcctgcccaggaccgaactttccactgtgagatctgcaatgtcaaggtcaactcggaggtccaactgaaacagcacatctccagccggcggcaccgagacggcgtggccgggaagcccaacccactactgagccgtcacaagaagtctaggggcgccggggagctggcgggcacgctgactttctccaaggagctgcccaagtccctggcgggcggcctgctccccagccccctggcggtggctgcagtgatggcagcggcagcaggctcgccgctgtccctgcgcccggctccagccgcacctcttctccagggaccgccgatcactcaccctctgcttcacccggcccccggacccatccgaactgcgcacggacccatcctcttctccccgtactgacctcaaccctgaacccctcccattcaactccccacctccagccgggacccaggcgtccgggctcccagcccgcccctcctcccggcactccctaaatgatctctccttccccccccccaccccgagatacggggttccaggaaaggggaggggtagcgggggaggggggcttcagaagggggggaacaccccagatctcagggaaccccgccccctgcctttccctctcccctagaaaagggggggccgtctcacccccgagcccccttggagacaccccccctcccaaaagccatgtccatccagcccttccccccaaacctagcacaaaacggggttcacaagccatggtcggggtccgggggggacagaaatggattttcttggcaataagcggactctgggactccggctccctaccccaaactgaagcgcttccgtgaacacccccgtcctccgtagggggaggggagcaggcgggatcctgggtccctcataagcactttggttttaccgcctgcaacctcactgtgcccgccccgcaccatgccctagccccaggtctagccgggcccattgcagggggcagcacttgggggcatctccggcacttgggtgggaccaaggagatgccaccatagacctttccctcgccttcttcctccctagtccgggttccattcttttcaccagcacccatcgcccaaggggtaccgaggggggcaaggggtgtccagtccaagcccacccccgcctcgccttccgcaaaactgtgagcaaaaagcaatagaagcctcgcccccgcccttccccttcgcaggattcgccgagtctgtagcctccccgatccaagttcctagacctcatggctgtcccctcccaccagtcacctccactgcacaactcgggcgggggtgtgacacctctcccccacccccgactccgtggtttccgtatcgtcaacccttcagccgccgacccgggaggggtctggcctacactggtcttccccttcccatcaactctttctgcttgacaatgtagcaacccaggccccccacccacggtcctcccctttttcctctccctgacaataaagtctgaatttgttctgccctccg

SEQ ID NO: 4238 - DNA, 1535 bp, Homo sapiens
ccttggtagtctgttagtgggagatccttgttgccgtcccttcgcctccttcaccgccgcagaccccttcaagttctagtcatgcgtgagtgcatctccatccacgttggccaggctggtgtccagattggcaatgcctgctgggagctctactgcctggaacacggcatccagcccgatggccagatgccaagtgacaagaccattgggggaggagatgattccttcaacaccttcttcagtgaaacgggtgctggcaagcatgtgccccgggcagtgtttgtagacttggaacccacagtcattgatgaagttcgcactggcacttaccgccagctcttccaccctgagcaactcatcacaggcaaggaagatgctgccaataactatgcccgagggcactacaccattggcaaggagatcattgacctcgtgttggaccgaattcgcaagctggctgaccagtgcaccggtcttcagggcttcttggttttccacagctttggtgggggaactggttctgggttcacctcgctgctcatggaacgtctctcagttgattatggcaagaagtccaagctggagttctccatttacccggcgccccaggtttccacagctgtagttgagccctacaactccatcctcaccacccacaccaccctggagcactctgattgtgccttcatggtagacaatgaggccatctatgacatctgtcgtagaaacctcgatatcgagcgcccaacctacactaaccttaaccgccttattagccagattgtgtcctccatcactgcttccctgagatttgatggagccctgaatgttgacctgacagaattccagaccaacctggtgccctacccccgcatccacttccctctggccacatatgcccctgtcatctctgctgagaaagcctaccatgaacagcttactgtagcagagatcaccaatgcttgctttgagccagccaaccagatggtgaaatgtgaccctcgccatggtaaatacatggcttgctgcctgttataccgtggtgacgtggttcccaaagatgtcaatgctgccattgccaccatcaaaaccaagcgtaccatccagtttgtggattggtgccccactggcttcaaggttggcattaattaccagcctcccactgtggtgcctggcggagacctggccaaggtacagagagctgtgtgcatgctgagcaataccacagctgttgccgaggcctgggctcgcctggaccacaagtttgacctgatgtatgccaagcgtgcctttgttcactggtacgtgggtgaggggatggaggaaggcgagttttcagaggcccgtgaggacatggctgcccttgagaaggattatgaggaggttggagcagatagtgctgacggagaggatgagggtgaagagtattaacctgtgtgctgtacttttacactcctttgtcttggaactgtcttatttttgttctgtaaatgtctattgccgtaaattgttaataaaattgatgtttccatttt

SEQ ID NO: 4239 - DNA, 2272 bp, Homo sapiens
ggagggtctcgccgccagtggaaggagccaccgcccccgcccgaccatggccgaggagctggtcttagagaggtgtgatctggagctggagaccaatggccgagaccaccacacggccgacctgtgccgggagaagctggtggtgcgacggggccagcccttctggctgaccctgcactttgagggccgcaactacgaggccagtgtagacagtctcaccttcagtgtcgtgaccggcccagcccctagccaggaggccgggaccaaggcccgttttccactaagagatgctgtggaggagggtgactggacagccaccgtggtggaccagcaagactgcaccctctcgctgcagctcaccaccccggccaacgcccccatcggcctgtatcgcctcagcctggaggcctccactggctaccagggatccagctttgtgctgggccacttcattttgctcttcaacgcctggtgcccagcggatgctgtgtacctggactcggaagaggagcggcaggagtatgtcctcacccagcagggctttatctaccagggctcggccaagttcatcaagaacataccttggaattttgggcagtttgaagatgggatcctagacatctgcctgatccttctagatgtcaaccccaagttcctgaagaacgccggccgtgactgctcccgccgcagcagccccgtctacgtgggccgggtggtgagtggcatggtcaactgcaacgatgaccagggtgtgctgctgggacgctgggacaacaactacggggacggcgtcagccccatgtcctggatcggcagcgtggacatcctgcggcgctggaagaaccacggctgccagcgcgtcaagtatggccagtgctgggtcttcgccgccgtggcctgcacaggtgagctgcacgctgggatgtgggtcatgagccctgggagggggcacgaagagcactggagtaggaatcaggacatccctgccctggtcctgccccctgccaccaacactctcaatgcgctatgtggcctagagcctgtgaccaccctctccggtcctttatccaatagccatccctccagtggttgttaggatcaagggctatcattggagagactgcatgggctcagggctgagaacttgggcactggagcccacgttctcaaaaactcaggatttttaacttgagttaaaaaccccctccctcccaccacttgctctgtgaccttgagcaaatgacttctttctgaacctcagtttcctcgtctggaaaatggggacaacatcaagaccttcctcctagagtgggtgtgacatgaagctactcagcacagaacctagcccagtgtcactctcggcaaatattagccagtaataactggatcctaacagtaatatcagtgtcaagaaagaaagcatgttctaaaatgtagagggggaatatcgagcaatttaaaaccaaaaaagtaaaataaatctaaaacaaaaatcttcaaaatttaaggccagaaaatgtcgatgattgttgccaggctgatgatggtgcttatgagaatgggttagcatcacatgctggctaagaacgtagactcaagacatgaggattgcttgaggccgggagtttgagaccagcctgggcaatatagtgagaccttgtctctacaaaaaaataaaataaaataaaaattagcaggcatggttgtgtgtctggagtcttggctactcagaaggctgaggcaggaagatcgcttgacccctggaggttggctgcaatgagctatgattgcaccattgcactccagcctgggcaacggagcaagatcctctctcaaaaaaaaaaaaaaaaaaaaaaaaagagagagagcacaaattctgaagtcaaggcctgggttcaaatcctagctctgcttcttaccagctgtgtgtccttaggtaaatcacttaactcctctgaaccacagttccattgtatgtaaaatgggcacaacggtagtacctttatactgggatggttgtgaggattaaatgagttaatatgtgtgaggtagctgagcgtggtggtggtgcacctgtagtcttagctgtttgggaggctgaggcagggggatcacttgagcccaggaggtcgaggctgcggtgagtcatgattgcaccactgtactccagcctgggtgacagagcgagacctcatctctaaataaataaatgaatgtgggaagtgcttaaaatgattttgggtgcataatagaaaatacttatgtgatgata

SEQ ID NO: 4240 - DNA, 1824 bp, Homo sapiens
ggagggtctcgccgccagtggaaggagccaccgcccccgcccgaccatggccgaggagctggtcttagagaggtgtgatctggagctggagaccaatggccgagaccaccacacggccgacctgtgccgggagaagctggtggtgcgacggggccagcccttctggctgaccctgcactttgagggccgcaactacgaggccagtgtagacagtctcaccttcagtgtcgtgaccggcccagcccctagccaggaggccgggaccaaggcccgttttccactaagagatgctgtggaggagggtgactggacagccaccgtggtggaccagcaagactgcaccctctcgctgcagctcaccaccccggccaacgcccccatcggcctgtatcgcctcagcctggaggcctccactggctaccagggatccagctttgtgctgggccacttcattttgctcttcaacgcctggtgcccagcggatgctgtgtacctggactcggaagaggagcggcaggagtatgtcctcacccagcagggctttatctaccagggctcggccaagttcatcaagaacataccttggaattttgggcagtttgaagatgggatcctagacatctgcctgatccttctagatgtcaaccccaagttcctgaagaacgccggccgtgactgctcccgccgcagcagccccgtctacgtgggccgggtggtgagtggcatggtcaactgcaacgatgaccagggtgtgctgctgggacgctgggacaacaactacggggacggcgtcagccccatgtcctggatcggcagcgtggacatcctgcggcgctggaagaaccacggctgccagcgcgtcaagtatggccagtgctgggtcttcgccgccgtggcctgcacagtgctgaggtgcctgggcatccctacccgcgtcgtgaccaactacaactcggcccatgaccagaacagcaaccttctcatcgagtacttccgcaatgagtttggggagatccagggtgacaagagcgagatgatctggaacttccactgctgggtggagtcgtggatgaccaggccggacctgcagccggggtacgagggctggcaggccctggacccaacgccccaggagaagagcgaagggacgtactgctgtggcccagttccagttcgtgccatcaaggagggcgacctgagcaccaagtacgatgcgccctttgtctttgcggaggtcaatgccgacgtggtagactggatccagcaggacgatgggtctgtgcacaaatccatcaaccgttccctgatcgttgggctgaagatcagcactaagagcgtgggccgagacgagcgggaggatatcacccacacctacaaatacccagaggggtcctcagaggagagggaggccttcacaagggcgaaccacctgaacaaactggccgagaaggaggagacagggatggccatgcggatccgtgtgggccagagcatgaacatgggcagtgactttgacgtctttgcccacatcaccaacaacaccgctgaggagtacgtctgccgcctcctgctctgtgcccgcaccgtcagctacaatgggatcttggggcccgagtgtggcaccaagtacctgctcaacctcaacctggagcctttctctggtaaagccctgtgttcctggagcatttgttgaccgccaactgacaacatgctaggtagtgacctaaccacttagcatgtgtgatttcaccccacagacacttacatggcgctgactctggggcaggccctgtcctaagcactttataaatatcaacccactta

SEQ ID NO: 4241 - DNA, 3750 bp, Homo sapiens
caagatgatgtgcgaggtgatgccgaccatcagcgaagcagaaggcccccctggaggaggtggaggccatggttccggctccccttcacagccagatgcagattcacattttgaacagttgatggtctccatgctagaagaaagggaccgccttcttgatacactgagagagactcaagaaacgctggccttaacccaggggaagttacacgaggttggtcatgaaagagattccttgcagagacagctcaacacggcacttccacaggagttcgcagcacttactaaagaactcaatgtatgcagggaacagctccttgaaagggaagaagaaattgctgaactgaaagcagaaaggaataacaccaggctgctgttagagcatttggaatgccttgtctccaggcatgagcggtctcttaggatgaccgtggtgaagagacaagcgcagtctccagcaggcgtgtccagcgaagtggaagtgctgaaagcactgaagtccttatttgaacaccacaaagctctggatgaaaaggtgagagagcgattacgagtagcacttgaaagatgtagtttgttagaagaggaattaggtgccacacacaaagagctaatgattcttaaagaacagaataatcagaaaaaaactctaacagatggagtgctggacataaaccatgaacaagaaaatacaccaagcacgagtggaaagagatcttctgatggttctttaagccacgaggaagaccttgctaaagtaattgagctccaagaaatcataagtaagcagtcaagggaacagagccaaatgaaagaacgcctggcttccctttccagtcatgtgacagaactggaagaggatctggacacggctagaaaagatctcatcaaatctgaagaaatgaacacaaaattgcaacgagatgtccgtgaagccatggcccaaaaggaagatatggaagagagaatcactactcttgaaaaacgctacctcgctgcacagcgtgaagccacatctgtgcatgacctcaatgataaacttgaaaatgaaattgcaaataaagattctatgcatcgacagactgaagataaaaaccgccagttacaggagcgcttggaattggcagagcaaaagctgcaacagacactgaggaaggcagagacgctcccggaggtggaggcggagctggcccagagggtggcagcgctttccaaggctgaagagagacacggcaacattgaagaaaggttacgacagatggaagcacagttggaggagaagaatcaagaactgcagcgggcaaggcaaagagaaaaaatgaacgaagaacataataaacgtttatcagacactgttgacaagctgctttcagaatctaatgagaggcttcaacttcatcttaaagagagaatggctgctttggaagataagaactctcttttaagagaagttgaaagtgcaaaaaagcagttagaagaaacacaacacgataaggatcagcttgtcctaaacattgaagcactgagggctgaactagaccacatgagactaagaggtgcttcacttcatcatggccgaccccacttgggcagtgtcccagatttcaggttccccatggcagacggccacacagactcctacagcaccagtgcagtgctgcggcgcccacagaaaggccggctggcagccctgcgagatgagccttccaaggtacaaactcttaatgagcaggattggaacgtgcccagcaagctagtgtcttggcaaatgtagcacaagcattcgagagtgatgctgacgtgtctgatggtgaagatgacagggacactctcctcagctcagttgacctgctatcgcccagcgggcaggccgacgcgcacacactagccatgatgcttcaggagcagctggacgccatcaacaaagagatcaggttgattcaggaagaaaaagaaaatacagagcagcgggcagaggagattgaaagtcgagttggcagtggaagtctagacaatcttggtcgttttagatcaatgagctccattcccccctaccctgcttcctcgcttgctagctcctcccctccgggcagtgggcgctccaccccacgaaggatccctcacagcccagctcgggaagtggacagactgggcgtcatgacccttttgccaccttccagagaagaggtacgagatgacaagacaaccataaagtgtgaaacctccccgccttcctccccgagagcccttcggttagaccggctgcacaaaggggcgctgcacaccgtcagccacgaggacatcagggacataaggaactccacaggctcccaggatggtcccgtgagcaaccccagcagtagcaacagtagccaggactcgctccacaaagccccaaagaagaaaggcattaagtcctccattggccgcttgtttggcaagaaagaaaagggccgacctggacaaactggcaaagaagcattaggacaagctggtgtttccgagacggataactcatctcaggatgccttgggacttagcaaattggggggacaggctgaaaaaaatcgtaaacttcaaaaaaagcatgaattgctggaggaagcccggagacaaggtttaccttttgcccaatgggacgggccaacggttgtggtctggctagagctctgggttgggatgccagcctggtatgtggctgcctgccgagcaaacgtgaaaagcggggccatcatgtcggccctgtccgacacagagatccagcgtgagattggcatcagcaaccccctgcacaggctgaagctgaggctggccatccaggagatcatgtcgctgaccagcccgtctgccccgcccacatctagaacgacactcgcctatggggacatgaaccacgagtggatcggcaacgagtggctccccagcctgggcctcccccagtaccgcagctacttcatggagtgccttgtagacgccaggatgctggaccacttgaccaagaaagaccttcgagggcagctgaaaatggtcgacagttttcacagaaacagtttccagtgtggaattatgtgcctgagaaggttaaattatgaccggaaagaactggaaagaaaaagagaagaaagtcagagtgaaataaaagacgtgcttgtttggagcaatgatcgagtgattcgctggatcctgtcaattggccttaaagaatatgcaaacaatcttatagagagtggtgttcacggagcacttctggccttagatgaaaccttcgacttcagtgcactggcactgctgttacagatcccgacgcagaacacacaggctcgtgctgtcttggaaagagaatttaacaaccttttggtcatggggactgatagaaggtttgatgaagatgatgataaaagctttaggagagcaccttcatggagaaaaaagtttagaccaaaggacattcgtggcttagctgctgggtcagcagagactctccctgcaaacttccgggtgacttcttctatgtcttccccctctatgcagccaaagaagatgcagatggacggtatgtgatgggtcacactaacctgtcacttgttgggagcatgagcagctttctgtctggaacattaataatgatctaaaacggcctatttaatatgttacaaggcacttgagtatggttgcatgtccaaatataaatgtttttaaattaactctaacatttgtttataaaagtttaaccataataatagaattttt

SEQ ID NO: 4242 - DNA, 3249 bp, Homo sapiens
caggagggcccatgtgcttaccctgttttgcccatgaagaaacagctcagtgttgtgggtcagtgcccgcatcacacagcgtctagcacgtaactgcaccccgggagtcgtgggcatctgctggcctcctgccggcctcctgcgctgctgacagcttgctgtgccccctgcctgccccagtacgagcgggccctggacgtggcgcagagcccaagcacgagcggcagcaccgagcccagatacgcaagaacatcacggagactctggtgtccctgagggtccacactgtggatgacatccagcagatcgctgctgcgctggcccagtgcatggggcccagcagggagctcgtatgccgctcgtgcctgaagcagacgctgcacaagctggaggccatgatgctcatcctgcaggcagagaccaccgcgggcaccgtgacgcccaccgccatcggagacagcatcctcaacatcacaggagacctcatccacctggccagctcggacgtgcgggcaccacagccctcagagctgggagccgagtcaccatctcggatggtggcgtcccaggcctacaacctgacctctgccctcatgcgcatcctcatgcgctcccgcgtgctcaacgaggagcccctgacgctggcgggcgaggagatcgtggcccagggcaagcgctcggacccgcggagcctgctgtgctatggcggcgccccagggcctggctgccacttctccatccccgaggctttcagcggggccctggccaacctcagtgacgtggtgcagctcatctttctggtggactccaatccctttccctttggctatatcagcaactacaccgtctccaccaaggtggcctcgatggcattccagacacaggccggcgcccagatccccatcgagcggctggcctcagagcgcgccatcaccgtgaaggtgcccaacaactcggactgggctgcccggggccaccgcagctccgccaactccgccaactccgttgtggtccagccccaggcctccgtcggtgctgtggtcaccctggacagcagcaaccctgcggccgggctgcatctgcagctcaactatacgctgctggacggccactacctgtctgaggaacctgagccctacctggcagtctacctacactcggagccccggcccaatgagcacaactgctcggctagcaggaggatccgcccagagtcactccagggtgctgaccaccggccctacaccttcttcatttccccggggagcagagacccagcggggagttaccatctgaacctctccagccacttccgctggtcggcgctgcaggtgtccgtgggcctgtacacgtccctgtgccagtacttcagcgaggaggacatggtgtggcggacagaggggctgctgcccctggaggagacctcgccccgccaggccgtctgcctcacccgccacctcaccgccttcggcgccagcctcttcgtgcccccaagccatgtccgctttgtgtttcctgagccgacagcggatgtaaactacatcgtcatgctgacatgtgctgtgtgcctggtgacctacatggtcatggccgccatcctgcacaagctggaccagttggatgccagccggggccgcgccatccctttctgtgggcagcggggccgcttcaagtacgagatcctcgtcaagacaggctggggccggggctcaggtaccacggcccacgtgggcatcatgctgtatggggtggacagccggagcggccaccggcacctggacggcgacagagccttccaccgcaacagcctggacatcttccggatcgccaccccgcacagcctgggtagcgtgtggaagatccgagtgtggcacgacaaagggctcagccctgcctggttcctgcagcacgtcatcgtcagggacctgcagacggcacgcagcgccttcttcctggtcaatgactggctttcggtggagacggaggccaacgggggcctggtggagaaggaggtgctggccgcgagtaacgcagcccttttgcgcttccggcgcctgctggtggctgagctgcagcgtggcttctttgacaagcacatctggctctccatatgggaccggccgcctcgtagccgtttcactcgcatccagagggccacctgctgcgttctcctcatctgcctcttcctgggcgccaacgccgtgtggtacggggctgttggcgactctgcctacaggtgggtgccgtaggggtcggggcagcctcttcctgcccagcccttcctgcccctcagcctcacctgtgtggcctcctctcctccacacagcacggggcatgtgtccaggctgagcccgctgagcgtcgacacagtcgctgttggcctggtgtccagcgtggttgtctatcccgtctacctggccatcctttttctcttccggatgtcccggagcaaggtgggctggggctggggacccgggagtactgggaatggagcctgggcctcggcaccatgcctagggccgccactttccagtgctgcagccagagggaaaggcgtccaccaaaggctgctcgggaagggtcaacacacttgagcagccttagctagactgaccagggagaaagagagaagactcagaagccagaatggtgaaagaacgagggcactttgctaagcagacgccacggacgactgcacagcagcacgccagataactcagaagaagcaagcacgcggctgtgcacgcttccgaaatgcactccagaagaaaatctcagtacatctataggaagtgaagaggctgagttagtcccttagaaacgtcccagtggccgggccgggtgtggtggctcacgcctgtaatcccaacacttcaggtggccgaggtgggcggatctgagtccaggagtttgagaccagcctgggcaacatagcaagaccccatctatataaaacattaaaaagggccaggcgcggtggctcacgcctgtaatcccagcactttgggaggccgaggcgggcagatcacttgaggtcaggagttcgagaccagcctggccaacacaatgaaaccccgactctactacaaatacaaaaacttagctgggcatggtggcgggcgcctgtagtcccagctactcgagaggctgaggcaggagaatggcatgaacccaggaggcggagcttgcagtgagccgagattgcgccactgcactccatcctgggcaacggagcaagactccgtctcc

SEQ ID NO: 4243 - DNA, 2400 bp, Homo sapiens
  misc_feature (1682)..(1781): n is a, c, g, or t
gaaacccagagacctcctggggagccgccgccgccgccctctcggccatcgctgcctccgccgcctgctccacctcgagggacgcgagcgggcggcggggctggccgtgagagagacaggagaggaaggagggcaggggcggagttgcccgccttagcccccgcccccggccgcggccccgggccctgccccgcgcggccctgcccggcccaccgagccctggtgtggcagcggctcatggcggccgtggggcccccgcagcagcaggtgcggatggcccatcagcaggtctgggcggcgctcgaagtggcgctccgggtgccctgcctttacatcatcgacgccatcttcaactcctacccggattccagccaaagccggttctgcatcgtgctccagatcttcctccggctctttggtgtatttgcatccagtattgttctgatcttgtcacaacgatcacttttcaagttttacacgtacagctcagcctttctgttagctgcaacttcagtgttggtgaattattatgcttctttgcacattgacttctatggtgcctacaacacgtcagcttttggaattgagctgcttcctcgaaaaggtccctcgctgtggatggcacttatcgttctacagctaacatttggaattggatacgttacactactccagattcattccatctattcacaattaattattttggatctcttggttcctgtaataggcttaatcacagagctaccattacacatcagagagactttactgtttacttcttccttgattctcacattaaatacagtgtttgtcctggcagtgaaactgaagtggttttattattccacacgatatgtttatcttttggtgaggcacatgtatcgaatttacggattacagttattgatggaggacacatggaagaggattcgtttcccagacatactacgagtcttttggctaacaagagttacagctcaggctacagtgttaatgtacatcttaaggatggcaaatgaaactgattccttctttatttcttgggatgatttttgggacctcatttgcaatcttataattagtgggtgcgattctacactaactgtactgggcatgagtgctgtaatttcctcagtagcccattatttggggcttggaatattggcctttattggatcaactgaggaagatgacaggcgtcttggctttgttgcacctgttttattttttattttggctcttcagactgggttaagtgggctaagaccagaagagagacttattcgcttaagtagaaacatgtgccttttattaactgcagtcctgcattttatccatggaatgacagaccctgtattaatgtctctcagtgcctctcatgtgtcatcttttcgtagacattttcctgtgctgtttgtctctgcttgcctgtttattcttcctgtcttactcagttatgttctttggcatcactatgcactaaatacatggttgtttgcagttacagcattttgtgtggaactgtgcttaaaagtaattgtttctctcactgtttatacgttattcatgattgatggctactataatgtcctctgggaaaagcttgacgattatgtctactacgttcgttcaacaggcagtattattgaatttatatttggagttgtaatgtttggaannnnnnnnnnnnnnnnnnnnnnnnnnnnnnnnnnnnnnnnnnnnnnnnnnnnnnnnnnnnnnnnnnnnnnnnnnnnnnnnnnnnnnnnnnnnnnnnnnnnatgatgtatgtgcaatctgctatcatgagtttacaacatctgctcgtattacaccgtgtaatcattatttccatgcactttgccttcggaaatggctgtacattcaagatacttgtccaatgtgccatcagaaagtatacatcgaagatgatatcaaggataattcaaatgtatctaacaacaatggatttattccacccaatgaaactccagaggaagctgtaagagaagctgctgctgaatctgacagggaattgaacgaagatgacagtacagattgtgatgatgatgttcaaagagaaagaaatggagtgattcagcacacaggcgcagcagctgaagaatttaatgatgatactgactgatgaaaatagcatttattaatgattgaggtatttgtttaaaattcagttcatccaaaatggagtaatatccttcaccttcagtgtgtaaccaagcacaaaaacagtatcaatgttgaatctgtgaatggttttccgtttactgtgatgtgctactgtaaatatacctctttaattacttctggtctctttggtgacctgtttaaatttgtgtacattattgtacatagaataaaatgttttcacatttttatgac

SEQ ID NO: 4244 - DNA, 3659 bp, Homo sapiens
gcagaagtgcggggtggtcattaagtccatgcaggccgtggaggactgtggccaagagaatcaccaggctcctgtgcccccgcagcctgatgacctctccattgtgtgtttcacaagcggcacgacaggtaagcagaggcacgcagatccccagccatggctacctgcacccttccctggtggcctagcaggtgactgctggagtctttgataccctgtttgaaatgggctgagccttgtcttgttcctggctccagacactgggtgacctcctgcacctcccagtgccctgcataagagtggccagatgcagatggatagtgtgcattgggaggtccagtgtgagggcttggcacctcccagagctgagtcagcagagtcatgggcagctggatcatgtgctgagggaaggtcctttctcactggcatcatttctctctggtaaacagctctcactcccctgctttctgcccctgcctggcctttgtgttggagactggggaaagagtgtgaggtttggcgtctgagagccttggtttgagtcctacctccactgcttgctgggggactgtgagccactcatttaacttctctgccaccagtgtccccagtttctcatctgccatgagggtggctaaaggtgccaagtgggagatgggacagtgtgtgaaagggcaatgcagatgctctgcaggctggggctggtgtgccatgagcaaggctgtcaggcaaagcacacaagcagaaatgatatcctctgtgcttggagctgacagaggagcacacacatcaacagtggcaggaataatcaaggaaggcttcctgggggaggcagaaagcacaagaggacacacacagcacaggcacaaccctctgcatttctatagcatgctgtccaccctctctctgcaccactggggcctcagcacagcctgtgaggtgagcaggattgtcaccaagcctgcttgctccaaagggacaccatcagcaagtagaagcaccagggcctgtgccctgctgtcataattcccaggccagagcctttcccagtgctgcctttccatctcatctgatgacgtggatgtcacttgtcttgccctgaatgggcaggaagtctccagccttctttttccaaactgaggattggcccatcttgatgacagctctcagtgggcagtgaactggggctctgcatgccttctgcagatgcagcctctaaggcatttgacagacctgtgaccagccctacaaccaggattattcatgtcagtggatcatgataaacatgctttattgaatatagatagatttttaccattaactcacatgggttcaaggatttccaccatattctactaaactttgtcagaaaaataacaacacagcccttcctctccaggagctgacatccagagccaacccagaattcaaaaatgcccttcaggtttatgttgctttttaaagagcactttccaatgtctttttgtcttgagttttacaatgtgaatttttggtgacatggttttggggagcaggtcactgctatggccttacctttggacctgccttcaaagtgtgccttcagccttttaacaggtcacttggtcacagacattgcccttggatctggagaaaaacttcatgatgcagaaatgtgctattgcctggctggggagggcagacatcatgtccagtgcttttccagactgtaggaagctgagccatcctgctcaagctctgtgtggtggaagcagaatgtatagggcttgaaacataggctgtgatttactatcccagacctcccactccaaagctatggctgttgcctgggcagagctgggggagtgagcagggctctggcctgatatcaccccatctggctgtgcacttggatttccttggctttaggctaagcccatgctgtgcctcttgtactcatcctcttgtcgggcacatcagccttgtgtgtcctcagcgtcacagcccagatacagcttcccttaaatgtaagctaaatgtcctggctcccagcctcatcaagggccacattgttcttttcatggggaaagatggaaaatatgatctgaacctgacatttggcccatgattctggtggaatcattccaggaagatttcattcttagcatgtggtggaaaaaatctgtggagattcctagaataagtcagtactttgaagtccctattcaggccaagaaggcctgggaggtggtgagagcttgtggtctgtctgtacccagtgatggctgaggggtgggcatgtggtttgctgttcatttcaaaataacagttagctggactggaatctgaacccattcccacctctgaaaaaaagataatatgtgggtgtaacatagcccagtttgggaaattgggtctcttgaatgatagttaggatgttttatccttgtgagttcatatgccttgtcttcccagcaaagaaaatacagtgcttttaaaaaacataactttcagtctatgtgtttttagcactctttttctaattcatctatattcactcattcagctcatttttgtgagtacccactatgcatcagacctagcattaggtgctgagggcatagggatggagaagacataggtctgcacccgtgagctcccagcttgtgtcatcaggcagttacaatatgatgcggtcactgccttgaggtctgcatccctggtgcatgggttacccggccactgagagatcagtacagcaggacagaaaggattcccagaggaagtcagtctaagcagagtcctgaaagatctgtagctgcagaagccagggaaaggcattccctgcaggagaaagagcatatgtggaggcctgatggtagcacagaacacgctgctttgagggagttttgagaggaaaagagagggcccgaggcagggcttgagggcacgagcatgagggagatgatgggacaggagttcccaatagaggtcaggcaggaggggctggagaggctagaggagaacaggatttgtcagtgtcgtctgtggttaagttgtaactggaggatgtcaccatgaaatgacctgctggtgctcttgacaaagactggtcccgggcgcggtggctcacgcctgtaatcccagcactttgggaggccgaggcgggcggatcacgaggtcaggagatcgagaccatcccggctaaaacggtgaaaccccgtctctactaaaaatacaaaaaattagccgggcgtagtggcgggcgcctgtagtcccagctacttgggaggctgaggcaggagaatggcgtgaacccgggaggcagagcttgcagtgagccgagatcccgccactgcactccagcctgggcgacagagcgagactccgtctcaaaaaaaaaaaaaaaaaaaaaaaaagactggtcttcccagcactttgggaggccgaggtgggtagatcacaaggtcaggagatcgagcccatcctggctaacatggtgaaaccctgtctgtactaaaaatacaaacaattagctgagtgtggtggcgcatgcctgtagtcctagctacttgggagcagaggcaggagaatcgcttgaacctgggaggcagaggttgcagtgagccgaaattgtgccacttcactccagtctgggcaacagagcgagactccatcac

SEQ ID NO: 4245 - DNA, 3952 bp, Homo sapiens
gcggccgcagctccgtttccggtggctcgtcgcgctcgctcactccagctgcagccactctcgcccgtggctgcttcctccatcctggtattttttggagcttccatcctggttcttccaaagtgcccggacccaaaacaggaaagtgttgcggagataggaacatgggagagaaacaatctgggtaacatgaaagtgatgctggttgctaagggaaggcaacttgattctgtgggaagggctgtagctgatccatccgttgtctagatttgagtatgagcacagtggaagaggattctgacacagtaacagtagaaactgtgaactctgtgactttgactcaggacacagaagggaatctcattcttcactgccctcagaatgaagcggatgaaatagactcagaagatagtattgaacctccacataaaaggctttgtttgtcctctgaggatgatcagagtattgatgattctactccttgcatatcagttgttgcacttccactttcagaaaatgatcagagctttgaagtgaccatgactgcaaccacagaagtagcagatgatgaggttactgaggggactgtgacacagatacagattttgcagaatgagcaactagatgaaatatctcccttgggtaacgaggaagtttcagcagttagccaagcatggtttacaactaaagaagataaggattctctgactaataaaggacataaatggaagcaggggatgtggtccaaggaagaaattgatattttgatgaacaatattgaacgctatcttaaggcacgcggaataaaagatgctacagaaatcatctttgagatgtcaaaagacgaaagaaaagatttctacaggactatagcatggggtctgaaccggcctttgtttgcagtttatagaagagtgcttcgcatgtatgatgacagaaaccatgtgggaaaatatacacctgaagaaattgagaagctcaaggagaaaaaggcaattgctgcctgtttttttttcacccacagacaactgtggaccccaaaaaaaggccacactttcaaactttggctctcaaagtattgctgcccacaacttccaaaccagtcaaatgggaagaagaagaatgaagaataaatgatgaaattaaaagggagaaaacaattgaaccaaatgctgattggcagactcttgttttaggctccggataaagcatggcaatgactgggcaacaataggggcggcgctaggaagaagtgcatcttctgtcaaagatcggtgccgactgatgaaggatacttgcaacacagggaagtggacagaagaagaagaaaagagacttgcagaagtggttcatgagttgacaagcactgagccaggtgacatagtcacacagggtgtgtcttgggcagctgtggctgaacgagtcggtacccgctcagaaaagcaatgtcgttctaaatggctcaactacctgaattggaaacagagtgggggtactgaatggaccaaggaagatgaaatcaatctcatcctcaggatagcagaacttgatgtagctgatgaaaatgacattaactgggatctgttagctgagggatggagtagtgtccgttcaccacaatggctacgaagtaaatggtggaccatcaaaaggcaaattgcaaaccataaggatgtttcgttccctgtcttaataaaaggtcttaaacagttacatgagaaccaaaaaaacaacccaacgcttttggagaataaatcaggatctggagttccaaacagtaataccaattccagtgtgcagcatgttcagataagagttgcccgcttggaagataatacagccatctcttctagccccatggcagcattgcagattccagtccagatcacccatgtttcttcagcagactctcctgctaccgttgactcagaaacaataacactaaacagtggaacactacagacatttgagattcttccctctttccatctacagcccactggcactccaggcacctacctacttcaaacaagctcaagccaaggccttcccctaactctgactgctagtcccacagtaaccctgacagctgctgctcctgcttctcctgaacagattattgttcatgctttatccccagaacatttgttgaacacaagtgataatgttacagtgcagtgtcacacaccaagagtcatcattcagactgttgccacagaggacatcacttcttccatatcccaagcagaactgacagtcgatagtgatattcagtcatctgattttcctgagcctccagacgccctagaagcagacactttcccagatgaaattcatcaccctaagatgactgtggagccatcatttaatgatgctcatgtatccaaattcagtgaccaaaatagcacagaactgatgaatagtgttatggtcagaacagaagaagaaatctctgacaccgaccttaaacaagaggaatcaccctctgatttagccagtgcttatgttactgagggtttagagtctcccactatagaagaacaagttgatcaaacaattgatgatgaaacaatacttatcgttccttcaccacatggctttatccaggcatctgatgttatagatactgaatctgtcttgcctttgacaacactaacagatcccatactccaacatcatcaggaagaatcaaatatcattggatcatccttgggcagtcctgtttcagaagattcaaaggatgtcgaagatttggtaaactgtcattagaataattcttagaaataggcagttcaagcaaagaaggcacactgttaattacaacctcttcaaagaaataggagcaacccccaagaggcttaatttaccaatttaaatagccacagtccttaagccacacacattgttgctgctatgactttttacctcctttaaacacatcatctgaggttgagttttatgacagtatgtagttgagtggaggctgggagttttaagcataaatccctgtttagtgttacatgggaataaggaatttcattcacttcagccactaagaaaagtttagaatcacgaaagcttaactgctgtggtttaaagtacagtttctctaaagatcagacatggcactgtctcctctcaagcctggttgtagttcagatgagtcttttcaacatggtcttcaacatggtctagagcttaccagtgatcttctgatcttcaagaagactaagtttgagacttgaccagcatacaagtatagagacctaggaggtggtcttgtggtggtacatttggttaacccattgctggcagtgggagctgatttaggcagggtaaacaggaaagcattaaaagttaaaattcactacaggttttttgttacttttaaagggaatatggataagcatagtaacaaaacccaccagaatctaagcagttttcaccccctcagaaaccactgtcattagtttacaaagttagcactttgaagtaaaactaaatgaggaaggaagtaatgttacctatccttgataccatgaccatttattagatgttttgctatataaattaccgagagaatagtttgtcatccacttagtgtgttagctggtggggtacaatataacctctcatctcaggctattttaaaaaaacaatatttgcttctataacaaaaggaaacaaatctaagaatcattcctgtactacagaagggttaaggcaaaggtagccttttgggctttttaatgaatatgacccctatagaaaagtcaagaaaaaaaaacccttgtataaattattttatttattattgtaattagatcttcacaaagttgtcttttcactgtgttttgtcaacgtgaaattaaattgtagttataagcaaaagttggttgcctagggaacaattgtatattcagtttaacagaaataaaagaatatttgtctt

SEQ ID NO: 4246 - DNA, 2815 bp, Homo sapiens
gggaagcgacgagtccgggacgcccagcgcgggcccggagcagggggaagggaagtgcggctcggtcggcgcgggtggagggggcgtgaggccgccctacggtggccgtcgagggacggcgctacggctcccacgctaggccaaacgcctccggcggccgcgcccgagagccccttcacctgcagggcgaccccagccggcgacgcgtgaaccacgccctcagccgccttgccagcgcccccagccgcgcgccccagcaccatgcggccgccctgcgcacggagccccgagggacaggggcacccgcaggcccggcccctagcaccgccggccggccccgaggtccgggacgccggcgccgccgcggagagggcaccgggccgacgcctccccccagggtcagctgcgggctcccaggcctaggcgcccatgacccctacgccaacagccgcctggacaccgccgccgccactgcgacctagcgccgccgccgccggggcccaatgccggtcatgcccattccgcggcgggtgcgctccttccacggcccgcacaccacctgcctgcatgcggcctgcgggcccgtgcgcgcctcccacctggcccgcaccaagtacaacaacttcgacgtgtacatcaagacgcgctggctgtacggcttcatccgcttcctactctactttagctgcagcctgttcactgcggcgctctggggtgcgctggccgccctcttctgcctacagtacctgggcgttcgcgtcctgctgcgcttccagcgcaagctgtcggtgctgctgctgctgctgggccgccggcgcgtggacttccgcctggtgaacgagctgctcgtctatggcatccacgtcaccatgctgctggtcgggggcctgggctggtgcttcatggtcttcgtggacatgtgagggccgtgggtgcgagcttgatgtatcgtcccggcctgtggctgtgttctctccatgggtggggtcggccagcgccttcccttcgcccatcccccaggcagtcgctgctgcccggcgcccacggagagaaaagaaagggctgagacttctgtgatgggggcgcggacaccacccctaggctggcttcctggacccaccctccccgtatgcactctcaggggcagcgcccacctgccggtggctcctgctcacatgtcttcgggtcgtactgcggggtgggccctccgttccgcctctctgtgggcctctctccaggaccacagctgccagggactttagacatcaccctgggaggcccctggacacagagggctgtgtgcccaggagcaattccggaggggggccctcctggctgcacagccccttctgcgtgccctggccccagccccagccaacgggacacggaaggctcccctcgctgacacaccacactgccacaaagctgcttactctgccctgggccgcctgaggcctggcactgcccgcggaccaccctgtgtgtgtcatcctgaggggctgtgtgggtcctgagtccccagccagccttcagggtccccttggattgtgtagatgcagtctagcggggggccggagaagggctcaggtgggaggggcctcagcaggctcccagctcaggggctggcctggggggaaccctgggagccaggggctgactccagcaacactggcctgtctgcctgttctgggagggctgtgaggatgtcttgcagatgctctggatttctgcggaggcacctccattcctttctggctttttttgcgggggagggctttgggcctctttctttgagggaacaccgtcaaagaaagcctgggagatcgaggcttcagtgagccaggatggaaacgcgtgtcccaagtgtccggagcaggcggcagaggcctcagtgcggcaaacacagccccagagcctgtgtggcaccagcagcatcttagagccccaggtatatgctgagatcttatctcacgctgtcctccagtgtctggggggcccaaatgatggcacaggggcaggtgggctggaggggcgcagatgcctgtgttcagggagggtggccaccatgggccgaggtctcacccaggaccccttgctctgctcctcagccttgcagtcacggcagcactatggtggactgcccatggccgtgtgactttgggggcaagtgggagggcgccctgaataatgattgcaaggacaacaggcagaggctaccctagagcaggacacagggtgtggtactgacaaccctagtgtcacctcaaatccatgtccccacactctgggcatgggtgggacttgtgaccctaccctgtcaggcggaccagtggcccaggagccatgaggacagttgtgtgccactggaagagaaactttttgaaaaaccctaaatcaggtagagaaagcaaaaaatctctggccgtaaaccgtgctctctaatttatcggcagcttctgtggatgacctctgatgagcccgggctgcgtccacgccctgggcaggtaggcgggagcttccctgcgtgggcctcatttcttgctgcagagaatcttttgcactaagtcatgctgtttcctcaaagaagctttgttttttgttaacgtattactcagagtcacccaagcctcttggctgagggtgaaggtgggacgggaggcgggagggggctggtggtgccgctcgtgcggtgtcaacgctgcagggagttgtggcaccttggtgccctctgagcacctggccgcctgctgtccccggtgcctgtgaaattcgtcatgccatgacccacctgcattaaacctatttttttaatgtg

SEQ ID NO: 4247 - DNA, 2041 bp, Homo sapiens
tacgaagcattccagaagactcagagttaaatacagttacattgccaagaaaagcaagaatgaaagaccagtttggcaattctattatcaacacacctctgaaacgtcgtaaagtgttttctcaagaacctccagatgctttagctttaagctgccaaagttcctttgacagtgtcattttaaactgtcgaagtatacgagtaggaacactcttccggctgttaatagagcctgtaattttttgtttagattttatcaagatacagctagacgaaccagaccatgatcctgtagagattatattaaatacctctgatctaactaaatgtgaatggtgtaatgtccgaaaattacctgtagtgtttcttcaagcaattccagcagtttatcaaaagctgagcatccaactgcaaatgaataaggaggataaagtttggaatgattgtaaaggagtaaataaattaacaaatttagaagaacaatatataattttaatttttcaaaatggccttgatcctccggcaaatatggtatttgaaagtatcattaatgaaattggtataaagaataacatctccaatttttttgcgaaaattccctttgaagaagctaatggcagacttgttgcctgtacaagaacctatgaagagagcatcaaaggaagttgtgggcaaaaggaaaacaaaattaaaactgtatcatttgaatctaaaatacaacttagaagcaaacaagaatttcagttttttgatgaagaagaagaaactggagaaaaccacaccatcttcattggcccagtagaaaagttgatagtatatccaccacctccagctaagggaggcatctctgttaccaatgaggacctgcactgtctaaatgaaggagaatttttaaatgatgttattatagacttttatttgaaatacttggtgcttgaaaaactgaagaaggaagacgctgaccgaattcatatattcagttcttttttctataaacgccttaatcagagagagaggagaaatcatgaaacaactaatctgtcaatacagcaaaaacggcatgggagagtaaaaacatggacccggcacgtagatatttttgagaaggattttatttttgtaccccttaatgaagcatggcttaagcaaaatcagactaaactatagcgatgaatcacctgaagctggtaaaatgcttgaagatgaactcgtcgacttctcagaagatcaggataaccaggatgatagcagtgacgatggattcctcgctgatgacaactgcagttcagaaataggacagtggcatttaaagcctactatctgtaaacaaccttgtatcctacttatggactcactccgaggcccttctcggtcaaatgttgtcaaaattttaagagagtatttagaagtggaatgggaagttaaaaaaggaagcaaaagaagtttttccaaagatgttatgaagggctctaatccaaaagtaccacagcaaaacaacttcagtgactgtggtgtatatgtattgcagtatgtagagagcttttttgagaatccaattctcagttttgaactacctatgaatttggcaaactggtttcctccaccaagaatgagaacaaaaagagaagaaatccgaaacataattctgaagctacaggaagatcagagcaaagagaaaagaaagcataaggacacttactcaacagaagcacctttaggcgaaggaacagaacaatatgtcaatagtatctcagattgaccatttctgttacttgtcatttctactttcagaaactaaatgactttcaaatttgggtatagacaataaagaactgaagtgctcactactcagtgatttggaaattttgatgcttgtataaatgtcagataattaatttccaaaggcgtatgtattaagtaaaagtctgtaaatatgttaatgaggccaatttttccagcatttataattatttttttcacttgttaggaagcttttgttatgtattttctgttaatagtacctaaaattgcaacttctaaac

SEQ ID NO: 4248 - DNA, 2683 bp, Homo sapiens
ttgagcaacaataagaaattgagtgaaaatacgcaaaatacgtcattatgttctggaactgtagttcatggtagacgttttcatcatgctcatgcacagataccagtagtaaaaacagcagcccaaagcagtctggaccgaaaagaaaggaaagaatacccacctcatgtccaaaaagttgaaattaatcctgtaaggttaagtcggctccaaggtgttgaacgtataatgaagaaaacagaagagtccgaatcacaagtggagcctgaaattaagaggaaagtacaacagaaacgacactgtagtacctatcagcctactcctcctctatctcctgcttcaaaaaaatgtttaacccatttagaggatttgcaaagaaattgcagacaagctattactttgaatgagtctactggaccattattaagaacgtcaattcatcagaattctggaggacagaagtcacaaaacacaggattaacaaccaagaagttttatggcaacaatgtggaaaaggttccaattgatattattgtgaattgtgatgacagtaaacacacttatttacagactaatggaaaagtcattttacctggggcaaaaatacccaaaatcacaaacttgaaagaaaggaaaacaagtttgtcagacctaaatgatccaatcattttgtccagtgatgatgatgatgacaacgacagaactaacagaagagaaagcatatctcctcagcctgctgattcagcatgttcttcccctgcaccatccactggaaaagtagaagcagcgctaaatgaaaatacttgcagagcagagcgtgaactacgaagcattccagaagactcagagttaaatacagttacattgccaagaaaagcaagaatgaaagaccagtttggcaattctattatcaacacacctctgaaacgtcgtaaagtgttttctcaagaacctccagatgctttagctttaagctgccaaagttcctttgacagtgtcattttaaactgtcgaagtatacgagtaggaacactcttccggctgttaatagagcctgtaattttttgtttagattttatcaagatacagctagacgaaccagaccatgatcctgtagagattatattaaatacctctgatctaactaaatgtgaatggtgtaatgtccgaaaattacctgtagtgtttcttcaagcaattccagcagtttatcaaaagctgagcatccaactgcaaatgaataaggaggataaagtttggaatgattgtaaaggagtaaataaattaacaaatttagaagaacaatatataattttaatttttcaaaatggccttgatcctccggcaaatatggtatttgaaagtatcattaatgaaattggtataaagaataacatctccaatttttttgcgaaaattccctttgaagaagctaatggcagacttgttgcctgtacaagaacctatgaagagagcatcaaaggaagttgtgggcaaaaggaaaacaaaattaaaactgtatcatttgaatctaaaatacaacttagaagcaaacaagaatttcagttttttgatgaagaagaagaaactggagaaaaccacaccatcttcattggcccagtagaaaagttgatagtatatccaccacctccagctaagggaggcatctctgttaccaatgaggacctgcactgtctaaatgaaggagaatttttaaatgatgttattatagacttttatttgaagtaagttaattttccactgatcttttattaaatctttaacattccgtcatatcttatgtctttgttttccagagtcaggctttttgagttttaaattccatctctgccacttactgtgtgacatttggggagttattttttctgtttctgtctttgcacattttaaaaatgagaattctatctaaaaagttgtgaaaattgggccagggagatatctggcttatgtctataatcctgacactttgggaggtcaaggtgggaggatcgcttgagcccaagagttcacgaccagcctgggaaacaaagtgagaccttgtctccacaaaaaatttaaaaattagccagtcatatacctatagtcccagccacttgggaggctcagacaggaagattacctgagcccatgagttcgaagttgcactgagccatgatggcgccactgcactccagcctggtcaacaaagcaaaactctacccccacacccacccccgaaaacaggagttgtgagaattaaatgagatcgtacatatcaagtagtaggaaaaatgcctagtacagtgttagaagtttatggtcttgtaggaagcacaaatacagaattaaagcaatgatagaagcattaacatggtacagtcctagcagatgagagaatgcttcattatctttggaggttgggagatatgagggaccaggaagctttcctggaagagcttacattatgacccaatatacattatgacccaacataacacatgtatacacctatgtgcaatgtgtttatacatttatcaatttgtatgtttttactggtttgtgatataaaatggacatgtatatgaaataaaacagaacttagcatcagtatgcatagttctctgtaatattttctagtttcttatactgtgtttcattaaacaaaacaaaacttttaaaaatt

SEQ ID NO: 4249 - DNA, 2604 bp, Homo sapiens
ctgtggcggtggcgctggtggctgcggcggcggcggcggcagcggcgctcgagcggttcctgtcagggtcagccggcgggccccctgggtggtccacctgcaaatcgcggagcggcgccccagggatcgatggcgatgaactataacgcgaaggatgaagtggacggtgggcccccgtgtgctccggggggcaccgcgaagactcggagaccggataacacggccttcaaacagcaacggctgccagcttggcagcccatccttacggctggcacggtgctacctattttcttcatcatcggtctcatcttcattcccatcggcattggcatttttgtcacctccaacaacatccgcgagatcgagggcaacgtgtttatgtattatggactgtctaatttctatcaaaaccatcgtcgttacgtgaaatctcgagatgatagtcaactaaatggagattctagtgctttgcttaatcccagtaaggaatgtgaaccttatcgaagaaatgaagacaaaccaattgctccttgtggagctattgccaacagcatgtttaatgatacattagaattgtttctcattggcaatgattcttatcctatacctatcgctttgaaaaagaaaggtattgcttggtggacagataaaaatgtgaaattcagaaatccccctggaggagacaacctggaagaacgatttaaaggtacaacaaagcctgtgaactggcttaaaccagtttacatgctggattctgacccagataataatggattcataaatgaggattttattgtttggatgcgtactgcagcattacctacttttcgcaagttgtatcgtcttatagaaaggaaaagtgatttacatccaacattaccagctggccgatactctttgaatgtcacatacaattaccctgtacattattttgatggacgaaaacggatgatcttgagcactatttcatggatgggaggaaaaaatccatttttggggattgcttacatcgctgttggatccatctccttccttctgggagttgtactgctagtaattaatcataaatatagaaacagtagtaatacagctgacattaccatttaattttatattatgaaagcaaatcatctgcatgtgcatcaaggccagtcctattcaacctagctttcgaatgctgatatctggttagtatgtcattttgaagttggcacataacttttctaaaaaaaagcagtctttgttgtttgcttcttccctacggatgacttctaaaaatatatgacgggtataaaaaaattagctatattgatcatatcaacactgtaactgctgaaatggcattctaatgtttgctttttattcggacaggccacatgatgcatagagcctctttcatgtgacttgtgtctactgcttaaatctttatgctgtgttgatgatattatattgacatatgaagctgtatatgtgtatgtattttgtggagaaagggattacaagatgtatgagtataatgacttgctaacctttcaggattcagagaaagatgaagaaagaccatatctaaataatacacttcatcattttcatgtgtataaatgcttaaagtaccatctttgttgaggtggttcatgtatccagtttatccagtacagttatttgtcaagcttagctttgatttcaaaggacacgcttaccttgtctggcataagaattaatgctcatgtctgcagtggttgggtaggtcctgcttaggagaattaaaaaattcctctttccgtttggttgaatgttgcagtcaggaaccccaactcacttggaatgtttttatatgtaatcatttcccttgaagcttatactttataagggaagaaagaattcaggtgatatgggaaaactgcttggcagaccttcatcttctgcctcaactgtaaaccacatgtaagtgcttaatggagactgttttcattcttgtgatatttaacattcagaaaattacttcagctttggaaatactcaggctgtttttattctgcaggtaagtgttttgacttaagtactaatattccagaaatttttgaaagcagtaaccttaatttcctatgtatttcattccacttttgcatataggtcaaatagcaatgtgtatgcacattctctttagttaaggcaccaattgttttggttggttttcctaagacatactttaaaaagatgttctataaatttcctaattaaattatggggattttggagtatgtacatgataaattataatatgtatatggttgaagttattttattttttactaatgaattattttaatattccttattgaataaatgctgtaacttgtttgctatggaacttattcttaaagttctagttaaaaataatttttccacatgcatgaaaatatgtattaatcagaggtggcttaattacattgaaattgcttttttgttgttgtttttttactgaaataactcatgtttgtgtagaagaatgcctgtttactcagagtttatattttccttcagttatattttaaatcaaaaggtctgggtaatgtatacttttgattaatatatacttttttt

SEQ ID NO: 4250 - DNA, 1542 bp, Homo sapiens
ccgggacgtcacgtggactggggccggataatggcgggcgctgcagaagatgcgcgagctcttttccgggctggggtctgcgcggccctggaggcctggccggccttgcagatcgctgtggagaatggcttcgggggtgtgcacagccaggagaaggccaagtggctggggggtgcagtggaggattacttcatgcgcaatgctgacttggagctagatgaggtggaagacttccttggagagctgttgaccaacgagtttgatacagttgtggaagacgggagtctgccccaggtgagccagcaactgcagaccatgttccaccacttccagaggggtgatggggctgctctgagggagatggcctcctgcatcactcagagaaaatgcaaggtcacagccactgcacttaagacagctagagagactgatgaggatgaagatgatgtggacagtgtggaagagatggaggtcacagctacgaatgatggggctgctacagatggggtctgcccccagcctgaaccctctgatccagacgctcagactattaaggaagaggatatagtggaagatggctggaccattgtccggagaaaaaaatgagtggggatgattggaaatggctttgggcccttatttgctgttctaagagttgtctgtaggggttttttttttgaggattgcagacctgtggactggttaccccatctccaccctctcccctgttcctctgtctggctccctccagggcaaggaaaacctagggtccttggtcttgggggtggggggaccttttccagcatattcccctgggcctttagttaacatccgagtgacgaagccgggttccccagtacagtgtcttttgggtgcggtcattgtgaggaaggggatgagtgagtgtgggtgtggctggaggaggagctagatgccggtggacagtgggcaggtggatttggggaggagaggatcagcagcagcagcagtactcagtgatagggggctggctgggtcaggaatggtgagatgaacatgcaagtggaagagagaatagttgaaaatgtgaatgaaagtagctctggagcctctcccttaccccaccccacacacacgcaacagctctgtacccctgcccagaacttggaacctcccaggaatgctgccttccttcagcccagcctccagtcctgggttccctcaggaattcgaagaccttggctaggtggtgagcttggaagagctgggctttgttttctgtctcctctaacctctttccttactccttatcccatcccatttgagttcaggggtgaggcttaagatcttaataaataataccttactgcttaatctgtggcttgacctgtgagtagtagccttagaatcagccttctgggagctcagcttcagagtttacaagggagcagtttctgggcccaccctagcagcctggtactttggacaaccaaacagatgaacgaacggagcacagcagtgctatgaaagttactgtaagcctgaaataaactgtatttttct

SEQ ID NO: 4251 - DNA, 3589 bp, Homo sapiens
ctcctccctctctccctccctctggcgtctccagccgactttcgcttcccgtcagcagcctttggcggaagagtgtcccgcctcttccgctctacagcggaggtggctgtggcggtggcgctggtggctgcggcggcggcggcggcagcggcgctcgagcggttcctgtcagggtcagccggcgggccccctgggtggtccacctgcaaatcgcggagcggcgccccagggatcgatggcgatgaactataacgcgaaggatgaagtggacggtgggcccccgtgtgctccggggggcaccgcgaagactcggagaccggataacacggccttcaaacagcaacggctgccagcttggcagcccatccttacggctggcacggtgctacctattttcttcatcatcggtctcatcttcattcccatcggcattggcatttttgtcacctccaacaacatccgcgagatcgagattgattataccggaacagagccttccagtccctgtaataaatgtttatctccggatgtgacaccttgcttttgtaccattaacttcacactggaaaagtcatttgagggcaacgtgtttatgtattatggactgtctaatttctatcaaaaccatcgtcgttacgtgaaatctcgagatgatagtcaactaaatggagattctagtgctttgcttaatcccagtaaggaatgtgaaccttatcgaagaaatgaagacaaaccaattgctccttgtggagctattgccaacagcatgtttaatgatacattagaattgtttctcattggcaatgattcttatcctatacctatcgctttgaaaaagaaaggtattgcttggtggacagataaaaatgtgaaattcagaaatccccctggaggagacaacctggaagaacgatttaaaggtacaacaaagcctgtgaactggcttaaaccagtttacatgctggattctgacccagataataatggattcataaatgaggattttattgtttggatgcgtactgcagcattacctacttttcgcaagttgtatcgtcttatagaaaggaaaagtgatttacatccaacattaccagctggccgatactctttgaatgtcacatacagcagcagcatatctccctattacagaccagaatacaggaatatcgagcacttaagtaacttagctgactttacacaggtaataataaagagttgaggttcataaccaggctgttgactccaaaggccataattttactctcagctaccaacatagcctgcgtcttagctagttcactcagttacaccaacccatatctgcatagatgcagtcttttttaggagggaaatactcagtaatttcttttattctaaccaaagtctttgcatcttttaatctggagtctatattttacatacactgtgagtgaagagatctctcaatattagaattgtaaatgtttgctgatctttgcatttttatttccataatccaaatgagtcataatccatatgggttttggttttaaaatggattagtaaatggttaaattaatagacccaatttcaaaataaggttttttttgaattctactctcttgatgttgcacctgaatacacaagtaaatatggcctgctatggcaggctaaaagtgaccaagtttttgaaactaaatccacattggagcagttttggacagacagacccacttcaagtgctggtagaaataacattatcctgaggggatagtcaaactagagagtagctctgttaaaattagcatccagaaaatctctagagagtaagggcaaatttagcaacctgtagcctaaggcacaatgaagggaagtctgtgaagcactgaggaatttttagttgatagatgatttccatacaggaattctgcagcagggtcccaggtttgaaagaactatctaaaggaatgcatgatatatggcagattgagaagacttgataagacaggaatttggacctgcaaaacatcaagggttaattatcaaaattgggcataaggtgggaactaaagactagaatgatggcagaagcctgtttctttaggtttgggagactagagagagacaagcatgggtaatttgatactgtatcccacagaatgttgggttagctagaggtcttaaaatcattcctgccttagtttagggttaatttaagaagttagcagaactgaacctgccattgggagttagggacccatagggacccatctgtggggatggagagttgaagaaactagagaaacagatggggcctaaccctagattcaaaagatgcttttgaaaaagttgtaaactttttgcatggagacttggttctgtcttctttgctgccttacctcttgcaaaattctacaactggtccatgtagataattcatctagtacactggtgccctgtttcctaaatctccttaacagcccacccttcactgccactgttagctatcagctgtgtcacagagtgagttttgccattgctccaaatcagcaagttaaaacttttttattaccatgctttttgatcttttgctcagagccttttcatagtctcataactacactcttgatacatgtgttctttgagctcatggagacttctagttcctgatttttccattttctcctggtctgtcagtctccttgtgtgggcttcattgttcacttgaagtatttttttcacattgcattcctttgaggccttttgccccttccatgtaatgagagcaaaagcacctgagaaactacataacctttacatttatttgttttggtaaaatattttggcttttactactaacatttagtttgctaaatcagtctttcaagataatactttgtgtgtgtgtgtgtgtgatttagaacgtaggagtgaggtacctgtatatcctagaattacacaaatgaattaccaacaattaaatggcaacttttaaaattgtattttaaacatcaagtaaccagagatggaaaaatcttcctataccctcttcagattaccctgtacattattttgatggacgaaaacggatgatcttgagcactatttcatggatgggaggaaaaaatccatttttggggattgcttacatcgctgttggatccatctccttccttctgggagttgtactgctagtaattaatcataaatatagaaacagtagtaatacagctgacattaccatttaattttatattatgaaagcaaatcatctgcatgtgcatcaaggccagtcctattcaacctagctttcgaatgctgatatctggttagtatgtcattttgaagttggcacataacttttctaaaaaaaagcagtctttgttgtttgcttcttccctacggatgacttctaaaaatatatgacgggtataaaaaaattagctatattgatcatatcaacactgtaactgctgaaatggcattctaatgtttgctttttattcggacaggccacatgatgcatagagcctctttcatgtgacttgtgtctactgcttaaatctttatgctgtgttgatgatattatattgacatatgaagctgt

SEQ ID NO: 4252 - DNA, 5312 bp, Homo sapiens
  misc_feature (87)..(103): n is a, c, g, or t
  misc_feature (555)..(570): n is a, c, g, or t
ggaagctatgcgaaattatttaaaagagcgaggggatcaaacagtacttattcttcatgcaaaagttgcacagaagtcatatggaannnnnnnnnnnnnnnnncccacctccttgtgtatatcttatgggcagtggatggaagaaaaaaaaagaacaaatggaacgcgatggttgttctgaacaagagtctcaaccgtgtgcatttattgggataggaaatagtgaccaagaaatgcagcagctaaacttggaaggaaagaactattgcacagccaaaacattgtatatatctgactcagacaagcgaaagcacttcatgttgtctgtaaagatgttctatggcaacagtgatgacattggtgtgttcctcagcaagcggataaaagtcatctccaaaccttccaaaaagaagcagtcattgaaaaatgctgacttatgcattgcctcaggaacaaaggtggctctgtttaatcgactacgatcccagacagttagtaccagatacttgcatgtagaaggaggtaattttcatgccagttcacagcagtggggannnnnnnnnnnnnnnntggatgatgatgaatcagaaggagaagaattcacagtccgagatggctacatccattatggacaaacagtcaaacttgtgtgctcagttactggcatggcactcccaagattgataattaggaaagttgataagcagaccgcattattggatgcagatgatcctgtgtcacaactccataaatgtgcattttaccttaaggatacagaaagaatgtatttgtgcctttctcaagaaagaataattcaatttcaggccactccatgtccaaaagaaccaaataaagagatgataaatgatggcgcttcctggacaatcattagcacagataaggcagagtatacattttatgagggaatgggccctgtccttgccccagtcactcctgtgcctgtggtagagagccttcagttgaatggcggtggggacgtagcaatgcttgaacttacaggacagaatttcactccaaatttacgagtgtggtttggggatgtagaagctgaaactatgtacaggtgtggagagagtatgctctgtgtcgtcccagacatttctgcattccgagaaggttggagatgggtccggcaaccagtccaggttccagtaactttggtccgaaatgatggaatcatttattccaccagccttacctttacctacacaccagaaccagggccgcggccacattgcagtgcagcaggagcaatccttcgagccaattcaagccaggtgccccctaacgaatcaaacacaaacagcgagggaagttacacaaacgccagcacaaattcaaccagtgtcacatcatctacagccacagtggtatcctaactaccgtctttttgctaggacttaaactgacttgagtgtggcaaaaagttaacaaaaaaggagaaaaaatgaacaatcgtttgtggtttcttgggaaaacttttcataccaggtgatactattcaaaaaccccgttgtctccctgcaagtgctgatttgaaatgcagaagccacagtaaaaaaaaaaaaaaaaaaaaaaaaaaagaaaaaaaaatcaaaatgtataaatattggaaatcaagtttttcagctgttttgttggttggttggttggtttttgtttggttttgtttaaatgggcaagaagtaaataatgtggctggaatacaagttgaacaaactagaagacacaaatctaacatagtttttatggaccaaggaacttgtatattgtataagctttagtaaaaggtacattttcaccatacctttttttatatcacggtattatagtacaccttgttaccaaataggttgttctcttccccacccacctttgagcttttgctctaaaatacattcaggttccaagcctgaccatccttgtttaatctatcatactcttccaggttttttttttttggtctaaggctggaacttttttcttttttttcagctgaagtcttatgacttttcatgagtcaaaattgtttggatttcagcaagtcaaatcttgcaaaggcctgcatattttttttaagattatatgaagtctgtgcaaaagctttaaaaaaatgcctctgccttgcctgcaatacatgcaatgtatgttaacttagtctctcttctcagacactgttggtagttatttctgtgttttcctttttttaaaaaaaaatatggacttattgtggttatctgagaggttctaacattcacatgcaatttggtgtggccatttagctattaatgagttaatggcgcagaacttgttgatatttgaagtgttctctccccttttcccatgacgtaaatacataggtgtgttccaggatttgttcaggtttttcccccctcctaatcttgtacataacttgtattatgtgtaagttaaacattttattttgaacttggaatgttcccagtgatttcattcagcagggtattttctgccttgttggcaagtgacaaaaaatatgggaagtatttgctaccagttggtagatggtgcccttaatggtagaatgaggaaaatgtccgcaaaagcatgttttattatctttacttttttggggggttggagggggtagcctagccagaacatcattgtaatcttaaaacataagatgcttttattagatgatcaactaaaatagctggaagacagtactttagaaacagatagttgtaagattataaaatgcaaatgtaacttatgttttcatttttttctctgccttttttgtttgtttgttttctcttttccagtactgagcatctccacaaatgtctcctaactcagaaaatgtttcttttcttttcagttgagatttggttgcattcagggttgtaggttggccttgcttgctaaccccgccggttttaccgtgctttcattcctgaactttgtttatgcctttgtttggtttcttcgaaattgcagcagactcattgggctacatttagtacaggaaccacgtgtgtaatgttatacaacacagtctagtaatacaatcatccctcttagagtaaaaactacctctagattgtggtaagcttttactgtcccataaaacaggagccacagtaccttatgaatgcaaaactgtaacttcctacagtgtttccctacagaacattgtctttctggtgtcctgggctgttttgaaaaagtttccattaatagactttttagaaattattattagtagcattttttttccagctttgctgtcttcatcactcactctatgctcagactatgccactgtaaatattcttcctaacatctttaaatcgccttttcctcagttttcaaggggaaggtcatttgtaaagcacgttaggtggttaaatcagttattgcggttttctcttactgcaagcctttttaatcacccccaggctgcattttattctatatcgccttttttcttcaaatctgctccaatcactcacttctctcttataagctaatcctgcctcacaccttaaatctgtttcagtgatcaagggcagaactcattgtggccttatctttctttgttgtaattgttcactgtctctttcttacagaccacttatttctgagtagtagttattcctctctatggagtcatggcaggaatcattacacagtgcttttgttcagagcatggacatgttcctagtgctgctttgctttaacggccacaagtttcctccacttcctaggtttggtatttagttaaggaatcatattaaattaaccaataacaaaagagatacttttgaagaacaaactattccttacccatttttgtagctcaaaaataatttttcaagttcatgaccttattaaaatgaacttgtgtttttttaacaaacatgtatgttttattttgatagtttctttccgtaagataattgaaatattatactgtaaacccttttcttttctttttttgaaaagtccaagaatgtacttatacaggcatttttccccacctatttttggccattctcataccacagactaaagagtgaaatgatttgtccattgtagcttattgtttatcagtagttcttttgtcagctgcttacattttttctttcatggttttgtgaatcattttcagtatgtaatttataggaaccttgtcctctggttatagtagactgtgtgccctcctccagtgatggcattattagacatgctggtcatttaccctcagaaagactctcttattagaatggtgagtgcttcagttatagtatgtttgaatttttaaaaaattctgttttagaaatgtatcttatgctctcatgactatgcagtttctaaacatacacatagaagctgagtctctgatccaatatgtttttatttgttccatttaatttatcacatagattgggaaggcaagctaaaagccttaaaaatgccctttatattttgagtgatttcagcgttgaacactagtatactatctaaatttgctgctcactttctttaaactgtggcaattaaaggcatgtttatacatgacttaatcgtgaaatgtttgtcactcttactgcacagacttatctgcaatcataactggttagtttttttgttttgttttgttttattgtttttaatgaaactggtaccatctgtgctttcacaaaaaacttccaatgccatttttgagaactaacctaactagtcatgctaaccagaaaatccactggggaggaggttccttttgaaacaaaatgctgttcagttagtaaccaagttactttgattgcaaaagcagctgtgtttctgataagtactgaacaaatgtgtgtaattttctgtgccagacttatgactttgttttcaagcactgtaatgtgggatggatggttagaaacaataatatattagggtttctgtttaaccctttcaggactgaactgtatctccttttgttaattttcccctgtgttgtgataaatgtttgccagcattcagtactgtgttggtccagatgtaggtttatatgctcatttttagcttatttcttgtaccttgcagcatgctctacgcattcagtccttaaggggtttattttacaaactgtgcgcctgtaaggtttattagcaataagatagaaaattgagcaagtttataccataattttgtagaaaaaaagaatctgctcagttccatatttcatccgtgaaaaacttgcaatacgagcagtttcaaggaataaataaaaaggaaatgtaaaccattgt

SEQ ID NO: 4253 - DNA, 1558 bp, Homo sapiens
gctcaagtggccaaggcaagatgggtcaaagtcagagtggtggtcatggtcctggaggtggcaagaaggatgacaaggacaagaaaaagaaatatgaacctcctgtaccaactagagtggggaaaaagaagaagaaaacaaagggaccagatgctgccagcaaactgccactggtgacacctcacactcagtgccggttaaaattactgaagttagagagaattaaagactatcttctcatggaggaagaattcattagaaatcaggaacaaatgaaaccattagaagaaaagcaagaggaggaaagatcaaaagtggatgatctgagggggaccccgatgtcagtaggaaccttggaagagatcattgatgacaatcatgccatcgtgtctacatctgtgggctcagaacactacgtcagcattctttcatttgtagacaaggatctgctggaacctggctgctcggtcctgctcaaccacaaggtgcatgccgtgataggggtgctgatggatgacacggatcccctggtcacagtgatgaaggtagaaaaggccccccaggagacctatgcagatattggggggttggacaaccaaattcaggaaattaaggaatctgtggagcttcctctcacccatcctgaatattatgaagagatgggtataaagcctcctaagggggtcattctctatggtccacctggcacaggtaaaaccttgttagccaaagcagtagcaaaccaaacctcagccactttcttgagagtggttggctctgaacttattcagaagtacctaggtgatgggcccaaactcgtacgggaattgttccgagttgctgaagaacatgcaccgtccatcgtgtttattgatgaaattgacgccattgggacaaaaagataagactccaattctggtggtgagagagaaattcagcgaacaatgttggaactgctgaaccagttggatggatttgattctaggggagatgtgaaagttatcatggccacaaaccgaatagaaactttggatccagcacttatcagaccaggccgcattgacaggaagattgagttccccctgcctgatgaaaagacgaagaagcgcatctttcagattcacacaagcaggatgacgctggctgatgatgtaaccctggacgacctgatcatggctaaagatgacctctctggtgctgacatcaaggcaatctgtacagaagctggtctgatggccttaagagaacgtagaatgaaagtaacaaatgaagacttcaaaaaatctaaagaaaatgttctttataagaaacaggaaggcacccctgaggggctgtatctctaatgaaccatggctgtcatcaggaaaatggttgggagatttctcagtccctgaaagggatgaggctgggggagttgcccagaggaatccctgttcccactgatttttattagcaaaacatcctgtgtcttttggagtacgatgtgtaagtgcccattgggtggcctgttggtcactgtgcagcagtctgcttcccaataaagcgtgctctttcacaa

SEQ ID NO: 4254 - DNA, 2657 bp, Homo sapiens
agggagtaaactcacgaaatcctcgaagacctccgcctagttctgttaatacaggaggcatcacagagatcatggcagaaggaggtgaattagagtttgttaaaaggatcatccatgacagtctacaacttaaaaaaagattaagatggtatagctgcatgctgggaaagaaatgcagcctggcgcctctgaaggaggagcttcgcatacaaggggttcccaaagtaacgtacactgaattctgtcaaggtcggacaatgagatgggccttagcttggagtttttatgatgatgtcacagtaccatcaccaccaagtaagcgaagaaaattagagaaaccgagaaaacccataacattcgtggtgctggcgtccgtgatgaaggaattatccctcaaagcatcacctctgcgctcggagacggcggaaggcatagtcgttgtcacgacatggattgaaaaaattctcactgatttgaaggtccagcataaacgagttccctgtggaaaagaggaagtcagccttttcctaacggccatagaaaactcctggattcatttaaggagaaagaaaagagagcgtgtgagacagctgagagaagttccccgagctcctgaggacgtcattcaggccttggaagagaaaaagcccacccccaaagagtctggcaatagccaagaactggccaggggcccccaggagaggaccccctgtgggcctgctctgcgggaaggcgaggctgccgctgtggagggcccgtgcccgagccaggagtccctgtcccaggaggaaaacccggaacccacggaggatgaaaggagtgaggaaaagggaggggtggaggttttggaaagttgtcaaggctctagcaacggagcccaggaccaagaggcttctgagcagttcggcagcccagtggctgaaagggggaaacgtctcccaggagtggccggacagtacctgtttaagtgtttgataaacgttaagaaggaggtggacgatgccttagtggagatgcactgggttgagggccagaacagggatctgatgaaccagctttgcacctacatacgtaaccaaattttcaggcttgttgcagttaactagaaacctcctgcacagttggaaacgtgttgatagtaacttgctttggagtggcctgtggggtggcaagaggaatcctaccagcggcccattagtagcacgatgtggaattatcttcgaaaacaaaaacctatgaatctgtcccccacctccccccgcctccttcccgctttttgagttacagggagtcgtagtgtggtcatttacaaggaggaattgtggtcatcagtaacaacagaaagccctcagtaaactcccgagggattgcaagctggctcaagctggcccctcagctctggactgcctctgcaaggtcagaagggttgtttgtggagtctgggctgggcagcactgcctagaatatcatgctgtctctgtcacccaagggtgtttcttgaggaggggtggctctctctgcctccagctggaggccctggtaccctgttctaggtcactcttcaagatggggcctaccttgcatcaatcccacaaagggagctgtatggtgggtggtggggaatctgggagagaaaccttagtaatgctgggaaggagcagcagagtctggggaccacccggtaaatggcacattcctgacacctggctgttttgatgttgcttatttcagaagcagaattaggtaagcaaaactccccggtgtgactgaggcacacagaaggcacccatacccccacctccagcctgttgacagtaccattttgtagcagttttactactgtgtgatttttgtttggacatctgaagtagagcttgttttgtttttaaataagaatattcacaaattaaaaaccagcggtcctatttgaatcctggggttagctgagtgagcggctgatgatagaaatgagaaatagaacaaaatagtatgtgccgtaggtagcttaagaaagtctcagatattttgttgctgatcaaatactgtttttttgtggcttcacttgtaatcccccctgtacttacctactcacattggagagttctgaggccggagtaactgtgtccttgaaacacgtttctaattggaatgccagggttcagtagccgtccccccggaaaggggtgaccttttgctgtgcttgatgttgcatcagcagcctagggttctgtttagactaaaatcttggccagagctccttgccatctgctaagaagactggggctgagtagttaagccagccttctgagaggtggctgttggtcaggacgggaagctggtgaccttggcatgtcttggcagcagctagatcaggccctcggcagagacacaggaagcggaactgctgtgccttaacttggctgtggagctggagctggagaaggcagcatactgaccagtggctttttgattgattgtttgttatgaggtggagttttactcttgttgtctaggctggagtgccgtggtgcgatcttagctcactgcaacccccgcctcccgggttcaggagactcgcttgaacctgggaggtggaggttgcagtgagccgagaatgccactgcactacagcctgggcgacaaagtgggactgtctc

SEQ ID NO: 4255 - DNA, 2460 bp, Homo sapiens
ggcgtggcggagtcagggcgggcctcgagaggccgcgcccgcggctcggccccggactccggcctccggcctccggccccccgctggggagccggtcgctgcttcccgacggattttgatctttgttcttccaggccggctcccccttcctggtctcccttctcccgctgggccggtttatcgggaggagattgtcttccagggctagcaattggacttttgatgatgtttgacccagcggcaggaatagcaggcaacgtgatttcaaagctgggctcagcctctgtttcttctctcgtgtaatcgcaaaacccattttggagcaggaattccaatcatgtctgtgatggtggtgagaaagaaggtgacacggaaatgggagaaactcccaggcaggaacaccttttgctgtgatggccgcgtcatgatggcccggcaaaagggcattttctacctgacccttttcctcatcctggggacatgtacactcttcttcgcctttgagtgccgctacctggctgttcagctgtctcctgccatccctgtatttgctgccatgctcttccttttctccatggctacactgttgaggaccagcttcagtgaccctggagtgattcctcgggcgctaccagatgaagcagctttcatagaaatggagatagaagctaccaatggtgcggtgccccagggccagcgaccaccgcctcgtatcaagaatttccagataaacaaccagattgtgaaactgaaatactgttacacatgcaagatcttccggcctccccgggcctcccattgcagcatctgtgacaactgtgtggagcgcttcgaccatcactgcccctgggtggggaattgtgttggaaagaggaactaccgctacttctacctcttcatcctttctctctccctcctcacaatctatgtcttcgccttcaacatcgtctatgtggccctcaaatctttgaaaattggcttcttggagacattgaaagaaactcctggaactgttctagaagtcctcatttgcttctttacactctggtccgtcgtgggactgactggatttcatactttcctcgtggctctcaaccagacaaccaatgaagacatcaaaggatcatggacagggaagaatcgcgtccagaatccctacagccatggcaatattgtgaagaactgctgtgaagtgctgtgtggccccttgccccccagtgtgctggatcgaaggggtattttgccactggaggaaagtggaagtcgacctcccagtactcaagagaccagtagcagcctcttgccacagagcccagcccccacagaacacctgaactcaaatgagatgccggaggacagcagcactcccgaagagatgccacctccagagcccccagagccaccacaggaggcagctgaagctgagaagtagcctatctatggaagagacttttgtttgtgtttaattagggctatgagagatttcaggtgagaagttaaacctgagacagagagcaagtaagctgtcccttttaactgtttttctttggtctttagtcacccagttgcacactggcattttcttgctgcaagcttttttaaatttctgaactcaaggcagtggcagaagatgtcagtcacctctgataactggaaaaatgggtctcttgggccctggcactggttctccatggcctcagccacagggtccccttggaccccctctcttccctccagatcccagccctcctgcttggggtcactggtctcattctggggctaaaagtttttgagactggctcaaatcctcccaagctgctgcacgtgctgagtccagaggcagtcacagagacctctggccaggggatcctaactgggttcttggggtcttcaggactgaagaggagggagagtggggtcagaagattctcctggccaccaagtgccagcattgcccacaaatccttttaggaatgggacaggtaccttccacttgttgtatttattagtgtagcttctcctttgtctcccatccactctgacacctaagccccactcttttcccattagatatatgtaagtagttgtagtagagataataattgacatttctcgtagactacccagaaacttttttaatacctgtgccattctcaataagaatttatgagatgccagcggcatagcccttcacactctctgtctcatctctcctcctttctcattagccccttttaatttgtttttccttttgactcctgctcccattaggagcaggaatggcagtaataaaagtctgcactttggtcatttcttttcctcagaggaagcctgagtgctcacttaaacactatcccctcagactccctgtgtgaggcctgcagaggccctgaatgcacaaatgggaaaccaaggcacagagaggctctcctctcctctcctctcccccgatgtaccctc

SEQ ID NO: 4256 - DNA, 1134 bp, Homo sapiens
aataacatagctgatccagaagaactgttcacaaaattagagcgcattgggaaaggctcatttggggaagttttcaaaggaattgataaccgtacccagcaagtcgttgctattaaaatcatagaccttgaggaagccgaagatgaaatagaagacattcagcaagaaataactgtcttgagtcaatgtgacagctcatatgtaacaaaatactatgggtcatatttaaaggggtctaaattatggataataatggaatacctgggcggtggttcagcactggatcttcttcgagctggtccatttgatgagttccagattgctaccatgctaaaggaaattttaaaaggtctggactatctgcattcagaaaagaaaattcaccgagacataaaagctgccaatgtcttgctctcagaacaaggagatgttaaacttgctgattttggagttgctggtcagctgacagatacacagattaaaagaaatacctttgtgggaactccattttggatggctcctgaagttattcaacagtcagcttatgactcaaaacgtcctacagcaaaagaacttctgaaacacaaattcattgtaaaaaattcaaagaagacttcttatctgactgaactgatagatcgttttaagagatggaaggcagaaggacacagtgatgatgaatctgattccgagggctctgattcggaatctaccagcagggaaaacaatactcatcctgaatggagctttaccaccgtacgaaagaagcctgatccaaagaaagtacagaatggggcagagcaagatcttgtgcaaaccctgagttgtttgtctatgataatcacacctgcatttgctgaacttaaacagcaggacgagaataacgctagcaggaatcaggcgattgaagaactcgagaaaagtattgctgtggctgaagccgcctgtcccggcatcacagataaaatggtgaagaaactaattgaaaaatttcaaaagtgttcagcagacgaatccccctaagaaacttattattggcttctgtttcatatggacccagagagccccaccaaacctacgtcaagattaacaatgcttaacccatgagctccatgtgccttttggatctttgca

SEQ ID NO: 4257 - DNA, 3913 bp, Homo sapiens
caactgtgaagaatttaaaacttagtataaattggtcctaccagatccctccttttaattgtccatgcatgcagggagtttttgttgaaagttttaaaagaactgggtatgcaggtatggtttgtagggttgtatactaatagattgagaatccgaagcgctctcttggatgtactagatctgtccccattttttaagtttgaatgcagttgtgcaacatgaaaactgcagtgacatgttaccatttgactgtctccgtagttcgtgatgcatctgttgcatgctatgttttcaaagctcactgctatattggctttgaagtaaaccttcctaataaagctgtaggctttattgaggtcaggattatataaggcacaatatcctctgggggaaaaaaatcatttgccctagctgtaattacagaacataaatttcactacgtactccctacctacagtgaagaataatgtaggaaacgttattcttgaattgtctagctgatgcgtggagcagcagcatcccaagtttgacaaggcataagaaagacattaagggaattttaccttgcagcagttaggtcgtctgcattttaagcttggaagtagttttgtgctgtgcatgcataaaagctgttggcagaccagattatatttgcctttatgctttaaaaattagtcattgatcctggagttctgcggaataataattaaggcttgggttttagatccaaaaggtaattctggcacttggagactatatgggagccacttgtcatgcctgcattggtggaacaaatgttcgaaatgaaatgcaaaaactgcaggctgaagcaccacatattgttgttggtacacccgggagagtgtttgatatgttaaacagaagatacctttctccaaaatggatcaaaatgtttgttttggatgaagcagatgaaatgttgagccgtggttttaaggatcaaatctatgagattttccaaaaactaaacacaagtattcaggtaagcattacttcacccccctcttaaaggtagagatggggtttatttaatgcaggtactgttacaatacaactgatgtgttttgctgtcgttccccctgcttaaagcacttgatgcataactctgtctaccttcattccgtagtaagacagagacgcttggcttcagacattttcctttgggtattaatgtgtaagttgtgctacaacataattttctctttttaaggttgtgttgctttctgccacaatgccaactgatgtgttggaagtgaccaaaaaattcatgagagatccaattcgaattctggtgaaaaaggaagaattgacccttgaaggaatcaaacagttttatattaatgttgagagagaggaatggaagttggatacactttgtgacttgtacgagacactgaccattacacaggctgttatttttctcaatacgaggcgcaaggtggactggctgactgagaagatgcatgccagagacttcacagtttctgctctgcatggtgacatggaccagaaggagagagatgttatcatgagggaattccggtcagggtcaagtcgtgttctgatcactactgacttgttggtaagtctcttaatgctttttaaaaatctaccaaaagttagctttttggggggcaggtttttaagtaacctttgccaacttgggctatttggaagagtaaaagaccacactccacagtgggctataccacttagtatagttcgctactattttgtggcctacatgacaggtgtcaagtttttttgaatcaatttttaaaacatgccattgtgtttcaggctcgcgggattgatgtgcaacaagtgtctttggttataaattatgatctacctaccaatcgtgaaaactatattcacaggtgagaagccagcatcttggctgtattgaaaaaaattcatacgtttttctactgtgatttgtatgaaaggtaacatcaaatcaaggaatagattcagtaaagtcagtagtgttcagtaagatgatgtaattaaatttgtactagggaaggttgatgagaacaaagtgggaaaacttgtaaacattgcccagattgtggacatagggtttttttccacaattgttggtcttaccttatgcttgagcttttagtgatgttcttgtgtccatgtgtttttcttggtgattttttctatagttgggattttcttggtgtcgcctggtagcaatttgagtgaaccctggtttagttatagtggctttatccctaaataaattgaattgtactttgttatatgatgtaaaaaaagactttttaaaaaatacaggagtcgatagcagcagttggtgacgagatggcactcagaaacggcgttgacgtaatttaggacgtggaatcataagcgaaacagcacactgtttgaataaagagcgagtcggtatttatatttgtttttcttttgtcatgattatttgatttttaagttgctccagctaaggcatttttttgtattagtatttctattagggaacctttcttattaggtggtttgtattgtctggtttctaacatgcaggtagctgtttggcagttaaacacgtttagagtaatttgagttacaacgtgtgaaactgagcaaaaaagcagtgataagtttgggttaccataccaaatatttgttttcccactggaaaaaagtaagttttagaaaatagttaacctttgcagcatttgtttacagtttacagttccagaagtgcgtcgaaatggattacataactgctcttttattcctggtgttcacatctgtcccaggctgacacctgctcttggctggcccactttggtatgggctttaatttcactaccccaaacacgatactgtcatctgctttataataatgctcaagatgcctgataaaaatctcattttgcagccagacaagccttgaatccttttggcactaactgcaaaggaagatttttttctctagatatgcattagcagctagtgctccagttagaagcacgaactataaccttgataagtaaacagcagctggtggttaacaagtggatcgtcatgttcagtagtttatacattatgtgagaagtaacgttctgattctttttcttacacagaattggcagagggggtcgatttgggaggaaaggtgtggctataaactttgttactgaagaagacaagaggattcttcgtgacattgagactttctacaatactacagtggaggagatgcccatgaatgtggctgaccttatttaattcctgggatgagagttttggatgcagtgctcgctgttgctgaataggcgatcacaacgtgcattgtgcttctttctttgggaatatttgaatcttgtctcaatgctcataacggatcagaaatacagattttgatagcaaagcgacgttagtcgtgagctcttgtgaggaaagtcattggctttatcctctttagagttagactgttggggtgggtataaaagatggggtctgtaaaatctttctttcttagaaatttatttcctagttctgtagaaatggttgtattagatgttctctatcatttaataatatacttgtggactaaaagatataagtgctgtataaaatcagccaattatgttaaactagcatatctgcctttattgtgtttgtcattagcctgagtagaaaggcctttaaaatttttttagaaagcatttgaatgcattttgtttggtattgtatttattcaataaagtatttaattagtgctaagtgtgaactggaccctgttgctaagccccagcaagcaatcctaggtagggtttaatccccagtaaaattgccatattgcacatgtcttaatgaagtttgaatgttaaataaattgtatattcacttt

SEQ ID NO: 4258 - DNA, 5390 bp, Homo sapiens
cgcggaggcggatgggcgcggctccctcccccactcaggcctcttcacggggcggggggccgggtcccccagcccccacccgcgccgtgtccagctcctcgcgtgctcgcggcggagccctgagcgcactgggtccgagtcctgcgcgccccctcaccacctcccccgcacctgctcctcctcctcggtcccgcccagcgcgccagcagcccgatccccagtgctgggagaagagagggggcgcaggcggcgacacaaagggtggagcggcgggaccgggacccgggaggctgcgcggcatggacgccgagtaccctgcctttgagcccccgctctgcagcgagctcaagcacctgtgccggcggctgcgggaagcgtaccgcgagctcaaggaggacctcacgcccttcaaggatgaccgctactacaggctggcgcccatgcggctctacacgctctccaagcgccactttgtcctcgtgtttgtcgtcttcttcatctgctttggcctgaccatcttcgttgggatcagaggacctaaagtgatccagacttctgcggctaatttttcactaaataatagcaaaaagctaaagccaattcaaatactttcaaatccactgtctacatacaatcagcaactatggctgacatgtgttgttgagttggatcaatcaaaagaaacttctattaagacaagctttcccatgactgttaaagtcgatggtgtagctcaagatggaaccacgatgtacattcataacaaagttcacaaccggacaaggaccctcacatgtgcagggaaatgtgcggagattattgtggctcaccttggctacctgaactacactcagtatacagtgatagtgggatttgaacacctgaagctccccatcaagggaatgaacttcacatggaagacttataaccctgccttctcccggttggaaatctggttccggtttttctttgtggtgctcaccttcatcgtcacttgcctgtttgcgcattccctccggaaattttccatgagagactggggcatcgagcagaagtggatgtctgttctcctgcctctgctgctactttacaatgatccgttcttccccctctccttcctggtcaacagctggctcccagggatgctggatgacctctttcagtccatgttcctgtgcgccctgctgctcttctggctgtgcgtgtaccacgggattcgtgtccagggagaaagaaagtgtttaactttctatttgcctaaattcttcattgttggactattgtggttggcttctgttacgctaggaatatggcaaacagttaacgaattacatgatccaatgtaccagtatcgagttgataccggaaattttcagggaatgaaggtcttcttcatggtggtggcagcggtgtacattctgtacctcttgttcttgatagtgcgggcgtgttccgagctacgtcacatgccttatgtggatctcaggttgaaatttttgactgcattgactttcgtagtacttgtcattagcatcgccatcctttatttgagatttggggcgcaagtactacaagacaattttgtagcagagctgtcaactcactaccagaattcagccgagttcttatctttctatggcctgttgaacttctatctctacaccttggcctttgtatattctccatcgaagaatgccctctatgagtcccagctgaaagacaatcctgccttctccatgctgaatgactcggatgatgatgtgatttatgggagtgactatgaggaaatgccgctgcagaacggccaggccatccgggccaagtacaaggaggagtcagatagtgactgagccccggccagcccagcgaggcgacaagatgcctggatgctttccccggtgaccgtctgctgaccttcccctgttatattcagatttttcttacaagcagagatttcctgttcatttgtttacatatttttttaaaggaaaaccaaaactgagggtaaatttaaatgtttagccaaatttattgtcatggtggctacgagaagaggcattgataacaagtttcaacagccaaatccttttttacagagatttcagatgagcgtgttttcagtgatgaggaaatttcacgtttttagtacagtgaattatgtacttttttttcctgtaatcattcactgattccaagttcacgggcagcctgtgactaggtcctcagcgtgacagcatcaccctctttcttcccttttccatggtactgttttgtgaccctttaaactcaaagggaagccttatctgtggctgcttcagggcagtccttcctcgttgagtggccagtgccctgggtaaccaggtggctgaagtgattggtcagttatgtggactgcgttttgtgcagtgtgtgagttatgactcatcgggaatgggagatgctggggttccaacccttcacgtcaccaaaggggaagtaatagtgtggagttctgaggagggtttgataagttgaataaggaaaggctaagataatttacaggttaccaactcatgtggggaaggtcttactgccatggtgcttttcaggggcctgtgtgtacacacatgattaaatggatttgcctgtgggaggtatgggcaggagaggaacccttaccattccagtaaatagcagtttctgcaattctgttgaatatgaaatgccatagagctttatttatttatgtaagtaaaagctaaatgaggggccaggtgcagtggctcacatctgtaatctcaacactttgggaggccaaggtgggaggatcacttgagcccaggagtttgagaccagcctgggcaacacagggagaccccgtctctataaaacatttagaaagttggctgggcatgctggggcatgcccatagtcccagctactcaggaggctgaggtgggaggattgcttgagccctggaggtcaaggctgcagtgagccatgattgcaccactgcactccagcctgggtgtcagagcgagaacccgtgtcataaataaataaagctacatgaaagattgatagaatattttagattatttattggccaaaagtttttaaaactcatatttggaagcaaaatgaaaagcaagtaaaatgttttaaatggttcatggaaaacgtatttgggtagaaggcaactcgtgcttccggaaggggttccctgtcctccatgtgtccacatggcggtcaggtagggacgacctgttctgtaaagtccttggcactgctgaatctgtggcatcatagaaggccctggagcttccccgttcctttcagtcagggactccatatagagtctcatgtggacgtctcccgtgctttcctcttgacctctacagtcacacttctgttaacatctggtaactgtgggcaacctgactgatgccgtcttggcaattgaggtccagaagatgatagttccgcaacgcaagcagtacctactttttttcttcatctatgcattgactctcagattaccatgcagagcttcacgttatcatccacgttaagtagtgctaggtaggaccttagagatgttcatgagaaactatttgttatgactttcctttgtatctttccttttaatttaaactttaatgataatgtacttttaatatggattctattcacatttgttttaaaaaccttgtaaatatgaatgtttaagacaacttactgcaagggtaattcaagtttacatgatttttaaatttgcaatgatgttttttttattctgtgtattgaaaaaaattttctgttaccaaattttacaacttctaataagactactataactttatgtaaactgatgaagatgtgctgattaacatattctgtgatatggtttacaacttttaatcataattgtccatgattttggaatgctgttatttatcagtaaatgtaaaatatttgaggcatttagccatacacacactagaactttttaaaactttgtcctatagtgtaattataaactgatgactattatcttcatacattgagtcttcatgcatcaatgaaatgaaaaatataggattatttatttactttttgtaactaagtgggaaataagaaaaaaagttagaaagtacttaaggggaaaatcgttcttactaagtcatgtattttcaacttgtcttccctggtatatcataaataccgacatattacataccccatgtaaaattttgcttaaactctctagcacttggcatgtagaatatgtaccataggtatcaggttaaaacactaaagtctgccagaaacttttgacagtagcaagaaaattgttgaagaaaaaataaattatttactgagggtagttatgttaaagttttgcgaacttaaagggctgactttagttccttcatggtaatggcttgagtaacatcatctttgggattttttaaatactggtccagtctaggagaacctggaagatgaccagaggtatttcagtttccctagggagagcttcgttatccatgtggatgataagtctgcttgatttattattaaatcattatagcagtgaagtggtgccattttctctctcttaagccccatttgaaaggctagagaaggggatatatatactatgttcaaggtttgtaaggttgttaatgtacataattgcagattgcaataaaagcttagatacattttgtaaacccaacccactaaatgagcaggttacaagacaaatgtcaccagcctcaagtattttatgaactatttactgagggtagttatgttaaatagattataatgtggtaaattatttcctgaatcctttatcacaggaaaaacacagaccctcataaaagggataattaaaacggatgtgtctgaacatttagtgaagatgagacttaaaacatgaaagtgtatttgtgtattttgagggttttagaaaccggttgccttagaggttagacttttgaagaaaaaaaaaaaaagatacagatcttttcccctggccaaagggaagttgtattagtctgtgacatcttgtgatgctgtttatcttggtttgacattggagatacgctagtaactgtgataccatactataaaacagaagaattttctgctactaaaaactgcctttttacaaaatgactgtaaatatttgtaaaataaaataacactaaactttaagcccaaaaggagagatagagccatgtgttcagttgtggacctgtccgtggggcacagtgccaccccatcacagtgttgctgtcatcaggcaaaagtgaatgtttgtttatggcaaattcgtcttttgcgaatggcttaattctgacactacctttctgggaaatgttaataaatttttaatattc

SEQ ID NO: 4259 - DNA, 1813 bp, Homo sapiens
cttcagcgatggccgcggagctgagcatggggccagagctgcccaccagcccgctggccatggagtatgtcaacgacttcgacctgctcaagttcgacgtgaagaaggagccactggggcgcgcggagcgtccgggcaggccctgcacacgcctgcagccagccggctcggtgtcctccacaccgctcagcactccgtgtagctccgtgccctcgtcgcccagcttcagcccgaccgaacagaagacacacctcgaggatctgtactggatggcgagcaactaccagcagatgaaccccgaggcgctcaacctgacgcccgaggacgcggtggaagcgctcatcggctcgcacccagtgccacagccgctgcaaagcttcgacagctttcgcggcgctcaccaccaccaccatcaccaccaccctcacccgcaccacgcgtacccgggcgccggcgtggcccacgacgagctgggcccgcacgctcacccgcaccatcaccatcatcaccaagcgtcgccgccgccgtccagcgccgctagcccggcgcaacagctgcccactagccaccccgggcccgggccgcacgcgacggcctcggcgacggcggcgggcggcaacggcagcgtggaggaccgcttctccgacgaccagctcgtgtccatgtccgtgcgcgagctgaaccgccacctgcggggcttcaccaaggacgaggtgatccgcctgaagcagaagcggcggaccctgaagaaccggggctacgcccagtcttgcaggtataaacgcgtccagcagaagcaccacctggagaatgagaagacgcagctcattcagcaggtggagcagcttaagcaggaggtgtcccggctggcccgcgagagagacgcctacaaggtcaagtgcgagaaactcgccaactccggcttcagggaggcgggctccaccagcgacagcccctcctctcccgagttctttctgtgagtcgtggccggtcctggcccccgccttgacctgtttgacttgagcgagagggaggaagggcgcgcgggccgcgggcgacgggcgggtgcgcgggcgggcaggggaccttggctaaggcgagagtagcgcacgccagcgccgcctcctagactcgagcagagccggagagagagacgagagggtgggaggtcccggagtaacttctctccaggctgaagggcggcgaggcatagtcccgagaagtcaccaaggccatctggagactcctggctttctgaactttgcgcgttaagccgggacagctgctttgctgcccggagagtagtccgcgccaggaagagagcaacgaggaaaggagagggactctggcgtcccggcaggcgagaggcgaggctgagcgaaagaaggaaggacagacggacctgtctgtcagagttcggagaacactggctctcagccctgagacacaggcctcagttaggacgctcggcgcccaaatctcatcagttttattgcctgctcgattatatagaaaaatacaaaaaatctgcattaaaaatattaatcctgcatgctggacatgtatggtaataatttctattttgtaccattttcttgtttaactttagcatgttgttgatcatggatcatactccccttgtttctttgggtgagaagggatcgcagtttggaaactccggcggctgcgtgcggggtttcagtcccagctgtaggcttgtaaatacccgccccgccaaaccgcatagagaacgtggcagcaagctgagggtctttgtttgggtttattattacggtatttttgtttgtaagtt

SEQ ID NO: 4260 - DNA, 2325 bp, Homo sapiens
gcttggggacgcacggagaggtgcagctggctacctgtgcaccctgcctccggctctcctgagcagagagatcctgatggctgactcagaagcactcccctcccttgctggggacccagtggctgtggaagccttgctccgggccgtgtttggggttgttgtggatgaggccattcagaaaggaaccagtgtctcccagaaggtctgtgagtggaaggagcctgaggagctgaagcagctgctggatttggagctgcggagccagggcgagtcacagaagcagatcctggagcggtgtcgggctgtgattcgctacagtgtcaagactggtcaccctcggttcttcaaccagctcttctctgggttggatccccatgctctggccgggcgcattatcactgagagcctcaacaccagccagtacacatatgaaatcgcccccgtgtttgtgctcatggaagaggaggtgctgaggaaactgcgggccctggtgggctggagctctggggacggaatcttctgccctggtggctccatctccaacatgtatgctgtaaatctggcccgctatcagcgctacccggattgcaagcagaggggcctccgcacactgccgcccctggccctattcacatcgaaggagtgtcactactccatccagaagggagctgcgtttctgggacttggcaccgacagtgtccgagtggtcaaggctgatgagagagggaaaatggtccccgaggatctggagaggcagattggtatggccgaggctgagggtgctgtgccgttcctggtcagtgccacctctggcaccactgtgctaggggcctttgaccccctggaggcaattgctgatgtgtgccagcgtcatgggctatggctgcatgtggatgctgcctggggtgggagcgtcctgctgtcacagacacacaggcatctcctggatgggatccagagggctgactctgtggcctggaatccccacaagctcctcgcagcaggcctgcaatgctctgcacttcttctccaggatacctcgaacctgctcaagcgctgccatgggtcccaggccagctaccttttccagcaggacaagttctacgatgtggctctggacacgggagacaaggtggtgcagtgtggccgccgtgtggactgtctgaagctgtggctcatgtggaaggcacagggcgatcaagggctggagcggcgcatcgaccaggcctttgtccttgcccggtacctggtggaggaaatgaagaagcgggaagggtttgagctagtcatggagcctgagtttgtcaatgtgtgtttctggttcgtaccccccagcctgcgagggaagcaggagagtccagattaccacgaaaggctgtcaaaggtggcccccgtgctcaaggagcgcatggtgaaggagggctccatgatgattggctaccagccccacgggacccggggcaacttcttccgtgtggttgtggccaactctgcactgacctgtgctgatatggacttcctcctcaacgagctggagcggctaggccaggacctgtgagccttctctgtcttgctgccggccttgataccacccctcacgcctgtaatcccagcactttgggaggccgaggcgggtggatcacttgaggtcaggagttcgagaccagcctggccaataaggtgaaaccctgtctctactaaaaatacaaaaattagccgagcatggtggcctgtgcctgtaaacccagctactcaggaggttggggcagaattgcttgaacccagggggcagaggttgcagtgagccgagattgcacccctgcactccaggctgggcaacagtacgagactctgttccaaaaaaaataaaaaagaacagcctttttaggccacagtgacctgcgcaatgtttatatgctttgacctactaactttctcctaactaaatatttgattttaggagagtgtttaaataaattacagtatgtctatatgatgaaatgttattttgccattaaaattttgtttacaaagataatttttattgacataaaaataactttaatgtaatttatgttgaaaaagctgaatacaagtctttatatagagtaatatttgagctgtgttcaaaaatacataggaaaagactgataaaatgaaatatggcaaaatgttaatagttttccctggaataggataataggcaattttaaaacagactcctttaaaaaaacaaacaaacaaaaaaaacatagacttctttatatcttttgagctccctcccttttattatgtaatgaatatgtgttgcttttgtaataggaa

SEQ ID NO: 4261 - DNA, 2694 bp, Homo sapiens
cgtggaccgacggctgcaccgactctgggggagcctgctggatggctttgagcagaagctgcaaggcgtccagagtgagtgtgacctgcgggtgcaggaggtacggcggcaatgtgaggagggtcaggccgccagccggaggctgcaccagagccttgatggccgggagctggccctgcgccaggagctgtcacagctgggcagccagctgcagggcctgagcgtgtctggcaggggcagctgctgtgggcaactagccttgatcaatgcccgtatggatggccttgagagggccctgcaggcagtcaccgagacccaaaggggccccggtgccccggccggggatgagcttacgaggctctctgctgccatgctcgagggaggtgtggacgggctgcttgagggtctggagacgctcaatgggacagagggtggagcaaggggatgctgtctgaggttggacatgggggggtggggagtgggcggctttgggaccatgctggaagagcgcgtgcagagcctcgaggagcgcctagcaacattggctggggagctaagccatgacagcgcctctccgggcaggtcagctcggccccttgtacagacagagctggctgtgctagagcaacggttggtctcactggagacttcgtgcaccccgagcaccacctcagccatcctggacagcctcgtggcagaggtgaaggcctggcagagccggagcgaggccctcctacgccaggtggccagccacgcagcactgctccagcagctcaatggcactgtggccgaggtccagggacagctggcagaagggacgggcagctcacttcaaggcgagatcactctgctcaaggtcaatctgaactcagtgagcaagtcgctcacaggcctcagtgactctgtcagccagtactctgatgccttcttggctgccaacacgtccctggatgagcgggaacgcaaggtggaagccgaagtccaggccatccaggagcaggtcagcagccaaggctccaggcttcaggctggccacaggcaggtcctgaacctgcgtggggagctggagcaactcaaggctggtgtggccaaggtggccagtgggctgagccgctgccaggacacagcccagaaacttcagcacacagtgggacactttgaccagcgggtggcacaagtggagggtgcgtgcaggaggctgggcctgctggccgcgggcctggacagcttgcccactgagccactgaggcccagagagggcctgtggagccatgtggaccagctgaatcgtacgctggcccagcacacgcaggacattgcccgcctccgggatgacctactggactgccaggcccagctggctgagcaggtgcggccagggcaagccaactagacaggctggccaggacccaacccctagatcccaccaactcggggaacatcaccccagagcccagccttatccagcagcgccttccagccttccctggctagcccaaatggcactaaggaggccactgagggaatcctccacgtggctgtcccagccaccaaaacccatgcacagtgctgcagaaactggacagttccggacagcggtcaaggcaaggatgtcatgcttgaaggccagggtagacttgagagagttcacattccactgtcagcaaatcagtgtctggacagccagctgcagggcctgagcatggctggcaggggcagctgctgtggcaaactggccttgatcagtgtccgtatgtaaggccttgagaggaccctgcaggcagtcagcaccagcctcagcaactgtgcagagacctacaggcccacagccagtggcctgtccgcattgccctgtgcccacaagcaacagtccacagcccttggtggcttctgttccttgtcccctcggcttctcttcgcagccatcaggactaggtttgtgcaggaaggtgatgcccactggaactctcctcacacctggcagcttcatggatgttgtatctgaactaaggaccagaggctgccagatgtttctggctcctcacgtgtccttcaggacagaacagaagcacaaagactcagccaagagttctctttattccctttgatcctcccccaaggtgagggcttaggcagctgtagaaccccaggaaagaacggaatccaggcaatctgtttagagaccccccactccaaatttatccttttcctttccttcccctaagatgtttccagggccctctggtgcccacactgtcctcttccttccacttgggggtggggaaatccttcctgcgaggtcagggcatttctctacaaagtggcctgaatgaggccaggccctgagaaggagccaccagctggaggaaaggggctccaagccttgcttttaacacccctgcaaaacccccaccctcccaagatgttcacaaaaggtgagaaattcaggtacgaaaccatcaatggacaacttgaaaatgcatgttcctcaggcctatgcagttcccagagactcttgacaccggtctctgctgaggctcccagcctcagtttcccccacagcagcacgggccccactgtgctgctcttcaggtccccacagccctgcctttggttcctggacatttggtattctgccctccactctggtactatcagagtagggcaggctctggattaaagcttttagccggt

SEQ ID NO: 4262 - DNA, 2679 bp, Homo sapiens
tctaggccggcagcgcctctcctccatggtcctgtctgtcagcgctgttttgggagcccgccggtgaggccgggccacgctcagacacttcgatcgtcgagtctgtcactgggcatggcgggtcagttccgcagctacgtgtgggacccgctgctgatcctgtcgcagatcgtcctcatgcagaccgtgtattacggctcgctgggcctgtggctggcgctggtggacgggctagtgcgaagcagcccctcgctggaccagatgttcgacgccgagatcctgggcttttccacccctccaggccggctctccatgatgtccttcatcctcaacgccctcacctgtgccctgggcttgctgtacttcatccggcgaggaaagcagtgtctggatttcactgtcactgtccatttctttcacctcctgggctgctggttctacagctcccgtttcccctcggcgctgacctggtggctggtccaagccgtgtgcattgcactcatggctgtcatcggggagtacctgtgcatgcggacggagctcaaggagatacccctcaactcagcccctaaatccaatgtctagaatcaggccctttggacatcctgctgacacttgggccccttaacaccttgggctgctcagaccctccagatgaggtccagcccagatctgagaggaaccctggaaatgtgaagtctctgttggtttgggagagatagtgagggcctgtcaaagaaggcaggtagcagtcagcatgacagctgcaagaatgacctctgtctgttgaagccttggtatctgagaggtcaggaaggggacctctttgagggtaataacagaattggaaccatgccactcttgagccacaatacctgtcaccagcctgttgttttaagagagaaaaaaaatcaaggatatctgattggagcaaaccacttctttagtcatctgtcttacccccctgggacagctgttacctttgcagtgttgccgaatcacagcagttacctttgcagtgttgccgaatcacagcagttctgttggagaaacgcttggtttccggatccagagccacagaaagaaatgtaggtgtgaagtattaggctgctgtcagggagaggatggcagatggaggcatcaagcacaaggaaaatgcacaacctgtgccctgttatacacacgttcatgtgcacccaagaacctatgactttcttccagttccttctaccaggtccccatcctgctgccagctctcaacatagcaggccataggacccagagaagaatcccagcgttgctcaaagtctaaccatcataaagacactgcctgtcttctaggaatgaccaggcacccagctcccactggactccaattttttttcctgccttatttagaattctttggcgggaagggtatgatgggttcccagagacaagaagcccaaccttctggcctgggctgtgctgatagtgctgagggagataggaatttgctgctaagatttttctttggggtggagtttcctctgtgaggggcttgcagctatccttcctgtgtatacaaatacagtattttccatggttctgcctgcacttactttgtaatgccacggttgagattgagagagatcagcgcagccaggcaagggaactttaaagaattattaggccaccttctccctttcctggaccccagagtcattcctccatttggttaaaatactcagtgcagggaactcttacatcctgtctccttcacttgcagcgtcccctgctatgcctcaggtgaaccacataattcttgggtttccgttcctacttgctagtgatttctgaacatgttcaatggagcggcacacagtctagacccacttccgcattgaaaccttcactgttcctctttggtttcttcagagctttcccaagagagctgtcagttttcagctgtcagtaacacaaatgagtttatggtaacacaaatgagttttgctatctctctgagaagctcatctgacctcctgactctcagccctacagagtagggagttgatgctgacaggatgaagatttaggaataaatatgcctgggaagagactgggaaggttctagggtgaggcacctcagtaactcatggtaccttggccaagttggaaggaagcagtttgttaatgaggcacagtaatcctggctgcagggtctaggaggtaagaccagctgggatgaccttccctgggttaatcaatttccctctagacaacacaaactgcaggcatgtgactaactttgaaagaacacccatcatgtggctgctgtcacccttgaccagccgtggtggtggttactccatctgtggttggagcgcctctttgggattcacttcaaggtcttgtgcctatttttctgcatatcttctgtgatgacaaatctctgtcccctgagtgttaatttgatttttagaaatggccaaaagtcacgtgatccaaactttttttcagtaatatggagactgagctgcatggtagttggggatcaaaaatatgtgaccttaatgagatttttatgatttctaaagtaacaataaaagcagtttttagagttgagttccagagagggcagggcaatggcagtgacatgtttgtcattttaataataaataacatctattgagtgcttaa

SEQ ID NO: 4263 - DNA, 1335 bp, Homo sapiens
gagttttaaacacagctctacctcttactagctttgtgaatttgggcaccttattgaacttcaatgagctcatctagagtcatgcattctatggctgtcacaaagatgggtcctttctgtttcttctgtgtctgctacagaacccaatatggcatgatacaggtaacagttgctcaagttagacatttaaagggaatgatatttgtgatgatagcaatcttgctacttgttccatccatcattttgtactctatactgttaggcaatagggaagggctgaggctctacctctgggagtcagcaaacttcccgaaaagggcaagagaataaaacacttggactctggaggccagacagcctctggtgcacctacttaattctagcattgtagtatgaaaacagccacagaaatacgtagaggactgggaatgattgtgtcctaataaaacttttttcaaaataggcaggagactaggtttggcctatgggccaaagtttgccaacccgtaatgatataatggttcttgcagaaattattttggctttctgacagcatgactctaagtgtggtctgtggacagtacacagactttttattagcagtctgcaatgagacaaggagcttcaccagaagaaaccaactacattattcagcagattgtttacttcagctgacattttgttgtgtttgttttcgaagcaagacttcgccaatgaaagaagtaattgatttatattctggtacaagcaccttatctatcacagaccagtagcaaacagcacaaaagcactttgagtggcactgttctaatcattcaccaggaaacacagactgtattctttatgatcaccaaaaacaagaatgaaagctcaaaacccaattttcccttctcaccattctccttcttctcccaggatgtgcccctgattagcctggccaacatcttgcacaatgccaagctctggaatgacgccgtcatagtagccaccatggcagtagagatcgcaccacactttgctgtgaaccacttcactctgggcaatgtctacgtggcaatggaagaatttgaaaaagcactggtgtggtatgaatccacattgaagcttcagcccgagtttgtcccagccaagaaccgaatccagaccatccagtgtcacttaatgctgaagaagggacggcgctctccttagtgcacttcttccttctctctttctctttactcatgctctaaaaaaaaagaataagaaaagaaaccaatcattgtcagtatctactattaatgatgtgtgtgaaaataactaagacttataacaggacttttacatatgtgggaa

SEQ ID NO: 4264 - DNA, 2319 bp, Homo sapiens
tttgacaactcacagtcactggatgctgctgaagaagagccctctgagagaggaacagaggaggaccctgtattctctgttgagaattcagggagggactcagatgcccttagacttgaaagtacggtggttgaggagagcaatggttctgatgagatggagaattcagatgaaaccaaaatgtcagaagaaatactggctttggtggatgaatttcaacaggcatggcctttggaaggctttgggggtgcactagagatgaaagggcggcgtctagacttacaaggaatacgggtgctgaagaaaggtccccaggatggagtggccagaagctcttgctatggagactgcagaagtgaagatgatgaagcaacagaatggattacattccaggtcaaacgtgtaaagaaacccaaaggagatcataagaaaactcctgggaaaaaagtagaaacaggtcagatagaaaatggacatcgttaccaagcaaacctagagatcactggccccaaggtggcatctcctgggccacaaggaaaaaaacgtgactaccagcgtctgggatggcccagcccggacgaatgcctcaaactccgctgggtagagctgactgccatcgtgagtacctggcttgcagtttcttcaaaaaacattgacatcacagaacacatagattttgccacccctatacagcagccagcaatggagcctctttgcaatggcaatctccccacgagtatgcataccctggaccacttgcatggggtttccaaccgagccagcctgcactacacaggggagagtcagttaacagaggtattacaaaatctcggcaaagaccaatatccacaacagtcgcttgaacagattggcacccgaattgccaaagttttggaaaagaaccagacgtcctgggtcctctccagcatggcagccctctactggagggtgaaaggccaaggaaagaaggcaatcgactgcctccgccaggctctgcactatgcgccacaccagatgaaggatgtgcccctgattagcctggccaacatcttgcacaatgccaagctctggaatgacgccgtcatagtagccaccatggcagtagagatcgcaccacactttgctgtgaaccacttcactctgggcaatgtctacgtggcaatggaagaatttgaaaaagcactggtgtggtatgaatccacattgaagcttcagcccgagtttgtcccagccaagaaccgaatccagaccatccagtgtcacttaatgctgaagaagggacggcgctctccttagtgcacttcttccttctctctttctctttactcatgctctaaaaaaaaagaataagaaaagaaaccaatcattgtcagtatctactattaatgatgtgtgtgaaaataactaagacttataacaggacttttacatatgtgggaattggtttgtttttgtttttacgtttctcctttcccccaaccaacctcagaagaggcaccttcagaaacacacatttcttaaaaggaaagtgcagcttcaagatattgtgtaaatactgagccaagacatttctggagctgtgctctgtctccaaaaacctcaatgcctttagggcttttctcagtggtccagctagccttctctttggaggaggatgaagccgcattgcacattctctgcttcctgtcgtagcctctgttgtcaatggaaatgcggaagcccatctggtgcccgtcagtgagaagcaacgttctgcgctctctccgttagacctccatgctgtccccagtcttgtccattccatgctgctgtgttacaaactctcagaggtagtttgcaggggaggaaggggaatatgattttaaaaacaaaatatttacaacaacaaaaattcttaggatcacctgacctttgtaatgttatttatgttggggagggaggggggctgagaaggggaaatcagcagtgtgcaacatctttataatttgtactttaattacaaatcacaaggaaaccaataagttgaaatcctatataacaggtttatatatatagaatatgtatatttgaagccctctacagactgagtctatgttttactaattctttgttcactgtgttacccatcttggaataagttgtgaatgtcagctccctctctctgaggcctccagacttagctcctcaggagggtaatgagccaaggttgagtgtttccatacaatgcttttacctttgatcccaggagaatcagaaactccaacattttggaatcttcaagggcacatactgagaaaaaaaataaaattgtttatgagc

SEQ ID NO: 4265 - DNA, 964 bp, Homo sapiens
gcactttcctctccatagccccaccttctcctggaggaatgtagctttcctgctgcttctctcccttgctttggagtggacttctgcaatgctgaccaagaagatcaaacacaaaccagggttatgtcccaaagagaggctcacctgtaccactgaacttccggactcatgtaacacagattttgactgcaaggaataccagaagtgctgcttttttgcctgtcagaagaagtgcatggatccctttcaagaaccctgcatgctacctgtgaggcatggaaactgtaatcatgaggcacagcgctggcattttgactttaaaaattaccgctgcacacccttcaaatacaggggctgcgaagggaatgccaacaacttcttaaatgaggatgcctgcagaacggcctgcatgttaattgttaaggatggacaatgcccactcttccctttcactgaacgtaaggagtgtccaccttcatgtcacagtgacatcgattgtccccagacagacaaatgttgtgaatccaggtgtggctttgtttgtgccagggcctggacagtcaaaaaaggtttctgcccacgcaagcccttgctatgtaccaagattgataaacccaagtgcctgcaggatgaggagtgcccattggtggaaaagtgctgctcacattgtggactgaaatgtatggaccccagacgttgaatagtaagtagaaaatattatcatcaaaatcattaattatgagtagcatgataaagagctgtcagttttgtcttgtatccaacttgccaaattatcttaagtatcacaatattgaatgatgttactttgattttatatataatcccatcatctgaaagtgatgatatatttggctttttttcaacttcatgactttattttcttgtcttcttgtattgtgtagaacctccaaaataataatgaaaataaaggcaatggcatcca

SEQ ID NO: 4266 - DNA, 2484 bp, Homo sapiens
  misc_feature (1828)..(1828): n is a, c, g, or t
ataaattaaactttatcatgggtatgtatataggaaaaaataatagtttgtataaggttcgaatagtttgtataaggttcggtactatccacagtttcaggcatacaccgggggtcttggaacatattcccctcagataagagagaattcctgtgtatggaagagactcctcagatacagcttctcttcaactgtaaacctatgaattaaaaaaaagttattggtcctatccacccccgcacatacaacctacattgttatggcaaggatacgatgtcacatgaattgactaagtttacaagagaggaaattgaaggcatgtagcaatcccatggcagttgtgaaatccatctgcctatatgtcaccaattcccccaattccaggggtagggaacatttgattagtctactttggttctctgaagttggctcccttttctttttctcagttcttgacttttttctttgagctgtctttccttttccatgagaaatgtcctctttttgtagctttctcagcctgcttctaggctctgtcccaactggcacagttatccacactggcacaacttctttaaaaagctttgtggactttcaaattataaaccactcactccaccagagagaagccacacccacaaatttcttcaagaagtcctctatgtactttgaatgtcaatcagggaatgataccctttagagtcatatatgtcttttgtctacctgagagcgtcagctagacactggcttaaatctttctgaagtacaggtggtcgtccacttatgatggttcaacttagaattcttttactttaggatggtatgaaagctatatgcattcagtagcaaccatacttcaagtacccatacaaccattctattttttacattcagtacagtattcagtaaatcatgaaatattcagcacttcattataaaataggctttgtgttagattactttgttcaatataacataatgcaagtgttctgagcacatttaagcaatgacaggttaagctatgatgtatggtaggttacgtgtactattcaacttaatattttcagcttacgatgggtttatcaagacataaccccattgtaagtcagggagcatctgtagtagtaacaaggttgtattgcatgtgctttattttatcttgatcctcagaccataatcttacagttaacaccctggatttttttttttttaacttcagaaccttttgctgaagaagctggtaacgagaaagttttattttgtaaccctgcaagtcccaggttgaaagtattttcctctaaattctgcttgaaactgagcagttccttgtttagttcttctctcttttaatacctttctacaggtgttttttgaaaaattgcttatcactttcagcatttttcctggaaaccttagccagatctataacttcaataggtactttttctatcttccaagatactgtctcacttgttttgtcagtagattacatggcttctgtccagcctgaaataccaatttcctcagtggttttccagcctccgttagtagtctctttgctgctcttccaccaaatgtctataacccagtccccaaactagtgctacatgtcttaagtttctgtcatggcaatgccctgtttaaataccaaatactatttcagttatctttttctgcctaacaaatcaccccaaaatttactaccttaaaacaaaactattctttgcttaagattctactgtctgaactggactcagctgggcatttcttctggtctcacctggagtcatttatgcaactgcagacatgtggggactccaccaaagantggctttactcaaatgtctggggcctcaactggggtggctgcattagctctggcacagctgcagttccctctccagcagggtcctgggccatttcacatgatgactgagggctccaagagggtgaaagcagaagcatctgggctaggcctcttagagcctgtgcataaaactgaaacagcactacttcatccatgctgcctttcaaagcaagtcccggggcctgctcaaaattacaggcagggaaaatatcctctacctgatggtagtgacaaagaatatgtgtcccatcgttaattcaccagttgccttcacagttgcaacaatgagactgttagcttttaaacagaaatgataaaaactagaagccggccgggcgcggtggctcacgcctgtaatcccagcactttgggaggccgaggcgggtggatcaggaggtcaggagattgagaccgtcctggctaacaaggtgaaaccccgcctctactaaaaatacaaaaaattagccgggcgcagtggcgggcgcctgtagtcccggctactcgggaggctgaggcaggagaatggcgtgaacccgggaagcggagcttgcagtgagccgagattgcgccactgcagtccgcagtccggcctgggcgacagagcgaaactccgtctc

SEQ ID NO: 4267 - DNA, 3625 bp, Homo sapiens
gcgtgtgctggggcgagcgggagcgggcgaggatgggcacaggatagaggcagagccacccacgccgccgcggccccacgctgggcgacagagcctccagttccccttcaatggtggcgggtcgccggagctctgatcgccgggaacccttgccgctgctgtcctgcgaccccaagcaggtatagacacgtgtggccgtttacgctgtaggatcctcattcccactggctttgaacattttggggacttacaatgccgccacccgcggacatcgtcaaggtggccatagaatggccgggcgcctaccccaaactcatggaaattgatcagaaaaaaccactgtctgcaataataaaggaagtctgtgatgggtggtctcttgccaaccatgaatattttgcactccagcatgccgatagttcaaacttctatatcacagaaaagaaccgcaatgagataaaaaatggcactatccttcgattaaccacatctccagctcagaacgcccagcagctccatgaacgaatccagtcctcgagtatggatgccaagctggaagccctgaaggacttggccagcctctcccgggatgtcacgtttgcccaggagtttataaacctggacggtatctctctcctcacgcagatggtggagagcggcactgagcgataccagaaattgcagaagatcatgaagccttgctttggagacatgctgtccttcaccctgacggccttcgttgagctgatggaccatggcatagtgtcctgggatacattttcggtggcgttcattaagaagatagcaagttttgtgaacaagtcagccatagacatctcgatcctgcagcggtccttggccattttggagtcgatggtgctcaatagccatgacctctaccagaaagtggcgcaggagatcaccatcggccagctcattccacacctgcaagggtcagatcaagaaatccaaacctatactattgcagtgattaatgcgcttttcctgaaggctcctgatgagaggaggcaggagatggcgaatattttggctcagaagcaactgcgttccatcattttaacacatgtcatccgagcccagcgggccatcaacaatgagatggcgcaccagctgtatgttctacaagtgctcacctttaacctcctggaagacaggatgatgaccaaaatggacccccaggaccaggctcagagggacatcatatttgaacttcgaagaattgcttttgatgctgagtctgaacctaacaacagcagtggcagcatggagaaacgcaagtccatgtacacgcgagattataagaagcttgggttcattaatcatgtcaaccctgccatggacttcacgcagactccacctgggatgttggctctggacaacatgctgtactttgccaagcaccaccaagatgcctacatccggattgtgcttgagaacagtagtcgagaagacaagcatgaatgtccctttggccgcagtagtatagagctgaccaagatgctatgtgagatcttgaaagtgggcgagttgcctagtgagacctgcaacgacttccacccgatgttcttcacccacgacagatcctttgaggagtttttctgcatctgtatccagctcctgaacaagacatggaaggaaatgagggcaacttctgaagacttcaacaaggtaatgcaggtggtgaaggagcaggttatgagagcacttacaaccaagcctagctccctggaccagttcaagagcaaactgcagaacctgagctacactgagatcctgaaaatccgccagtccgagaggatgaaccaggaagatttccagtcccgcccgattttggaactaaaggagaagattcagccagaaatcttagagctgatcaaacagcaacgcctgaaccgccttgtggaagggacctgctttaggaaactcaatgcccggcggaggcaagacaagttttggtattgtcggctttcgccaaatcacaaagtcctgcattacggagacttagaagagagtcctcagggagaagtgccccacgattccttgcaggacaaactgccggtggcagatatcaaagccgtggtgacgggaaaggactgccctcatatgaaagagaaaggtgcccttaaacaaaacaaggaggtgcttgaactcgctttctccatcttgtatgactcaaactgccaactgaacttcatcgctcctgacaagcatgagtactgtatctggacggatggactgaatgcgctactcgggaaggacatgatgagcgacctgacgcggaatgacctggacaccctgctcagcatggaaatcaagctccgcctcctggacctggaaaacatccagatccctgacgcacctccgccgattcccaaggagcccagcaactatgacttcgtctatgactgtaactgaagtggccgggcccagacatgccccttccaaaactggaacacctagctaacaggagagaggaatgaaaacacacccacgccttggaaccgtcctttggtaaagggaagctgtgggtccacattcccttcagcatcacctctagccctggcaactttcagcccctagctggcatcttgctcaccgccctgattctgttcctcggctccactgcttcaggtcacttcccatggctgcagtccactggtgggacaagagcaaagcccactgccagtaagaaggccaaagggcccttccatcctagccctctgcaggcatgcccttccttcccttgggcaggaaagccagcagccccagactgcccaaaaacttgcccaccagaccaagggcagtgccccaaggcccctgtctggaggaaatggcctagctatttgatgagaagaccaaaccccacatcctcctttcccctctctctagaatcatctcgcaccaccagttacacttgaattaagatctgcgctcaaatctcctcccacctctctccctgcttttgccttgctctgttcctctttggtcccaagagcagcagccgcagcctcctcgtgatcctccctagcataaatttcccaaacagtccacaggtcccatgcccactttgcgtctgcactgtgatcgtgacaaatcttccctcctcaccagctagtctggggtttcctctccctgccccaggccagaactgccttcttcatttccacccacgctcccagcctcttagctgaaagcacaaatggtgaaatcagtagtctcgctccatctctaatagactaaacctaaatgcctctaggacggactgttgctatccaagcgtttggtgttaccttctcctgggaggtcctgctgcaactcaagttccacaggatggtcaagctgtcagacatccaagtttacatcattgtaattattactggtatttacaatttgcaagagttttgggttagtttttttttttttttttgctttgtttttgtacaaaagagtctaacattttttgccaaacagatatatatttaatgaaaagaagagatacataaatgtgtgaatttccagtttttttttaattattttaatcccaaacatcttcctgaaaataacattcccttaaacatgctgtggaataaaatggattgtgatg

SEQ ID NO: 4268 - DNA, 2004 bp, Homo sapiens
cccccttgtcattaatacattaaaaagattcaatctttaccctgaggtaattttggccagttggtaccggatttataccaaaataatggacttgattggtattcaaaccaagatatgttggacggttaccagaggagaaggactcagtcctattgaaagctgtgaaggattgggagatcctgcttgcttttatgttgctgtaatttttattttaaatggactaatgatggcattattcttcatatatggcacatatttaagtggcagccgattaggaggcctggttacagtgttgtgcttctttttcaatcatggagagtgtacccgtgtaatgtggacaccacctctccgtgaaagcttctcatatccatttcttgttcttcagatgttgctagtgactcatattctcagggctacaaaactttatagaggaagcttgattgcactctgcatttccaatgtatttttcatgcttccttggcagtttgctcagtttgtacttcttactcagattgcatcattatttgcagtatatgttgtcgggtacattgatatatgtaaattacggaagatcatttatatacacatgatttctcttgcactttgttttgttttgatgtttgggaactcaatgttattaacttcttattatgcttcttctttggtaattatttggggtattctggcaatgaaaccacatttcctgaaaataaatgtatctgaacttagtttatgggttattcaaggatgtttttggttatttggaactgtcatacttaaatacttgacatctaaaatttttggtattgcagatgacgctcatattggcaacttactaacatcaaaattctttagttataaggattttgatactttattgtatacctgtgcagcggagtttgactttatggaaaaagagactccactgagatacacaaagacattattgcttccagttgttcttgtagtgtttgttgctattgttagaaagattattagtgatatgtggggtgtcttagctaaacaacagacacatgtaagaaaacaccagtttgatcatggagagctggtttaccatgcattgcaattgttagcatatacagcccttggtattttaattatgagactaaaactcttcttgacaccacacatgtgtgttatggcatcactgatctgctcaagacagctatttggatggctcttttgcaaagtacatcctggtgctattgtgtttgctatattagcagcaatgtcaatacaaggttcagcaaatctgcaaacccagtggaatattgtaggggagttcagcaatttgccccaagaagaacttatagaatggatcaaatatagtactaaaccagatgcagtgtttgcgggtgccatgcccacgatggcaagtgttaagctctctgcacttcggcccattgtgaatcatccacattatgaagacgcaggcttgagagccagaacaaaaatagtatactcaatgtatagtcggaaagcagccgaagaagtgaagcgagaactgataaagttaaaagtgaactattacattctagaagagtcatggtgtgtaagaagatccaagcctggttgcagtatgcctgaaatttgggatgtagaagatcctgccaatgctgggaaaactcccttatgtaacctcttggtgaaggattccaaacctcacttcaccactgtattccagaacagtgtttacaaagtcctagaagttgtaaaagaatgactgctacatgacctgctgcctacggagaactacatctatgactagacattcactttgcaaataattgttgtgactctatgtttgctccagacacagagcttttattgtcacccaaagatgcctatgggaaccaaaagaatcaagctgaaccaagatttctgccagaatcaatttcctcaagccagaaggctttatcattcagtctgtgcaacggatttttttttaaataaaaacagacttctttgttgatttctcccttt

SEQ ID NO: 4269 - DNA, 4915 bp, Homo sapiens
cacttgagccgaagttaatttctcggggagttctcgggcgcgcacaggcagctcggtttgccctgcgattgagctgcgggtcgcggccggcgccggcctctccaatggcaaatgtgtgtggctggaggcgagcgcgaggctttcggcaaaggcagtcgagtgtttgcagaccggggcgagtcctgtgaaagcagataaaagaaaacatttattaacgtgtcattacgaggggagcgcccggccggggctgtcgcactccccgcggaacatttggctccctccagctccgagagaggagaagaagaaagcggaaaagaggcagattcacgtcgtttccagccaagtggacctgatcgatggccctcctgaatttatcacgatatttgatttattagcgatgccccctggtttgtgtgttacgcacacacacgtgcacacaaggctctggctcgcttccctccctcgtttccagctcctgggcgaatcccacatctgtttcaactctccgccgagggcgagcaggagcgagagtgtgtcgagtgagtgtgcgtctgtgtgtcccggcgagggtgcgcgctcggcgccgggagcgcggccagccgagtccggaggcatcgggaggtcgagagccgccgggaccccagctctgcgttcactgccccgtccggagctggacttcggggccggggccggggccgtgcgccggggacaggcagggccgggtcgcgggccgcgcgtcccccaggccggagatctgcgagtgaagagggacgagggaaaagaaacaaagccacagacgcaacttgagactcccgcatcccaaaagaagcaccagatcagcaaaaaaagaagatgggccccccgagcctcgtgctgtgcttgctgtccgcaactgtgttctccctgctgggtggaagctcggccttcctgtcgcaccaccgcctgaaaggcaggtttcagagggaccgcaggaacatccgccccaacatcatcctggtgctgacggacgaccaggatgtggagctgggttccatgcaggtgatgaacaagacccggcgcatcatggagcagggcggggcgcacttcatcaacgccttcgtgaccacacccatgtgctgcccctcacgctcctccatcctcactggcaagtacgtccacaaccacaacacctacaccaacaatgagaactgctcctcgccctcctggcaggcacagcacgagagccgcacctttgccgtgtacctcaatagcactggctaccggacagctttcttcgggaagtatcttaatgaatacaacggctcctacgtgccacccggctggaaggagtgggtcggactccttaaaaactcccgcttttataactacacgctgtgtcggaacggggtgaaagagaagcacggctccgactactccaaggattacctcacagacctcatcaccaatgacagcgtgagcttcttccgcacgtccaagaagatgtacccgcacaggccagtcctcatggtcatcagccatgcagccccccacggccctgaggattcagccccacaatattcacgcctcttcccaaacgcatctcagcacatcacgccgagctacaactacgcgcccaacccggacaaacactggatcatgcgctacacggggcccatgaagcccatccacatggaattcaccaacatgctccagcggaagcgcttgcagaccctcatgtcggtggacgactccatggagacgatttacaacatgctggttgagacgggcgagctggacaacacgtacatcgtatacaccgccgaccacggttaccacatcggccagtttggcctggtgaaagggaaatccatgccatatgagtttgacatcagggtcccgttctacgtgaggggccccaacgtggaagccggctgtctgaatccccacatcgtcctcaacattgacctggcccccaccatcctggacattgcaggcctggacatacctgcggatatggacgggaaatccatcctcaagctgctggacacggagcggccggtgaatcggtttcacttgaaaaagaagatgagggtctggcgggactccttcttggtggagagaggcaagctgctacacaagagagacaatgacaaggtggacgcccaggaggagaactttctgcccaagtaccagcgtgtgaaggacctgtgtcagcgtgctgagtaccagacggcgtgtgagcagctgggacagaagtggcagtgtgtggaggacgccacggggaagctgaagctgcataagtgcaagggccccatgcggctgggcggcagcagagccctctccaacctcgtgcccaagtactacgggcagggcagcgaggcctgcacctgtgacagcggggactacaagctcagcctggccggacgccggaaaaaactcttcaagaagaagtacaaggccagctatgtccgcagtcgctccatccgctcagtggccatcgaggtggacggcagggtgtaccacgtaggcctgggtgatgccgcccagccccgaaacctcaccaagcggcactggccaggggcccctgaggaccaagatgacaaggatggtggggacttcagtggcactggaggccttcccgactactcagccgccaaccccattaaagtgacacatcggtgctacatcctagagaacgacacagtccagtgtgacctggacctgtacaagtccctgcaggcctggaaagaccacaagctgcacatcgaccacgagattgaaaccctgcagaacaaaattaagaacctgagggaagtccgaggtcacctgaagaaaaagcggccagaagaatgtgactgtcacaaaatcagctaccacacccagcacaaaggccgcctcaagcacagaggctccagtctgcatcctttcaggaagggcctgcaagagaaggacaaggtgtggctgttgcgggagcagaagcgcaagaagaaactccgcaagctgctcaagcgcctgcagaacaacgacacgtgcagcatgccaggcctcacgtgcttcacccacgacaaccagcactggcagacggcgcctttctggacactggggcctttctgtgcctgcaccagcgccaacaataacacgtactggtgcatgaggaccatcaatgagactcacaatttcctcttctgtgaatttgcaactggcttcctagagtactttgatctcaacacagacccctaccagctgatgaatgcagtgaacacactggacagggatgtcctcaaccagctacacgtacagctcatggagctgaggagctgcaagggttacaagcagtgtaacccccggactcgaaacatggacctgggacttaaagatggaggaagctatgagcaatacaggcagtttcagcgtcgaaagtggccagaaatgaagagaccttcttccaaatcactgggacaactgtgggaaggctgggaaggttaagaaacaacagaggtggacctccaaaaacatagaggcatcacctgactgcacaggcaatgaaaaaccatgtgggtgatttccagcagacctgtggtattggccaggaggcctgagaaagcaagcacgcactctcagtcaacatgacagattctggaggataaccagcaggagcagagataacttcaggaagtccatttttgcccctgcttttgctttggattatacctcaccagctgcacaaaatgcattttttcgtatcaaaaagtcaccactaaccctcccccagaagctcacaaaggaaaacggagagagcgagcgagagagatttccttggaaatttctcccaagggcgaaagtcattggaatttttaaatcataggggaaaagcagtcctgttctaaatcctcttattcttttggtttgtcacaaagaaggaactaagaagcaggacagaggcaacgtggagaggctgaaaacagtgcagagacgtttgacaatgagtcagtagcacaaaagagatgacatttacctagcactataaaccctggttgcctctgaagaaactgccttcattgtatatatgtgactatttacatgtaatcaacatgggaacttttaggggaacctaataagaaatcccaattttcaggagtggtggtgtcaataaacgctctgtggccagtgtaaaagaaaatccctcgcagttgtggacatttctgttcctgtccagataccatttctcctagtatttctttgttatgtcccagaactgatgttttttttttaaggtactgaaaagaaatgaagttgatgtatgtcccaagttttgatgaaactgtatttgtaaaaaaaattttgtagtttaagtattgtcatacagtgttcaaaaccccagccaatgaccagcagttggtatgaagaacctttgacattttgtaaaaggccatttcttgggagttttttggtgtgtctgtttttttaaagtattcaagatactaccagtcaacatctttttggaagaaaatgccttgggtttagaagattttcttaaaaggggagtagatggttgtagattgactaaaaagtctaccatacttcaagggactacaggtaagtctcatagtataccagctttggtacttcattttttaaaaaagtattaatcaattgcaaagaaattcgccttggccaacccttctttgtgtatcaggtagtctaacctgatacaagtagttgacagatttcaactatcaatcaccagtccaacccatttctcatttaacagatgacggagataatccctaaaagcacccacatttgtttcaatgccccaaacaggccaaggctccctagcaactccctagtggcgttttttaacttctcagaaactgttaccattatttgaaataggcttccttaacctcctttacccttaacccaacagggattt

SEQ ID NO: 4270 - DNA, 1899 bp, Homo sapiens
acagtactgtgctgctttttcaaccatggagaggtcacccgtgtgatgtggacacaacctctccgtgaaagtttttcctatccattccttgtacttcagatgtatattttaactttgattctcagggactgtattattcctatttcaagactattgtggaaacaccctcatttttgaatggagtatggatgattatgaatgataaactgactgaatacccccttgttattaatacattaaaaagattcaatctttaccctgaggtaattttggccagctggtactggatttataccaaaataatggacttcattgcaattcaaaccaagatatgtcggacggttaccagaggagaaggactcagtcctactgaaagctgtgaaggattgggagatcttgcttgcttctatgttgctgtaatttttattttaaatggactaatgatggcattattcttcatatatggcacatatttaagtggcagccgattaggaggcctggttacagtgttgtgcttctttttcagtcatggagagtgtacctgtgtaatgtggacaccacctctccgcgaaagcttctcatatccatttcttgttcttcagatgttgcttgtgactcatattctcagggctacaaaactttatagaggaagtttgattgcactctgcatttccaatttatttttcatgcttccttggcagtttgctcagtttgtacttcttactcagattgcatcattatttgcagtgtatgttgtcgggtacattgatatatgtaaattatggaagatcatttatatacacatgatttctcttgcactttgttttgttgtgatgtttgggaactcaatgttattattatgctgcttctttggtaattatttggggtattctggcaatgaaaccacatttcctgaaaataaatgtatctgaacttagtttatgggttattcaaggatgtttttggttatttggaactgtcatacttaaatacttgacatctaaaatttttggtattgcagatgacatggagtttcactcttgttgcccaggctggagtgcaatggtgtgatcttggctcaccgcaaccttcctctcccaggttcaagcgattctcctgcctcagcctcccgagtagctaggattacagtgaccgcccacccgcacctgctgaacagcaaggtccacggagtaggaactgaacgtgtcagggactatgtgtggcactgtatggcaagtctccaagactgggaagcaccgctttacatagtcctcatggattccaaagcatgagttgggctgcttttgaatagtgggagacgggagtttaccccgatcacagaaaccataccaactgaaagacaaatcagcatcttgctggacgacccctcacagagctcctagatccttgaagtgtgaacttcagcagctgagagagatggggtctcactatgttgcccaggctggtcttgaactcctggactcaagcaatcctctcacctcagcctcccaaagtgctgggattacagattttataaatattgttgatctttttgaaaaaccaactgttggcttcattttctttattgtgtaatactaccttagaggatagcagttcctaatacctacttttattatgagtctctgccatttataaagaactgtggacagcacagggaatgggggaagaaaactctggtgcagcttgaatcttggtagcaaaacagtgacttcatcagaaaattttgtcactctctattagataatggagtttgaccatttggaatttggaatttttcaaatgaatatgacaaaaatttaaaaaactcttgtattactatgtgataacacagatctttacaactttatgtttgttttatcaattacatattaaagatag

SEQ ID NO: 4271 - DNA, 977 bp, Homo sapiens
  misc_feature (402)..(402): n is a, c, g, or t
  misc_feature (406)..(406): n is a, c, g, or t
gagaaacaataggacggaaacgccgaggaacccggctgaggcggcagagcatcctggccagaacaagccaaggagccaagacgagagggacacacggacaaacaacagacagaagacgtactggccgctggactccgctgcctcccccatctccccgccatctgcgcccggaggatgagcccagccttcagggccatggatgtggagccccgcgccaaaggcgtccttctggagccctttgtccaccaggtcggggggcactcatgcgtgctccgcttcaatgagacaaccctgtgcaagcccctggtcccaagggaacatcagttctacgagaccctccctgctgagatgcgcaaattcactccccagtacaaaggtgtctcttgatcacagtaacccgantagntccactggggggacggtgggggaagactttgggaggattttacccagaatacttgccgcctgctttttgtcctccaggaaaccagaagcccgggtaattaggacaaagccaaaggccccttgttagctggccatccctgccccattttttcccctggtcctttcccctgtggccacagggaagtgtggcctgaataccccaccccggctcctctgcacccagagctgggggccacctcagaagtgtcatctctctctgagcacgcattcccctgcagcagtcgaggactgagcagattgagtgatgctggggcagagaggcctgggaggaaaggtgttcagccagtcgtttgtaaggcgctcgtcggcacctgctgaaacgcccccacctgacagccccatcctcaaagactgtcttaattactcatggcaggttctagagacttaaggggaaaagctgctttcaaggccaccacatgtctgtgctccccaaccagctctatctgccttgtgttcattttgttattttgtgacgtgagactgcaaagaccaataaaaacatattttataag

SEQ ID NO: 4272 - DNA, 1180 bp, Homo sapiens
cattttggtgcgagagaaacaataggacggaaacgccgaggaacccggctgaggcggcagcagagcatcctggccagaacaagccaaggagccaagacgagagggacacacggacaaacaacagacagaagacgtactggccgctggactccgctgcctcccccatctccccgccatctgcgcccggaggatgagcccagccttcagggccatggatgtggagccccgcgccaaaggcgtccttctggagccctttgtccaccaggtcggggggcactcatgcgtgctccgcttcaatgagacaaccctgtgcaagcccctggtcccaagggaacatcagttctacgagaccctccctgctgagatgcgcaaattcactccccagtacaaaggacaaagccaaaggccccttgttagctggccatccctgccccattttttcccctggtcctttcccctgtggccacagggaagtgtggcctgaataccccaccccggctcctctgcacccagagctgggggccacctcagaagtgtcatctctctctgagcacgcattcccctgcagcagtcgaggactgagcagattgagtgatgctggggcagagaggcctgggaggaaaggtgttcagccagtcgtttgtaaggcgctcgtcggcacctgctgaaacgcccccacctgacagccccatcctcaaagactgtcttaattactcatggcaggttctagagacttaaggggaaaagctgctttcaaggccaccacatgtctgtgctccccaaccagctctatctgccttgtgttcattttgttattttgtgacgtgagactgcaaagaccaataaaaacatattttataagaacaaaaggcctgggtgcctacccgtgtgggggcactgtgggaagcctttgctagggtgtcttgtgctgtgtggtttgttttgtttgcccctttattttgctttgcttacccagtcttcccttactcttggatgcttcttaaccctcaggcaaacctgtgttccccctgtattcaggctctgctttaaagcaagccatgaggctgttggagtttctgtttagggcattaaaaattcccgcaaactataaagagcaatgttttcagtcttttaggattagaagaattacataaaaattaataaacattttcaatgatgg

SEQ ID NO: 4273 - DNA, 1018 bp, Homo sapiens
ccctaaccctgaggctgccgcgcggcggtcactgcgccggggtagtgggccccagtgttgcgctctctggccgttccttacactctgcttcaggctccagtgcaggggcgtagtgggatatggccaactcgggctgcaaggacgtcacgggtccagatgaggagagttttctgtactttgcctacggcagcaacctgctgacagagaggatccacctccgaaacccctcggcggcgttcttctgtgtggcccgcctgcaggattttaagcttgactttggcaattcccaaggcaaaacaagtcaaacttggcatggagggatagccaccatttttcagagtcctggcgatgaagtgtggggagtagtatggaaaatgaacaaaagcaatttaaattctctggatgaattatttgcatgggtgcaaaagaaaatggtttgccgctggagtatcaagagaagttaaaagcaatagaaccaaatgactatacaggaaaggtctcagaagaaattgaagacatcatcaaaaagggggaaacacaaactctttagaacataacagaatatatctaagggtattctatgtgctaatataaaatatttttaacacttgagaacagggatctgggggatctccacgtttgatccattttcagcagtgctctgaaggagtatcttacttgggtgattccttgtttttagactataaaaagaaactgggataggagttagacaatttaaaaggggtgtatgagggcctgaaatatgtgacaaatgaatgtgagtaccccttctgtgaacactgaaagctattctcttgaattgatcttaagtgtctccttgctctggtaaaagatagatttgtagctcacttgatgatggtgctggtgaattgctctgctctgtctgagatttttaaaaatcagcttaatgagagtaatctgcagacaattgataataacattttgaaaattggaaagatggtatactgtttttagaggaataaacgtatttgtggtt

SEQ ID NO: 4274 - DNA, 1779 bp, Homo sapiens
gaccccatggacacctcctcaaactctctgcagcagatgtaattctgtatccagacatggcaaatgccatcctccttgtttctgaggaccagaggagtgtacagcgtgctgaggagccccatgacctaccagacaaccctgagagatttgaatggcgttactgtgtgcttggctgtgaaagcttcatgtcagagagacactactgggaggtggaagtgggggacagaaaagagtggcatattggggtatgtagtaagaacgtggagaggaaaaaagtttgggtcaaaatgacaccggagaacggatactggactatgggcctgactgatgggaataagtatcgggctctcactgagcccagaaccaacctgaaacttcctgagcctcctaggaaagtgggggtcatcctggactatgagactggacatatctcgttctacaatgccacggatggatctcatatctacacatttctgcacgcctcttcctctgagcctctgtatcctgtattcagaattttgaccttggagcccactgccctgaccgtttgcccaataccaaaagtagagagttcccccgatcccgacctagtgcctgatcattccctggagataccactgaccccaggcttagctaatgaaagtggggagcctcaggctgaagtaacatctctgcttctccctgcccagcctggagctaagggtctcaccctccacaacagccagtcagaaccataaagctacaggcacacactgaagcactttactgatattcattcaattattccataggacagttgtttgagtttggtgccaccttattggcccctttatacagataaggaaactggggtgtagaaaagtgtattgactttacaaagcagacaggaatagtgaacaacagagctgggatctgaacaacaatgactaacattaatggagaatttaaaacgttctgagtgctgtgttatgagctttggtgggtgtcactcctttaatcctcacaacaccctgtcaggtagtctcatttggcaagtatggaagcagaggcagggcaacattaagtagcttacataactcacacggtaatttgtgcagttgggagatgttcagcttcagtccctggccaattgcccgttcttttccagcctgatttttcctgcatgggaagagcccacatgtagccctgaggttcccttcccaggacagctccaggatcgagatcactgtgagtggttgtggagttaagacccctatggactccttcccagctgattatcagagccttagacccagcactccttggattggctctgcagagtgtcttggttgagagaataacgttgcagttcccacagggcatgtgactttgaaagagactagaggccacactcagttaataatggggcacagatgtgttcccacccaacaaatgtgataagtgatcgtgcagccagagccagccttccttcagtcaaggtttccaggcagagcaaataccctagagattctctgtaatattggtaatttggatgaaggaagctagaagaattacagggatgtttttaatcccactatggactcagtctcctggaaaaggatctgtccactcctggtcattggtggatgttaaacccatattcctttcaactgctgcctgctagggaaaactgctcctcattatcatcactattattgctcaccactgtatcccctctactgggcaagtgcttgtcaagttctagttgttcaataaatttgttaataatgctgactcttc

SEQ ID NO: 4275 - DNA, 4825 bp, Homo sapiens
gcctagggaggaggagcgagaatcagcctggttcagtgactgagacaaactggaggtgaaaggagctggtactgtccactgtgctgtcggtgctgaacctgagacgcgagcggaccagttgctccagcacctgaaggcaacgccctcttgcaccctctgtgccctgtgggacccgcttcaccaacaggacccatatcaacttgacaaaggagtgtggtatcggacgtgggagagagtcctctgtttgccacctgggcgctcattcaggcgtgactttggagatttctatagttttagaccaaactatttttttttccccagctaagacgatcttttgagagttttttttttttattgtgatttatatttccacagcgtttaggaatctttctgggggacttttgtgactgttaaaataaggtgaaaagcaataaggatgtttaagtgctggtcagttgtcttggttctcggattcatttttctggagtcggaaggaaggccaaccaaagaaggaggatatggccttaaatcctatcagcctctaatgagattgcgacataaggaaaaaaatcaagaaagttcaagagtcaaaggatttatgattcaggatggcccttttggatcttgtgaaaataagtactgtggtttgggaagacactgtgttaccagcagagagacagggcaagcagaatgtgcctgtatggacctttgcaaacgtcactacaaacctgtgtgtggatctgatggagaattctatgaaaaccactgtgaagtgcacagagctgcttgcctgaaaaaacaaaagattaccattgttcacaatgaagactgcttctttaaaggagataagtgcaagactactgaatacagcaagatgaaaaatatgctattagatttacaaaatcaaaaatatattatgcaagaaaatgaaaatcctaatggcgacgacatatctcggaagaagctattggtggatcaaatgtttaaatattttgatgcagacagtaatggacttgtagatattaatgaactaactcaggtgataaaacaggaagaacttggcaaggatctctttgattgtactttgtatgttctattgaaatatgatgattttaatgctgacaagcacctggctcttgaagaattttatagagcattccaagtgatccagttgagtctgccagaagatcagaaactaagcatcactgcagcaactgtgggacaaagtgctgttctgagctgtgccattcaaggaaccctgagacctcccattatctggaaaaggaacaatattattctaaataatttagatttggaagacatcaatgactttggagatgatgggtccttgtatattactaaggttaccacaactcacgttggcaattacacctgctatgcagatggctatgaacaagtctatcagactcacatcttccaagtgaatgttcctccagtcatccgggtgtatccagagagtcaggctagagagcctggggtaactgccagtcttaggtgccatgcagagggcataccaaagcctcagcttggctggttgaagaatggaattgatattacaccaaagctttccaaacaactcacgcttcaagcaaatggcagtgaggttcacataagcaatgtgcgctatgaagatactggagcatacacttgtatcgcaaagaatgaagcaggagtggatgaagacatctcttctctttttgtggaagactctgctagaaagaccctagctaacatattatggagagaagaaggtctgggaattgggaacatgttctatgttttttatgaagatggaatcaaagtgatacaacccatagaatgtgaatttcagaggcacattaagcctagtgaaaagctccttggatttcaggatgaagtctgtcccaaagctgagggagatgaagttcagaggtgtgtgtgggcatcagctgttaatgtcaaagacaagttcatttatgttgcacagccaactttggacagagtccttattgttgatgtgcagtcccaaaaagttgttcaggcagtgagcacagaccctgtcccagttaaattacactatgacaaatcacatgatcaggtctgggtgctaagctggggtaccttggagaagacatcaccaacactacaggtaattaccctggccagtgggaatgtgcctcaccacacgatccacacccaaccagtgggaaagcaatttgacagagtggatgattttttcattcccaccacaacactcattatcacccatatgaggtttggatttattcttcataaagatgaagctgcactacaaaaaattgatcttgaaaccatgtcatacatcaagacaattaacttgaaggactataagtgcgttcctcagtcattggcatatacacacttgggaggctactacttcattggctgcaaacctgacagcaccggagcagtttccccacaggtcatggtggacggtgtaactgactcagtcattgggttcaatagtgatgtgacgggcactccatatgtctctccagatggccactaccttgtcagcattaatgatgtgaaaggtcttgtaagggttcagtacattaccatcagaggagaaatacaggaggcttttgatatttacacaaatctgcacatatctgatctggcatttcaaccatcctttactgaagcccaccaatataacatctacggtagttcaagcacacaaactgatgtgctctttgtggagctctcttctgggaaggtcaagatgataaagagtctcaaggaaccactcaaggcagaagaatggccttggaaccggaaaaacaggcaaatccaggacagtggcttgtttggtcaatacctgatgacaccttccaaggactctctcttcatcctagatggacgactcaataaattaaactgtgagatcactgaagttgaaaaaggaaatacagtcatttgggttggagatgcctaaaaaccctacgatacaattattgaatgaagcgttttacaatacattgcacttaatccattgtttaaatttacaacttaactttccaagtttatatcctagtcaaacaaaatttacttggttggtccaaataaaataaattgtttttgactaagtgactaagacatacacaattaattatattggttaattagaaatactcagcacaatatttaatgagaaatcacatcagtcacaagaatcaaatatgtaaattatgctttaaacaataaagtaggatttaaatcatttaaaaaactaaactgcagggaatttcagatgacataaagcattatttcattttgagggtagtttattttttttctctgtccttttggtatgattaaacaagaaataaaaggtgttgtggaaacttaaaattcttaattcaaaatattcggtcctgtccactgtttataatattttgtgccttgaagggaatgtcacaggaggaaaaggaagactaaagcctgcatactaaatgctctcataactataaatctcttgttgttaaaaaacatctcttgcaccaaatcctgtcttcagtcttttgtttaaccctcaatgaactaccaattgaaggcataagttggtcttaggttgtatacaggtgtcaaactccacttgacatttactgtataatctgcagcatgctatagaaagtggggaggaagggaggaaaaataattacagtcaaaatatttgcaatctatctactcattttgctttcaatcactagagtgcattatgtttttaatgcaagtttgtctgggatgtcaactgcctacagatgtttattactagcagaatagattatttattaatagattgtttcttttcatatagtccaatgtttcatcatcaggaactttcggttttaaaaaagaaacattacttttgtctgctaaagtaaaccatatatagggaaattaacacctaggaaaagaaaactggcaagagaattgatgaggtattagtggcttagaagaattagtaatataagttgggaataaaggggtagcccgacagtggtaagtaaaaatgtagtactccattgtttttgctatttaaatataatgtatcaaaaacctttattctaaaatttccacaaatgattccttttatccatcttcttgtaatcctaaaagcatcttctcactatgtgctgtagtttgaaacctaacgaatcctcctacttgagacactgtagaaaagtaaaaattgttgcttctgttttgttttaagaggaaatgagaaggccagcagaagtagattaaaactagagagctggtttattaaaataagcagataattatccaggcttaaagtaatagcttacatgttttgaaaatccttgtacttatttttgtttttattgttgcaaaaaaatgttaatgggctgttgaaatgacctccatttacttaaggtaatccaataaggtcttttttaaatatacaaattttactcaagtttaaattgtataaaactgcttagaaacctgaaattttatagtgtgtaatatcttatgtgtatatagcatcctgagctgtgtgatacagtagatttcttcttagcagaaacatgcgaggtagatttaataaacaacaaaaatcagcttatgtttctacttattgaatctgctttactttttagcaattttcttccttgtgaacatgaaccatataaagtgtctgtgacttaatgatttcatgtaagtctgtcgcatacatccttcttttgtagcttacaccatgtggatgctctgtctgtagacactgcttgataaaaggagaataaacctcttacatttt

SEQ ID NO: 4276 - DNA, 2176 bp, Homo sapiens
tggcagggcggcgggtgaacgtgaacgtgggcgtgctgggccacatcgacagcggcaagacggcgctggcgcgggcgctaagcaccacagcctccaccgccgcctttgacaagcagccgcagagccgcgagcgcggcatcacgctcgatctgggcttctcgtgcttctcggtgccgctgcccgcgcgcctgcggtcgtctttgcccgagttccaggcagcgcccgaggccgagcccgagcccggcgagccactgcttcaggtcacgctggtcgactgccccgggcacgcctccctcatccggaccatcatcggcggggcccagatcattgatctgatgatgctggtcatcgatgtgaccaaggggatgcagacccagtcagcggaatgccttgtgatcggccagattgcctgccagaagctggtcgtggtgctgaacaaaatagacctcttacctgaaggaaagagacaggcagcaattgataaaatgaccaagaaaatgcagaagaccctagagaacaccaagttccgaggtgcaccgattatacccgtggcggccaagccggggggaccagaggcccccgaaactgaagctccacagggcattccagagctcattgagctcctgacgtcccagatttccatcccaacgagagacccctcgggaccgttcctcatgtctgtggaccactgtttctccatcaaaggccaaggcactgtgatgacagggaccatcctttcaggctccatcagcctcggtgacagtgtggagatccctgccctcaaggtggtgaagaaggtgaagtccatgcagatgttccacatgcccatcacttcagccatgcaaggagaccggctgggcatctgcgtcacccagtttgaccctaagctgctggagcgcgggttggtgtgtgcccccgagtccctgcacactgtccatgcggccctcatctctgtggaaaagataccgtatttccgggggcccctgcaaaccaaggccaagttccacattacagtgggccatgaaacagtcatgggccggttgatgttcttcagtcctgctccagataactttgaccaggagcctatactggactctttcaacttctctcaagaataccttttccaggagcagtacctgtccaaggatttgacaccagcagtgacagacaatgatgaggccgacaagaaggccggccaggccacagagggccattgtcctcggcagcagtgggccctggtggagtttgagaagcccgtcacctgccctcggctgtgcctggtgattggctccaggctagatgcggacattcacaccaacacgtgccggctagccttccatggcatcctgctccacgggctagaggacaggaactacgccgacagcttcctgcccaggctgaaggtgtacaagctgaagcacaagcatggccttgtggagcgggcgatggatgactacagtgtgatcggccgctccctgttcaaaaaggaaaccaacatccagctcttcgtggggctcaaggtgcacttgtccactggggaactgggcatcatcgacagtgccttcggccagagcggcaagttcaagatccacatcccaggtggcctcagccccgagtccaagaagatcctgacacccgccctcaagaagcgggcccgggctggccgtggggaggccaccaggcaggaggagagcgccgagcggagcgagccctcacagcatgtggtgctcagcctgactttcaagcgttatgtcttcgacacccacaagcgcatggttcagtctccctgagtgtccggtgacctcccccagggcctccttgcccagcccagtccaggctgctgtgccaaatcccaaccagccacgcctcagcctctcccagtctctccctgcagtcctgcagcagcagcccccacccccaagcttggtgctgagccctggtgaggagctgagggggatgggttgctggggccaggagggtctctcctccagcccctgcacactcccacccaggacagcccccagcccaactaggaaagggccatgggcagagggctggtagccagtatcttccactgccccatctgttggccacctgcaggccagtctcaaccctcccccaggtgggcaggcacttgatggctacaaataaatgtcccgtggccccagcccactct

SEQ ID NO: 4277 - DNA, 2224 bp, Homo sapiens
agagccgcaagcgcagggaaggcctccccgcacgggtgggggaaagcggccggtgcagcgcggggacaggcactcgggctggcactggctgctagggatgtcgtcctggataaggtggcatggacccgccatggcgcggctctggggcttctgctggctggttgtgggcttctggagggccgctttcgcctgtcccacgtcctgcaaatgcagtgcctctcggatctggtgcagcgacccttctcctggcatcgtggcatttccgagattggagcctaacagtgtagatcctgagaacatcaccgaaattttcatcgcaaaccagaaaaggttagaaatcatcaacgaagatgatgttgaagcttatgtgggactgagaaatctgacaattgtggattctggattaaaatttgtggctcataaagcatttctgaaaaacagcaacctgcagcacatcaattttacccgaaacaaactgacgagtttgtctaggaaacatttccgtcaccttgacttgtctgaactgatcctggtgggcaatccatttacatgctcctgtgacattatgtggatcaagactctccaagaggctaaatccagtccagacactcaggatttgtactgcctgaatgaaagcagcaagaatattcccctggcaaacctgcagatacccaattgtggtttgccatctgcaaatctggccgcacctaacctcactgtggaggaaggaaagtctatcacattatcctgtagtgtggcaggtgatccggttcctaatatgtattgggatgttggtaacctggtttccaaacatatgaatgaaacaagccacacacagggctccttaaggataactaacatttcatccgatgacagtgggaagcagatctcttgtgtggcggaaaatcttgtaggagaagatcaagattctgtcaacctcactgtgcattttgcaccaactatcacatttctcgaatctccaacctcagaccaccactggtgcattccattcactgtgaaaggcaaccccaaaccagcgcttcagtggttctataacggggcaatattgaatgagtccaaatacatctgtactaaaatacatgttaccaatcacacggagtaccacggctgcctccagctggataatcccactcacatgaacaatggggactacactctaatagccaagaatgagtatgggaaggatgagaaacagatttctgctcacttcatgggctggcctggaattgacgatggtgcaaacccaaattatcctgatgtaatttatgaagattatggaactgcagcgaatgacatcggggacaccacgaacagaagtaatgaaatcccttccacagacgtcactgataaaaccggtcgggaacatctctcggtctatgctgtggtggtgattgcgtctgtggtgggattttgccttttggtaatgctgtttctgcttaagttggcaagacactccaagtttggcatgaaaggttttgttttgtttcataagatcccactggatgggtagctgaaataaaggaaaagacagagaaaggggctgtggtgcttgttggttgatgctgccatgtaagctggactcctgggactgctgttggcttatcccgggaagtgctgcttatctggggttttctggtagatgtgggcggtgtttggaggctgtactatatgaagcctgcatatactgtgagctgtgattggggaacaccaatgcagaggtaactctcaggcagctaagcagcacctcaagaaaacatgttaaattaatgcttctcttcttacagtagttcaaatacaaaactgaaatgaaatcccattggattgtacttctcttctgaaaagtgtgctttttgaccctactggacatttattgacttaattgcttctgtttattaaaattgacctgcaaagttaaaaaaaaattaaagttgagaacaggtataagtgcacactgaatagtctaatctacatgtaacacatattttagtgtgattttctatactctaatcagcactgaattcagagggtttgactttttcatctataacacagtgactaaaagagttaagggtatatataccatcactttgggacttggtagtattattaaaaggttatttccttcactgtcaataaaagtccaaatgtttagcttaggtctgagagtcaaacaatgttaaggattgtcttaaagttccttagc

SEQ ID NO: 4278 - DNA, 2771 bp, Homo sapiens
agtagacgctcgggcaccagccgcggcaaggatggagctgggttgctggacgcagttggggctcacttttcttcagctccttctcatctcgtccttgccaagagagtacacagtcattaatgaagcctgccctggagcagagtggaatatcatgtgtcgggagtgctgtgaatatgatcagattgagtgcgtctgccccggaaagagggaagtcgtgggttataccatcccttgctgcaggaatgaggagaatgagtgtgactcctgcctgatccacccaggttgtaccatctttgaaaactgcaagagctgccgaaatggctcatgggggggtaccttggatgacttctatgtgaaggggttctactgtgcagagtgccgagcaggctggtacggaggagactgcatgcgatgtggccaggttctgcgagccccaaagggtcagattttgttggaaagctatcccctaaatgctcactgtgaatggaccattcatgctaaacctgggtttgtcatccaactaagatttgtcatgttgagcctggagtttgactacatgtgccagtatgactatgttgaggttcgtgatggagacaaccgcgatggccagatcatcaagcgtgtctgtggcaacgagcggccagctcctatccagagcataggatcctcactccacgtcctcttccactccgatggctccaagaattttgacggtttccatgccatttatgaggagatcacagcatgctcctcatccccttgtttccatgacggcacgtgcgtccttgacaaggctggatcttacaagtgtgcctgcttggcaggctatactgggcagcgctgtgaaaatcttctggaggctgggaagtccaagatcaaggcgtcagaagattcattgtctgtccttgaagaaagaaactgctcagaccctgggggcccagtcaatgggtaccagaaaataacagggggccctgggcttatcaacggacgccatgctaaaattggcaccgtggtgtctttcttttgtaacaactcctatgttcttagtggcaatgagaaaagaacttgccagcagaatggagagtggtcagggaaacagcccatctgcataaaagcctgccgagaaccaaagatttcagacctggtgagaaggagagttcttccgatgcaggttcagtcaagggagacaccattacaccagctatactcagcggccttcagcaagcagaaactgcagagtgcccctaccaagaagccagcccttccctttggagatctgcccatgggataccaacatctgcatacccagctccagtatgagtgcatctcacccttctaccgccgcctgggcagcagcaggaggacatgtctgaggactgggaagtggagtgggcgggcaccatcctgcatccctatctgcgggaaaattgagaacatcactgctccaaagacccaagggttgcgctggccgtggcaggcagccatctacaggaggaccagcggggtgcatgacggcagcctacacaagggagcgtggttcctagtctgcagcggtgccctggtgaatgagcgcactgtggtggtggctgcccactgtgttactgacctggggaaggtcaccatgatcaagacagcagacctgaaagttgttttggggaaattctaccgggatgatgaccgggatgagaagaccatccagagcctacagatttctgctatcattctgcatcccaactatgaccccatcctgcttgatgctgacatcgccatcctgaagctcctagacaaggcccgtatcagcacccgagtccagcccatctgcctcgctgccagtcgggatctcagcacttccttccaggagtcccacatcactgtggctggctggaatgtcctggcagacgtgaggagccctggcttcaagaacgacacactgcgctctggggtggtcagtgtggtggactcgctgctgtgtgaggagcagcatgaggaccatggcatcccagtgagtgtcactgataacatgttctgtgccagctgggaacccactgccccttctgatatctgcactgcagagacaggaggcatcgcggctgtgtccttcccgggacgagcatctcctgagccacgctggcatctgatgggactggtcagctggagctatgataaaacatgcagccacaggctctccactgccttcaccaaggtgctgccttttaaagactggattgaaagaaatatgaaatgaaccatgctcatgcactccttgagaagtgtttctgtatatccgtctgtacgtgtgtcattgcgtgaagcagtgtgggcctgaagtgtgatttggcctgtgaacttgggctgtgccagggcttctgacttcagggacaaaactcagtgaagggtgagtagacctccattgctggtaggctgatgccgcgtccactactaggacagccaattggaagatgccagggcttgcaagaagtaagtttcttcaaagaagaccatatacaaaacctctccactccactgacctggtggtcttccccaactttcagttatacgaatgccatcagcttgaccagggaagatctgggcttcatgaggccccttttgaggctctcaagttctagagagctgcctgtgggacagcccagggcagcagagctgggatgtggtgcatgcctttgtgtacatggccacagtacagtctggtccttttccttccccatctcttgtacacattttaataaaataagggttggcttctgaactac

SEQ ID NO: 4279 - DNA, 2263 bp, Homo sapiens
gcccagcggaccccagcctctgccaggttcggtccgccatcctcgtcccgtcctccgccggcccctgccccgcgcccagggatcctccagctcctttcgcccgcgccctccgttcgctccggacaccatggacaagttttggtggcacgcagcctggggactctgcctcgtgccgctgagcctggcgcagatcgatttgaatataacctgccgctttgcaggtgtattccacgtggagaaaaatggtcgctacagcatctctcggacggaggccgctgacctctgcaaggctttcaatagcaccttgcccacaatggcccagatggagaaagctctgagcatcggatttgagacctgcaggtatgggttcatagaagggcacgtggtgattccccggatccaccccaactccatctgtgcagcaaacaacacaggggtgtacatcctcacatccaacacctcccagtatgacacatattgcttcaatgcttcagctccacctgaagaagattgtacatcagtcacagacctgcccaatgcctttgatggaccaattaccataactattgttaaccgtgatggcacccgctatgtccagaaaggagaatacagaacgaatcctgaagacatctaccccagcaaccctactgatgatgacgtgagcagcggctcctccagtgaaaggagcagcacttcaggaggttacatcttttacaccttttctactgtacaccccatcccagacgaagacagtccctggatcaccgacagcacagacagaatccctgctaccagtacgtcttcaaataccatctcagcaggctgggagccaaatgaagaaaatgaagatgaaagagacagacacctcagtttttctggatcaggcattgatgatgatgaagattttatctccagcaccatttcaaccacaccacgggcttttgaccacacaaaacagaaccaggactggacccagtggaacccaagccattcaaatccggaagtgctacttcagacaaccacaaggatgactgatgtagacagaaatggcaccactgcttatgaaggaaactggaacccagaagcacaccctcccctcattcaccatgagcatcatgaggaagaagagaccccacattctacaagcacaatccaggcaactcctagtagtacaacggaagaaacagctacccagaaggaacagtggtttggcaacagatggcatgagggatatcgccaaacacccaaagaagactcccattcgacaacagggacagctgcagcctcagctcataccagccatccaatgcaaggaaggacaacaccaagcccagaggacagttcctggactgatttcttcaacccaatctcacaccccatgggacgaggtcatcaagcaggaagaaggatggatatggactccagtcatagtataacgcttcagcctactgcaaatccaaacacaggtttggtggaagatttggacaggacaggacctctttcaatgacaacgcagcagagtaattctcagagcttctctacatcacatgaaggcttggaagaagataaagaccatccaacaacttctactctgacatcaagcaataggaatgatgtcacaggtggaagaagagacccaaatcattctgaaggctcaactactttactggaaggttatacctctcattacccacacacgaaggaaagcaggaccttcatcccagtgacctcagctaagactgggtcctttggagttactgcagttactgttggagattccaactctaatgtcaatcgttccttatcaggagaccaagacacattccaccccagtggggggtcccataccactcatggatctgaatcagatggacactcacatgggagtcaagaaggtggagcaaacacaacctctggtcctataaggacaccccaaattccagaatggctgatcatcttggcatccctcttggccttggctttgattcttgcagtttgcattgcagtcaacagtcgaagaaggtgtgggcagaagaaaaagctagtgatcaacagtggcaatggagctgtggaggacagaaagccaagtggactcaacggagaggccagcaagtctcaggaaatggtgcatttggtgaacaaggagtcgtcagaaactccagaccagtttatgacagctgatgagacaaggaacctgcagaatgtggacatgaagattggggtgtaacacctacaccattatcttggaaagaaacaaccgttg

SEQ ID NO: 4280 - DNA, 1760 bp, Homo sapiens
atttgaatataacctgccgctttgcaggtgtattccacgtggagaaaaatggtcgctacagcatctctcggacggaggccgctgacctctgcaaggctttcaatagcaccttgcccacaatggcccagatggagaaagctctgagcatcggatttgagacctgcaggtatgggttcatagaagggcacgtggtgattccccggatccaccccaactccatctgtgcagcaaacaacacaggggtgtacatcctcacatccaacacctcccagtatgacacatattgcttcaatgcttcagctccacctgaagaagattgtacatcagtcacagacctgcccaatgcctttgatggaccaattaccataactattgttaaccgtgatggcacccgctatgtccagaaaggagaatacagaacgaatcctgaagacatctaccccagcaaccctactgatgatgacgtgagcagcggctcctccagtgaaaggagcagcacttcaggaggttacatcttttacaccttttctactgtacaccccatcccagacgaagacagtccctggatcaccgacagcacagacagaatccctgctaccagagaccaagacacattccaccccagtggggggtcccataccactcatggatctgaatcagatggacactcacatgggagtcaagaaggtggagcaaacacaacctctggtcctataaggacaccccaaattccagaatggctgatcatcttggcatccctcttggccttggctttgattcttgcagtttgcattgcagtcaacagtcgaagaagttgaagagattcaggttatagcataagaagagcactgtttcatcgtcttcttgctgttaggaggtctatgaagcagagaagaactttcctttggaaaacaactaaatgaagacagtcacctcgctagaactgacacatgggctgtttttatattcttgaaggccactctctccctacctgaaccaagacctataggtttacatgttatttacattttatatataatatatatatatatatatacacatacattatatatacacaatagtaattctagcaacagaggaaatgacctttaacaggggtataaatctaaatttataaaagtataaatctaaatttcttacccaagacactttaaagatacattatttttctccaggacgtaattcataggaatattaagccttttgtaaatgtccctttagatggtttctcataaggtaaaagaaacttatttccaagcaggaccacctttattgtgtccccagatcacctcacagggcagaaaaatgcccctcagtctgggagaagacctagagagaattatggactccttactggtttttggaaagcaaccaacagctaattccaacaccatgggcagcccatacagtctctaattatctgagaaaatcaaatgatgctgttacaataattacgctggtacaagttaataaaagtgccatgttacagtcaaacagctatgttgctatctataccattgagggcatagttttaaaaagtagttatgctacctgattgtataaggaacaaaactgagagaaaaaatctaaaaggccgcctatgattgaatggaaagattttttttagttgaatttaaataatgtgacttgggggagcctttacaaagagtctttatacctcccttcagcttcctcattttcccttggattacttttgctcaattaaatatgaatttcct

SEQ ID NO: 4281 - DNA, 1735 bp, Homo sapiens
ccagcctctgccaggttcggtccgccatcctcgtcccgtcctccgccggcccctgccccgcgcccagggatcctccagctcctttcgcccgcgccctccgttcgctccggacaccatggacaagttttggtggcacgcagcctggggactctgcctcgtgccgctgagcctggcgcagatcgatttgaatataacctgccgctttgcaggtgtattccacgtggagaaaaatggtcgctacagcatctctcggacggaggccgctgacctctgcaaggctttcaatagcaccttgcccacaatggcccagatggagaaagctctgagcatcggatttgagacctgcaggtatgggttcatagaagggcacgtggtgattccccggatccaccccaactccatctgtgcagcaaacaacacaggggtgtacatcctcacatccaacacctcccagtatgacacatattgcttcaatgcttcagctccacctgaagaagattgtacatcagtcacagacctgcccaatgcctttgatggaccaattaccataactattgttaaccgtgatggcacccgctatgtccagaaaggagaatacagaacgaatcctgaagacatctaccccagcaaccctactgatgatgacgtgagcagcggctcctccagtgaaaggagcagcacttcaggaggttacatcttttacaccttttctactgtacaccccatcccagacgaagacagtccctggatcaccgacagcacagacagaatccctgctaccaatatggactccagtcatagtataacgcttcagcctactgcaaatccaaacacaggtttggtggaagatttggacaggacaggacctctttcaatgacaacgcagcagagtaattctcagagcttctctacatcacatgaaggcttggaagaagataaagaccatccaacaacttctactctgacatcaagcaataggaatgatgtcacaggtggaagaagagacccaaatcattctgaaggctcaactactttactggaaggttatacctctcattacccacacacgaaggaaagcaggaccttcatcccagtgacctcagctaagactgggtcctttggagttactgcagttactgttggagattccaactctaatgtcaatcgttccttatcaggagaccaagacacattccaccccagtggggggtcccataccactcatggatctgaatcagatggacactcacatgggagtcaagaaggtggagcaaacacaacctctggtcctataaggacaccccaaattccagaatggctgatcatcttggcatccctcttggccttggctttgattcttgcagtttgcattgcagtcaacagtcgaagaaggtgtgggcagaagaaaaagctagtgatcaacagtggcaatggagctgtggaggacagaaagccaagtggactcaacggagaggccagcaagtctcaggaaatggtgcatttggtgaacaaggagtcgtcagaaactccagaccagtttatgacagctgatgagacaaggaacctgcagaatgtggacatgaagattggggtgtaacacctacaccattatcttggaaagaaacaaccgttggaaacataaccattacagggagctgggacacttaacagatgcaatgtgctactgattgtttcattgcgaatcttttttagcataaaattttctactcttttt

SEQ ID NO: 4282 - DNA, 1411 bp, Homo sapiens
ggtaacatttgtcgatcacccattgcagaagcagttttcaggaaacttgtaaccgatcaaaacatctcagagaattggagggtagacagcgcggcaacttccgggtatgagatagggaacccccctgactaccgagggcagagctgcatgaagaggcacggcattcccatgagccacgttgcccggcagattaccaaagaagattttgccacatttgattatatactatgtatggatgaaagcaatctgagagatttgaatagaaaaagtaatcaagttaaaacctgcaaagctaaaattgaactacttgggagctatgatccacaaaaacaacttattattgaagatccctattatgggaatgactctgactttgagacggtgtaccagcagtgtgtcaggtgctgcagagcgttcttggagaaggcccactgaggcaggttcgtgccctgctgcggccagcctgactagaccccaccctgaggtcctgcatttctcagtcggtgtgtaatcacgttccagggcccaaagcccagctctttgttcagttgacttactgtttcttaccttaaaaagtaattgtagatggaaatcagttgtgtttggcaggagaatcaataaaaatctttgattcagacagcttatggggtattttaagcattcttagactagttgaacatctcactttgccccagttacaaaaatagtagaacaagcaacataaaacaatgaaggaaaacctcacttgaaggcccaggtcaacatctaagcctgttgagacttagataatcgagtctacctcttcagtaggtttgtgtggatggcctggagggcaggtgccctctgctccccagtgctacctctctcttccctagggccttttgtggattgacagtagtcccctccgtaggagctcacagtctagattagaagtgttttaatttctacacacccatagtgcacacttgtatattgaaaagatagggaagagagaaacatttatggaatcagtcgttggcaccttcaatacttcatgatttttgtcgagtttacttcatgaggaggtcagcccattggctcccatctgaaccactttgcctctgaaacttaattacatccagaaagaaggacacttgtatgctagtctatggtcagttgaggaatatgactgtttttatatgcacatgtaacccaaatgtccaatataaattggcttattttttaaaataattttaaaagttgggaaaagtgttattatttggcatgcttaaatattgaataagtattcttcatcagcatttaataaatgtataggcagatgtaaggtaatttctgtgtattttgagataatgtcaaaatcatgaatatttcaaaataaactggggagttataaaaatacaactagagatat

SEQ ID NO: 4283 - DNA, 3927 bp, Homo sapiens
aggcgccgcagccgcgaggaggagccgccgccgccgcgcccgaggccccgccgcccgcggcctctgtcggcccgcgccccgctcgccccgtcgcccctcgcctccccgcagagtcccctcgcggcagcagatgtgtgtggggtcagcccacggcggggactatggtgaaattcccggcgctcacgcactactggcccctgatccggttcttggtgcccctgggcatcaccaacatagccatcgacttcggggagcaggccttgaaccggggcattgctgctgtcaaggaggatgcagtcgagatgctggccagctacgggctggcgtactccctcatgaagttcttcacgggtcccatgagtgacttcaaaaatgtgggcctggtgtttgtgaacagcaagagagacaggaccaaagccgtcctgtgtatggtggtggcaggggccatcgctgccgtctttcacacactgatagcttatagtgatttaggatactacattatcaataaactgcaccatgtggacgagtcggtggggagcaagacgagaagggccttcctgtacctcgccgcctttcctttcatggacgcaatggcatggacccatgctggcattctcttaaaacacaaatacagtttcctggtgggatgtgcctcaatctcagatgtcatagctcaggttgtttttgtagccattttgcttcacagtcacctggaatgccgggagcccctgctcatcccgatcctctccttgtacatgggcgcacttgtgcgctgcaccaccctgtgcctgggctactacaagaacattcacgacatcatccctgacagaagtggcccggagctggggggagatgcaacaataagaaagatgctgagcttctggtggcctttggctctaattctggccacacagagaatcagtcggcctattgtcaacctctttgtttcccgggaccttggtggcagttctgcagccacagaggcagtggcgattttgacagccacataccctgtgggtcacatgccatacggctggttgacggaaatccgtgctgtgtatcctgctttcgacaagaataaccccagcaacaaactggtgagcacgagcaacacagtcacggcagcccacatcaagaagttcaccttcgtctgcatggctctgtcactcacgctctgtttcgtgatgttttggacacccaacgtgtctgagaaaatcttgatagacatcatcggagtggactttgcctttgcagaactctgtgttgttcctttgcggatcttctccttcttcccagttccagtcacagtgagggcgcatctcaccgggtggctgatgacactgaagaaaaccttcgtccttgcccccagctctgtgctgcggatcatcgtcctcatcgccagcctcgtggtcctaccctacctgggggtgcacggtgcgaccctgggcgtgggctccctcctggcgggctttgtgggagaatccaccatggtcgccatcgctgcgtgctatgtctaccggaagcagaaaaagaagatggagaatgagtcggccacggagggggaagactctgccatgacagacatgcctccgacagaggaggtgacagacatcgtggaaatgagagaggagaatgaataaggcacgggacgccatgggcactgcagggacagtcagtcaggatgacacttcggcatcatctcttccctctcccatcgtattttgttcccttttttttgttttgttttggtaatgaaagaggccttgatttaaaggtttcgtgtcaattctctagcatactgggtatgctcacactgacggggggacctagtgaatggtctttactgttgctatgtaaaaacaaacgaaacaactgacttcatacccctgcctcacgaaaacccaaaagacacagctgcctcacggttgacgttgtgtcctcctcccctggacaatctcctcttggaaccaaaggactgcagctgtgccatcgcgcctcggtcaccctgcacagcaggccacagactctcctgtcccccttcatcgctcttaagaatcaacaggttaaaactcggcttcctttgatttgcttcccagtcacatggccgtacaaagagatggagccccggtggcctcttaaatttcccttccgccacggagttcgaaaccatctactccacacatgcaggaggcgggtggcacgctgcagcccggagtccccgttcacactgaggaacggagacctgtgaccacagcaggctgacagatggacagaatctcccgtagaaaggtttggtttgaaatgccccgggggcagcaaactgacatggttgaatgatagcatttcactctgcgttctcctagatctgagcaagctgtcagttctcacccccaccgtgtatatacatgagctaacttttttaaattgtcacaaaagcgcatctccagattccagaccctgccgcatgacttttcctgaaggcttgcttttccctcgcctttcctgaaggtcgcattagagcgagtcacatggagcatcctaactttgcattttagtttttacagtgaactgaagctttaagtctcatccagcattctaatgccaggttgctgtagggtaacttttgaagtagatatattacctggttctgctatccttagtcataactctgcggtacaggtaattgagaatgtactacggtacttccctcccacaccatacgataaagcaagacattttataacgataccagagtcactatgtggtcctccctgaaataacgcattcgaaatccatgcagtgcagtatatttttctaagttttggaaagcaggttttttcctttaaaaaaattatagacacggttcactaaattgatttagtcagaattcctagactgaaagaacctaaaaaaaaaaatattttaaagatataaatatatgctgtatatgttatgtaatttattttaggctataatacatttcctattttcgcattttcaataaaatgtctctaatacaatacggtgattgcttgtgtgctcaacatacctgcagttgaaacgtattgtatcaatgaacattgtaccttattggcagcagttttataaagtccgtcatttgcatttgaatgtaaggctcagtaaatgacagaactatttttcattatgggtaactggggaataaatgggtcactggagtaggaatagaagtgcaagctggaaaggcaaaaatgagaaagaaaaaggcaggccctttgtgtctaccgttttcagtgctgtgtgatcatattgttcctcacagcaaaaaagaatgcaagggcataatgttagctgtgaacatgccagggttgcattcacattcctgggtacccagtgctgatggggtgtgcccacgtggggacatgtccttggcgtgcttcctcagagtggcttttcctccattaatacatatatgagtactgaaaaattaagttgcatagctgctttgcagtggtttcagaggcagatctgagaagattaaaaaaaaatctcaatgtatcagctttttttaaaggacattactagaaaattaaacagtattttttaacatgtgtgactttcatgcttctggggttggagcttaaagatccaaactgagaaagcaggccgggcatggtggctcatgcctgtaatcccaacactttgggaggccaaggagggtggatcacttaaggtcaggagtttgagaccagcctggccaacatggcaaaaccctgtctctactaaaaacataaaaattagctgggggtggtagcacatacctgtaatcccagctactcaggaggctgaggcaggagaatttgcttgatcctgggaggcagaggttgtagtgagccgagatcgcgccatcgcactccagcctgggtgacaagagcaaaactccatctc

SEQ ID NO: 4284 - DNA, 7205 bp, Homo sapiens
gccccagcactcgccggcggcagtgaaaggacgcgccggagccggataacagaaagtaacgtgaaggaattcaggtgactcagacatggaggagagaagacctcatctggatgccaggcccaggaattcccataccaaccacagaggccctgtggatggagagttaccaccaagagctagaaatcaggccaataacccaccagccaatgctctccgaggaggagccagccaccctggaaggcatcctagggccaacaaccatcctgctgcttactggcagagggaagagagatttagggccatgggcaggaacccacatcaaggaaggaggaaccaggaggggcatgccagcgacgaagctagagaccaaagacatgaccaggagaatgacaccaggtggagaaatggcaaccaggactgtaggaaccgcagaccaccatggtccaatgacaacttccagcagtggcggactccccaccagaagcctacagaacagccacagcaggcgaagaaactgggctacaagttcttagaaagtcttctgcagaaagacccttctgaggtggtcatcacacttgccacaagtttagggctgaaagagctcctttctcattcttccatgaaatctaacttccttgagctcatctgtcaggttcttcggaaggcttgtagctccaaaatggatcgccagagtgttctccatgtactgggcatattgaaaaactccaaatttctcaaagtctgcctgcctgcttatgtggtagggatgatcactgaacccatccctgacatccgaaaccagtatccagagcacataagcaacatcatctccctcctccaggaccttgtaagtgtcttccctgccagctctgtgcaggaaacttccatgctggtttccctcctgccaacctctcttaatgctctgagagcctctggtgttgacatagaagaggaaacggagaagaacctggaaaaggtacagactatcattgaacatctgcaggaaaagaggcgagagggcactttgagagtggatacctacactctagtgcagcctgaggcagaagaccatgttgagagctaccgaaccatgcccatttaccctacctacaatgaagtgcacttggatgagaggcccttccttcgccccaatatcatttctggaaaatacgacagcactgctatctatctggatacccacttccggctcctgcgagaagatttcgtcagacctttacgggaaggtattttggaacttctccaaagctttgaagaccagggcctgaggaagagaaagtttgatgacatccgaatctactttgacaccaggattatcacccccatgtgttcatcatcaggcatagtctacaaggtgcagtttgacacaaaaccactgaagtttgttcgctggcagaattccaaacgattgctctatgggtctttggtatgcatgtccaaggacaacttcgagacatttctttttgccaccgtatctaacagggagcaggaagatctctgccgaggaattgtccagctctgcttcaatgagcaaagccaacagctgctagcagaggtccagccctctgactctttcctcatggtagagacaactgcatactttgaggcctacaggcacgtcctggaaggactccaggaggtccaggaggaagatgttcccttccagaggaatatcgtggagtgtaactctcatgtgaaggagccaaggtacttgctaatggggggcagatacgactttacccccttaatagagaatccttcagccactggggaatttctaagaaatgtcgagggtttgagacatcccagaattaatgtcttagatcctggccagtggccctcaaaagaagccctgaagctggatgactcccagatggaagccttgcagtttgctctcacaagggaactggctattattcaaggacctcctggaacaggcaaaacctatgtgggtctaaaaattgttcaggccctcctaaccaacgagtctgtttggcaaattagcctccagaagttccccatcttggttgtgtgttatactaatcatgctttggaccagtttctggaaggcatctacaattgtcagaagaccagcattgtgcgggtgggtggaaggagcaacagtgaaatcctgaagcagttcaccctaagggagctgaggaacaagcgggaattccgccgcaacctccccatgcacctccgaagggcctacatgagtatcatgacacagatgaaggagtcagagcaagagcttcatgaaggagccaagaccctggagtgcaccatgcgtggtgtcctacgggaacagtacctgcagaagtacatctcaccccagcactgggaaagtctcatgaatggaccagtgcaggatagtgaatggatttgcttccagcactggaagcattccatgatgctggagtggctaggtcttggtgtcggttctttcacgcaaagtgtttctccagcaggacctgagaatacagcccaggcagaaggggatgaggaggaagaaggggaggaggagagttcgctgatagagatcgcagaggaagctgacctgattcaagcagaccgggtgattgaggaggaagaggtggtgaggccccagcggcggaagaaggaagagagtggagcagaccaggagttggctaaaatgcttctggccatgaggctagaccattgtggcactgggacagcagctggacaggagcaagccacaggagagtggcagacccagcgcaaccagaaaaagaaaatgaaaaaaagagtgaaggatgagcttcgcaaactgaacaccatgactgcagccgaggccaacgagatcgaggatgtttggcagctggacctcagttctcgctggcagctttataggctctggctacagttgtaccaggctgacacccgccggaagatcctcagctatgaacgccagtaccgcacatcagcagaaagaatggccgagctgagactccaggaagacctgcacattcttaaagatgcccaggttgtaggaatgacaaccacaggtgctgccaaataccgccagatcctacagaaggtggagccgaggattgtcatagtggaagaagctgcggaagtccttgaggcccataccattgccacattgagcaaagcttgccagcacctcattttgattggggaccaccagcagctgcgccccagtgccaacgtgtatgatctggccaagaacttcaaccttgaggtgtccctttttgaacggctagtgaaagtaaacattccctttgtccgtctgaattaccagcaccgtatgtgccctgaaattgcccgccttttgaccccccacatttaccaggatctggagaatcatccatctgttcttaagtatgagaagattaagggggtgtcttccaaccttttctttgtagaacacaactttcctgaacaggaaatccaagagggcaaaagccatcagaaccagcatgaggctcactttgtggtagagctgtgcaagtacttcctgtgccaggaatacctgccttcccagatcaccatcctcactacctataccgggcagctcttctgcctgcgcaaactgatgcctgccaagacatttgctggcgtcagggtccatgttgtggacaaataccaaggggaagagaatgacatcatcctcctctcgctagtgcggagcaaccaagaaggcaaggtgggttttctgcagatatccaaccgcatctgtgtggccttgtcccgagccaagaagggaatgtactgcatcggaaacatgcagatgctggccaaggtgcccctgtggagcaagatcattcatacacttcgagagaacaatcaaataggccccatgctccggctctgctgccagaaccaccctgaaacccacaccttagtatccaaagcttctgacttccaaaaagtacccgaaggaggctgcagcctgccctgcgagttccgcctgggctgtgggcatgtctgcacccgtgcctgccacccttatgactcttcacacaaggagttccaatgcatgaagccatgccagaaggtcatctgtcaggaagggcaccggtgtccccttgtttgcttccaggagtgtcagccttgtcaggtgaaggtgcccaaaaccattcctcggtgcggccatgaacaaatggtcccttgttccgtgcctgagtcagatttctgctgccaggagccttgctccaagtctctgagatgtgggcacagatgcagccacccatgtggtgaggactgtgtgcagctgtgttcagaaatggtcaccataaaactcaagtgtgggcacagtcaaccggtaaaatgtggtcatgtggaaggcctcctgtatggtggtctgctagtcaagtgtaccacaaagtgtggcactatcttggactgcgggcatccttgcccaggctcctgccacagctgcttcgaagggcgtttccatgaacgctgtcagcagccctgcaagcgcctgcttatctgctcacacaagtgccaggaaccatgcattggtgagtgcccaccctgccagcggacctgtcagaaccgctgtgtccacagccagtgcaagaagaaatgtggggagctgtgtagtccctgcgtggaaccctgtgtctggcgctgccagcactaccagtgcaccaaactctgctctgagccctgcaaccgacccccatgctatgtgccttgtactaagctgctagtttgtggccacccctgcattggtctctgtggggagccatgccccaagaaatgccggatctgccacatggatgaggtcacccaaatattctttggctttgaggatgagcctgatgcccgctttgtgcagctggaagactgcagccacatctttgaggtgcaagccctagaccgctacatgaatgaacagaaggatgatgaagtcgccatcagattgaaagtctgccctatctgccaggtgcccatccgcaaaaacctgaggtatggaactagcataaaacagcggctagaagagattgaaatcatcaaggaaaagatccagggctcagcaggggaaatagcaaccagccaggaacggcttaaggccctgctggagaggaagagcctcctccaccagctgcttcctgaagacttcctgatgttaaaggagaagctggcccagaaaaatctgtcagtgaaggacctgggtctggttgagaattacatcagcttctatgaccacctggccagcctgtgggattccctgaaaaagatgcatgtcttagaagagaaaagagtgaggactcgactagaacaggtccatgagtggctggccaagaagcgcttgagcttcactagccaggaactaagtgacctccgaagtgaaatccagaggctcacatacctggtgaaccttctgacccgctacaagatagcagagaagaaggtgaaagatagcatagcagtagaggtctatagtgtccagaatatccttgagaaaacatgtaagttcacccaagaggatgaacaacttgtgcaggaaaagatggaagctctgaaagccacccttccctgctctggcctgggcatctcagaggaagagcgagtgcagattgtcagtgccataggttatcctcgtggtcactggttcaagtgccgcaatggccatatctatgtgattggcgattgtgggggagccatggagaggggcacgtgtcctgactgtaaggaagtgattggtggcacaaatcatactctggaaagaagcaaccagcttgcttctgaaatggatggagcccagcatgctgcctggtctgacacggccaacaacctgatgaactttgaggagatccaggggatgatgtaggaagatggtacaccactgccttttgccctcgccactgaatgactggggccagctccctaatgaaggaactgaagtttgttttttattatcatcctttttaggctgggcgcagtggcttacgcctgtaatcccagcactttgggaggccgaggcaggcggatcacgaggtcaggagttcgagaccagcctgaccaacatggcgaaaccccgtctctactaaaaatacaaaaattagctgggcgttatggcgggcgcctgtaatcccagctacttgggaggctgaggcagaagaatcgcttaaacccaggaggcggaggttgcagtgagctgagatcatgccattgcactccagtctgggcgacaggagcaagactctgtctcaaaaaaaaaaaaatcattctttttagtcttagcacctacttaaggatccacttttagggctcacccacatttgtttctagatttacccctgcgctagagtaagcactttatctccagaactgagagcaaagttaacaaatctcaccccttctctcctgcaaattagtggacagactccctggaacatgtttggggcttccacctagggccacctagtggtatctctgggtctttacttggtcagatgtttattctacattgttccccaggaacagagtatgagctcattgatgcagaccgattctaattgccaggccctaatttgcagactaactctcataataaacagaggcccatagttgtttatgaactgcttatcccttaaaggagcacaagaacccctccctgccctccttgggcaccctgcctccaggagatggaggcacgtgataagacaaaagactgcaccaactcaccctgacacagttacatagtcactgagagtggggaagatgggacagcccacatgctgcataagatgggccttatgcagcaggcccaggtcgtcattaaggagtgacccctttcctgtaacctgcactttgggatggtagaagtttctttacctgctgacaggtttggtggcactgctggttacccctgggccctgaatggagctaaaatcacatttggtaccagcagcacctatcccaagtgtgatccttcatcccaacactccctcttggagctgttccctgggtagagctagcatgccagcagcttctgcaggctccaaacccaggccagaagccagacccaggcctgctgcctgcatctgcattccctccttccagtgttccttagaacagacatttaggtatctcaggtcctttctaagtgtccctttcctatgtatgcatttcctttttttgtctttactatgcactttagcttataaagccaattaaaaacaatgattgag

SEQ ID NO: 4285 - DNA, 2222 bp, Homo sapiens
gctgggcggtcattgggcggcgtgatctcgccgcggttccgcggccctgccgccgccgccgccagcagagcgcaccgggccgatcgggcgagtggccatggcgggcgccgagaactggccgggccagcagctggagctggacgaggacgaggcgtcttgttgccgctggggcgcgcagcacgccggggcccgcgagctggctgcgctctactcgccaggcaagcgcctccaggagtggtgctctgtgatcctgtgcttcagcctcatcgcccacaacctggtccatctcctgctgctggcccgctgggaggacacacccctcgtcatactcggtgttgttgcaggggctctcattgctgacttcttgtctggcctggtacactggggtgctgacacatggggctctgtggagctgcccattgctttcatccgacccttccgggagcaccacattgacccgacagctatcacacggcacgacttcatcgagaccaacggggacaactgcctggtgacactgctgccgctgctaaacatggcctacaagttccgcacccacagccctgaagccctggagcagctatacccctgggagtgcttcgtcttctgcctgatcatcttcggcaccttcaccaaccagatccacaagtggtcgcacacgtactttgggctgccacgctgggtcaccctcctgcaggactggcatgtcatcctgccacgtaaacaccatcgcatccaccacgtctcaccccacgagacctacttctgcatcaccacaggctggctcaactaccctctggagaagataggcttctggcgacgcctggaggacctcatccagggcctgacgggcgagaagcctcgggcagatgacatgaaatgggcccagaagatcaaataacttctccgagcctgctacctggttgccaaccttccctagcccccaaaccgaagccatctgccaaattccagcctctttgagctggcccctccagatggagaggacatctcctgggctgggcccaggtaccccagcccacccctcatgacacagaatacttgagccactgatttttcatttcttttttttttttttcctcggcccctcctcagccacctgagttgctctatctgcaagcctgactctgccagcctcccctggtagagaggaggtttacccactccctgcacgcctgccgtccctgccccgctgggcagcccttcagtgtggctggcgttggggccagtgagttgcctctttccctccttgtctggccccagtggtctggggagcccccaggcacacctaagcgtcgtggagcattgttctgccacagccctgcatactgaccccgggaggctgggcaggtggacagccccagccaccaccttcagcctagcctgtcccccaaggatggtgaagctcagcaggggtctgagggtagccggccagaagaggctggaacctcctgctcaagtctagacccctacttctctgctgcccccaccctgccagagctgatgtttccaataccaagatgtcttcacagggcacagcccctgcagagcatcttggtcatttggaagaggacacggtatcccctctggccagagtatgtcagagaaggaagagtagggcttttttgttttgtttttttttaaaggtgcttgcttgtttaatgtaaataatagaaagccttaatatcttttctgtaacacggagtaatattttaatgtcatgttttggatgtacataatatatttataacaaagcagcaagagtctacttaaccttggctgcctcgtggtgtttcctggctgggtggggtggggggtatcaaggagcctgggacgtgaggccccactctcgccccattcccagctccccccaaccctggcctcaggatgagagctgtcacctgagacagtgaattaatgttgacatctgctccaaagccttttggaggggattgggtgaggacagtggtctttcctgttgatcatgatgataaagtaatgatggctgatccctatttgtgacttccttcagcaaatattcactggcacctggtgtgtgccaggctctgtcctgtacacaggtacagcggtgaaagaaccaacaaagacctatcctggtggagctgacctcctgggaaaagagtcaataaacaaataaatgcacatggaaattcaggtggtgatttgtgaagaaaatcaaacag

SEQ ID NO: 4286 - DNA, 2384 bp, Homo sapiens
atcaaacagaaatgactattgaaggcttgcagcccacagtggagtatgtggttagtgtctatgctcagaatccaagcggagagagtcagcctctggttcagactgcagtaaccaacattgatcgccctaaaggactggcattcactgatgtggatgtcgattccatcaaaattgcttgggaaagcccacaggggcaagtttccaggtacagggtgacctactcgagccctgaggatggaatccatgagctattccctgcacctgatggtgaagaagacactgcagagctgcaaggcctcagaccgggttctgagtacacagtcagtgtggttgccttgcacgatgatatggagagccagcccctgattggaacccagtccacagctattcctgcaccaactgacctgaagttcactcaggtcacacccacaagcctgagcgcccagtggacaccacccaatgttcagctcactggatatcgagtgcgggtgacccccaaggagaagaccggaccaatgaaagaaatcaaccttgctcctgacagctcatccgtggttgtatcaggacttatggtggccaccaaatatgaagtgagtgtctatgctcttaaggacactttgacaagcagaccagctcagggagttgtcaccactctggagaatgtcagcccaccaagaagggctcgtgtgacagatgctactgagaccaccatcaccattagctggagaaccaagactgagacgatcactggcttccaagttgatgccgttccagccaatggccagactccaatccagagaaccatcaagccagatgtcagaagctacaccatcacaggtttacaaccaggcactgactacaagatctacctgtacaccttgaatgacaatgctcggagctcccctgtggtcatcgacgcctccactgccattgatgcaccatccaacctgcgtttcctggccaccacacccaattccttgctggtatcatggcagccgccacgtgccaggattaccggctacatcatcaagtatgagaagcctgggtctcctcccagagaagtggtccctcggccccgccctggtgtcacagaggctactattactggcctggaaccgggaaccgaatatacaatttatgtcattgccctgaagaataatcagaagagcgagcccctgattggaaggaaaaagacagacgagcttccccaactggtaacccttccacaccccaatcttcatggaccagagatcttggatgttccttccacagttcaaaagacccctttcgtcacccaccctgggtatgacactggaaatggtattcagcttcctggcacttctggtcagcaacccagtgttgggcaacaaatgatctttgaggaacatggttttaggcggaccacaccgcccacaacggccacccccataaggcataggccaagaccatacccgccgaatgtaggtgaggaaatccaaattggtcacatccccagggaagatgtagactatcacctgtacccacacggtccgggactcaatccaaatgcctctacaggacaagaagctctctctcagacaaccatctcatgggccccattccaggacacttctgagtacatcatttcatgtcatcctgttggcactgatgaagaacccttacagttcagggttcctggaacttctaccagtgccactctgacaggcctcaccagaggtgccacctacaacgtcatagtggaggcactgaaagaccagcagaggcataaggttcgggaagaggttgttaccgtgggcaactctgtcaacgaaggcttgaaccaacctacggatgactcgtgctttgacccctacacagtttcccattatgccgttggagatgagtgggaacgaatgtctgaatcaggctttaaactgttgtgccagtgcttaggctttggaagtggtcatttcagatgtgattcatctagatggtgccatgacaatggtgtgaactacaagattggagagaagtgggaccgtcagggagaaaatggccagatgatgagctgcacatgtcttgggaacggaaaaggagaattcaagtgtgaccctcatgaggcaacgtgttatgatgatgggaagacataccacgtaggagaacagtggcagaaggaatatctcggtgccatttgctcctgcacatgctttggaggccagcggggctggcgctgtgacaactgccgcagacctgggggtgaacccagtcccgaaggcactactggccagtcctacaaccagtattctcagagataccatcagagaacaaacactaatgttaattgcccaattgagtgcttcatgcctttagatgtacaggctgacagagaagattcccgagagtaa

SEQ ID NO: 4287 - DNA, 1837 bp, Homo sapiens
taatataaaaaagaaagtgactgtattatttagggctgcattttagttgtaagaaaaaagtccaactcaagcaaaaatggcccacacaatggaacagtcccaggacccaccggcttcaggggctgctccagcaatggcgcccggactccctcttgctccgcgtgccttcccatgcactggcttcgtgcttcagcggggtctctgctgatggtgccattgatgactgacctccatgagcttgctttaccccctgccagcttaagaacagtagtgaaagagaacatgtgtgtcctcccatttccagtaaaaacttcaggcaggagcctcactggctcagcttggtcccgtttccatctcccatgccatctccggccaggtgacaggctaccatgtcactgcctagggaagtttaggaagagagtggcaaagtggtgcattagaaagaacatggccaggtcaccccacctcctgggcggcaggcccaactccaccagtggtccactgtgtgacttccctgctccctctaagcaagtcactcctctcctctgggtctctgtttccttacctataaaatgagaacgtttcttcatgtgatctcaagtcccttttaaaatcgctaggattctttgaaaaccttttctatcatctagtgcagagaacttgttgaggaagttgggattggaatgagcctcagcagatgggcaaggtttgaataggaagagaagagacatttcaggagaaagaaacaacatagagagacagatgtaggtataagatatggtaataagccaaaatgtattaagagttataaatgcatgaaatcatcatcaaagcttgcttagtgattaactgcttatattttgccagtgcatatgatgtgacatttttctttaactcaaacactaaattacgatgtcctcaggttatcataaaccccatttgacttcatgcctctactctctcagggctggcgctgtgacaactgccgcagacctgggggtgaacccagtcccgaaggcactactggccagtcctacaaccagtattctcagagataccatcagagaacaaacactaatgttaattgcccaattgagtgcttcatgcctttagatgtacaggctgacagagaagattcccgagagtaaatcatctttccaatccagaggaacaagcatgtctctctgccaagatccatctaaactggagtgatgttagcagacccagcttagagttcttctttctttcttaagccctttgctctggaggaagttctccagcttcagctcaactcacagcttctccaagcatcaccctgggagtttcctgagggttttctcataaatgagggctgcacattgcctgttctgcttcgaagtattcaataccgctcagtattttaaatgaagtgattctaagatttggtttgggatcaataggaaagcatatgcagccaaccaagatgcaaatgttttgaaatgatatgaccaaaattttaagtaggaaagtcacccaaacacttctgctttcacttaagtgtctggcccgcaatactgtaggaacaagcatgatcttgttactgtgatattttaaatatccacagtactcactttttccaaatgatcctagtaattgcctagaaatatctttctcttacctgttatttatcaatttttcccagtatttttatacggaaaaaattgtattgaaaacacttagtatgcagttgataagaggaatttggtataattatggtgggtgattattttttatactgtatgtgccaaagctttactactgtggaaagacaactgttttaataaaagatttacattcc

SEQ ID NO: 4288 - DNA, 2127 bp, Homo sapiens
caaacttggtggcaacttgcctcccggtgcgggcgtctctcccccaccgtctcaacatgcttaggggtccggggcccgggctgctgctgctggccgtccagtgcctggggacagcggtgccctccacgggagcctcgaagagcaagaggcaggctcagcaaatggttcagccccagtccccggtggctgtcagtcaaagcaagcccggttgttatgacaatggaaaacactatcagataaatcaacagtgggagcggacctacctaggcaatgcgttggtttgtacttgttatggaggaagccgaggttttaactgcgagagtaaacctgaagctgaagagacttgctttgacaagtacactgggaacacttaccgagtgggtgacacttatgagcgtcctaaagactccatgatctgggactgtacctgcatcggggctgggcgagggagaataagctgtaccatcgcaaaccgctgccatgaagggggtcagtcctacaagattggtgacacctggaggagaccacatgagactggtggttacatgttagagtgtgtgtgtcttggtaatggaaaaggagaatggacctgcaagcccatagctgagaagtgttttgatcatgctgctgggacttcctatgtggtcggagaaacgtgggagaagccctaccaaggctggatgatggtagattgtacttgcctgggagaaggcagcggacgcatcacttgcacttctagaaatagatgcaacgatcaggacacaaggacatcctatagaattggagacacctggagcaagaaggataatcgaggaaacctgctccagtgcatctgcacaggcaacggccgaggagagtggaagtgtgagaggcacacctctgtgcagaccacatcgagcggatctggccccttcaccgatgttcgtgcagctgtttaccaaccgcagcctcacccccagcctcctccctatggccactgtgtcacagacagtggtgtggtctactctgtggggatgcagtggctgaagacacaaggaaataagcaaatgctttgcacgtgcctgggcaacggagtcagctgccaagagacagctgtaacccagacttacggtggcaactcaaatggagagccatgtgtcttaccattcacctacaatggcaggacgtgcagcacaacttcgaattatgagcaggaccagaaatactctttctgcacagaccacactgttttggttcagactcgaggaggaaattccaatggtgccttgtgccacttccccttcctatacaacaaccacaattacactgattgcacttctgagggcagaagagacaacatgaagtggtgtgggaccacacagaactatgatgccgaccagaagtttgggttctgccccatggctgcccacgaggaaatctgcacaaccaatgaaggggtcatgtaccgcattggagatcagtgggataagcagcatgacatgggtcacatgatgaggtgcacgtgtgttgggaatggtcgtggggaatggacatgcattgcctactcgcagcttcgagatcagtgcattgttgatgacatcacttacaatgtgaacgacacattccacaagcgtcatgaagaggggcacatgctgaactgtacatgcttcggtcagggtcggggcaggtggaagtgtgatcccgtcgaccaatgccaggattcagagactgggacgttttatcaaattggagattcatgggagaagtatgtgcatggtgtcagataccagtgctactgctatggccgtggcattggggagtggcattgccaacctttacagacctatccaagctcaagtggtcctgtcgaagtatttatcactgagactccgagtcagcccaactcccaccccatccagtggaatgcaccacagccatctcacatttccaagtacattctcaggtggagacctgtgagtatcccacccagaaaccttggatactgagtctcctaatcttatcaattctgatggtttctttttttcccagcttttgagccaacaactctgattaactattcctatagcatttactatatttgtttagtgaacaaacaatatgtggtcaattaaattgacttgtagactg

SEQ ID NO: 4289 - DNA, 1551 bp, Homo sapiens
aataaacaaacccgtaaactgttttatacagagacagcaaaatcttggtttattaaaggacagtgttactccagataacacgtaagtttcttcttgcttttcagagacctgctttcccctcctcccgtctcccctctcttgccttcttccttgcctctcacctgtaagatattattttatcctatgttgaagggagggggaaagtccccgtttatgaaagtcgctttctttttattcatggacttgttttaaaatgtaaattgcaacatagtaatttatttttaatttgtagttggatgtcgtggaccaaacgccagaaagtgttcccaaaacctgacgttaaattgcctgaaactttaaattgtgctttttttctcattataaaaagggaaactgtattaatcttattctatcctcttttctttctttttgttgaacatattcattgtttgtttattaataaattaccattcagtttgaatgagacctatatgtctggatactttaatagagctttaattattacgaaaaaagatttcagagataaaacactagaagttacctattctccacctaaatctctgaaaaatggagaaaccctctgactagtccatgtcaaattttactaaaagtctttttgtttagatttattttcctgcagcatcttctgcaaaatgtactatatagtcagcttgctttgaggctagtaaaaagatatttttctaaacagattggagttggcatataaacaaatacgttttctcactaatgacagtccatgattcggaaattttaagcccatgaatcagccgcggtcttaccacggtgatgcctgtgtgccgagagatgggactgtgcggccagatatgcacagataaatatttggcttgtgtattccatataaaattgcagtgcatattatacatccctgtgagccagatgctgaatagatattttcctattatttcagtcctttataaaaggaaaaataaaccagtttttaaatgtatgtatataattctcccccatttacaatccttcatgtattacatagaaggattgcttttttaaaaatatactgcgggttggaaagggatatttaatctttgagaaactattttagaaaatatgtttgtagaacaattatttttgaaaaagatttaaagcaataacaagaaggaaggcgagaggagcagaacattttggtctagggtggtttctttttaaaccattttttcttgttaatttacagttaaacctaggggacaatccggattggccctcccccttttgtaaataacccaggaaatgtaataaattcattatcttagggtgatctgccctgccaatcagactttggggagatggcgatttgattacagacgttcgggggggtggggggcttgcagtttgttttggagataatacagtttcctgctatctgccgctcctatctagaggcaacacttaagcagtaattgctgttgcttgttgtcaaaatttgatcattgttaaaggattgctgcaaataaatacactttaatttcagtc

SEQ ID NO: 4290 - DNA, 3550 bp, Homo sapiens
gctttctccatgtggcaaggctgtaactgttcacagctgtctgaaacagcagtggaccaggagcagcttggagttttaactttcattttacaaagaacaacatgtttgaatgtttcagcaggcaagttataactggcatctacttcttgttcttctagaacaccgaaaatctctcccagcactttagaaaggggaccctgactgtgttaaagaagaagtgggagaacccagggctgggagcagagtctcacacagactctctacggaacagcagcactgagattaggcacagagcagaccatcctcctgctgaagtgacaagccacgctgcttctggagccaaagctgaccaagaagaacaaatccaccccagatctagactcaggtcacctcctgaagccctcgttcagggtcgatatccccacatcaaggacggtgaggatcttaaagaccactcaacagaaagtaaaaaaatggaaaattgtctaggagaatccaggcatgaagtagaaaaatcagaaatcagtgaaaacacagatgcttcgggcaaaatagagaaatataatgttccgctgaacaggcttaagatgatgtttgagaaaggtgaaccaactcaaactaagattctccgggcccaaagccgaagtgcaagtggaaggaagatctctgaaaacagctattctctagatgacctggaaataggcccaggtcagttgtcatcttctacatttgactcggagaaaaatgagagtagacgaaatctggaacttccacgcctctcagaaacctctataaaggatcgaatggccaagtaccaggcagctgtgtccaaacaaagcagctcaaccaactatacaaatgagctgaaagccagtggtggcgaaatcaaaattcataaaatggagcaaaaggagaatgtgcccccaggtcctgaggtctgcatcacccatcaggaaggggaaaagatttctgcaaatgagaatagcctggcagtccgttccacccctgccgaagatgactccccaggtgactcccaggttaagagtgaggttcaacagcctgtccatcccaagccactaagtccagattccagagcctccagtctttctgaaagttctcctcccaaagcaatgaagaagtttcaggcacctgcaagagagacctgcgtggaatgtcagaagacagtctatccaatggagcgtctcttggccaaccagcaggtgtttcacatcagctgcttccgttgctcctattgcaacaacaaactcagtctaggaacatatgcatctttacatggaagaatctattgtaagcctcacttcaatcaactctttaaatctaagggcaactatgatgaaggctttgggcacagaccacacaaggatctatgggcaagcaaaaatgaaaacgaagagattttggagagaccagcccagcttgcaaatgcaagggagacccctcacagcccaggggtagaagatgcccctattgctaaggtgggtgtcctggctgcaagtatggaagccaaggcctcctctcagcaggagaaggaagacaagccagctgaaaccaagaagctgaggatcgcctggccaccccccactgaacttggaagttcaggaagtgccttggaggaagggatcaaaatgtcaaagcccaaatggcctcctgaagacgaaatcagcaagcccgaagttcctgaggatgtcgatctagatctgaagaagctaagacgatcttcttcactgaaggaaagaagccgcccattcactgtagcagcttcatttcaaagcacctctgtcaagagcccaaaaactgtgtccccacctatcaggaaaggctggagcatgtcagagcagagtgaagagtctgtgggtggaagagttgcagaaaggaaacaagtggaaaatgccaaggcttctaagaagaatgggaatgtgggaaaaacaacctggcaaaacaaagaatctaaaggagagacagggaagagaagtaaggaaggtcatagtttggagatggagaatgagaatcttgtagaaaatggtgcagactccgatgaagatgataacagcttcctcaaacaacaatctccacaagaacccaagtctctgaattggtcgagttttgtagacaacacctttgctgaagaattcactactcagaatcagaaatcccaggatgtggaactctgggagggagaagtggtcaaagagctctctgtggaagaacagataaagagaaatcggtattatgatgaggatgaggatgaagagtgacaaattgcaatgatgctgggccttaaattcatgttagtgttagcgagccactgccctttgtcaaaatgtgatgcacataagcaggtatcccagcatgaaatgtaatttacttggaagtaactttggaaaagaattccttcttaaaatcaaaaacaaaacaaaaaaacacaaaaaacacattctaaatactagagataactttacttaaattcttcattttagcagtgatgatatgcgtaagtgctgtaaggcttgtaactggggaaatattccacctgataatagcccagattctactgtattcccaaaaggcaatattaaggtagatagatgattagtagtatattgttacacactattttggaattagagaacatacagaaggaatttaggggcttaaacattacgactgaatgcactttagtataaagggcacagtttgtatatttttaaatgaataccaatttaattttttagtatttacctgttaagagattatttagtctttaaattttttaggttaattttcttgctgtgatatatatgaggaatttactactttatgtcctgctctctaaactacatcctgaactcgacgtcctgaggtataatacaacagagcactttttgaggcaattgaaaaaccaacctacactcttcggtgcttagagagatctgctgtctcccaaataagcttttgtatctgccagtgaatttactgtactccaaatgattgctttcttttctggtgatatctgtgcttctcataattactgaaagctgcaatattttagtaataccttcgggatcactgtcccccatcttccgtgttagagcaaagtgaagagtttaaaggaggaagaagaaagaactgtcttacaccacttgagctcagacctctaaaccctgtatttcccttatgatgtcccctttttgagacactaatttttaaatacttactagctctgaaatatattgatttttatcacagtattctcagggtgaaattaaaccaactataggcctttttcttgggatgattttctagtcttaaggtttggggacattataaacttgagtacatttgttgtacacagttgatattccaaattgtatggatgggagggagaggtgtcttaagctgtaggcttttctttgtactgcatttatagagatttagctttaatattttttagagatgtaaaacattctgctttcttagtcttacctagtctgaaacatttttattcaataaagattttaattaaaatttg

SEQ ID NO: 4291 - DNA, 5655 bp, Homo sapiens
cggcaagcaggtctaggaattcgcctggttcccacctcgcgtcccttgccttccttcctagtctacccactgtagtgccccctgcgtcccgctccctcctagccgactcagagcacaagaaggattgccacggtttccattgcagcagccgtggcgcctctgaccctttttttatatcgcggcgacggcgggctgtcgtcacgacgacgtgcggacgcagcggcgggggccttatgtggagaagtcgctgtgaagccacctataaatccatttactgaatttatggagaaggctgtaaatgatggaagtcattcagaagaactcttttgccatcttaaaactatatcagagaaagaagatttaccacggtgtaccagtgaaagtcatctcagctgcctgaagcaggacattctaaatgaaaagactgaattggaagcaacacttaaggaagcggagttggtaactcattctgtagaattgcttttgccactatttaaggacaccattgaaaagattaattttgaaaatgcgaatctttctgcattgaatttgaagatttctgaacagaaggaaatattaataaaagaattagacaccttcaaaagtgtaaaactagctttagaacatcttcttagaaagagagactacaaacaaacaggagacaatttatccagcatgttgctagaaaatctaactgataatgaaagtgaaaatactaatcttaagaagaaggtatttgaaaaggaggcccatatccaagaactttcttgtttgtttcagagtgaaaaggcaaatactttgaaagcaaaccgtttttcccaatcagtaaaagtagtacatgaacgactacagatccaaattcataaaagggaagccgagaacgataagttgaaagaatatgtaaagagcttagaaaccaagatagccaagtggaacctgcaatcaagaatgaataagaatgaggctatagtgatgaaagaagcaagtaggcaaaaaactgtagctttaaaaaaggcatctaaagtttacaaacaaaggcttgaccattttacaggagctattgaaaagcttacttcccaaattagagatcaggaagccaagttgtctgaaacaatttcagcttccaatgcctggaaaagtcattatgagaaaattgtgatagaaaaaaccgaattggaagtacagattgaaacaatgaaaaagcaaatcattaatcttttggaagatctgaagaaaatggaagaccatggaaaaaattcatgtgaagaaattcttagaaaagttcactcaattgaatatgaaaatgaaactctgaatcttgagaatacaaaattaaagcttagattcccatgtagaattactgagtcaaagaatatgaacattttgattgttcttgatatgctttgctacatttcttctgaaaagactacacttgctgctttgaaggatgaagttgtatctgttgaaaatgaactctcagaattgcaagaagtagaaaaaaaacagaaaacccttattgaaatgtataaaactcaggtacaaaagttgcaagaagcagctgaaatagtaaaaagcagatgtgaaaatttgctacataaaaataaccaaataacaaaaaccaaaaataaaaatgtagagaagatgagaggccagatggagtctcatctgaaggagttagagcgtgtctgcgattccttgacggcggcggaacggaggcttcacgagtgtcaggagagtctgcagtgctgcaaggggaagtgtgcagaccaggaacacaccattagggagcttcagggccaggttgatggaaatcacaatcttctgacaaagctttctctggaagaggaaaactgtcttattcagctgaagtgtgaaaaccttcaacaaaaattagaacagatggacgcagaaaataaagagcttgagaagaagctggcaaaccaagaagaatgtcttaagcacagcaatcttaagtttaaagagaaatctgcagagtatacagcattggccagacaactggaagctgctttagaagaaggaagacaaaaggttgctgaagaaatagagaaaatgtcatctagagagagtgctttacaaattaaaatattagatctggaaactgagcttagaaagaaaaatgaagaacaaaatcaacttgtttgcaaaatgaacagtgatccagagactccatgaaatctatttttttaattcccaagtgtctaaaaagttgaaaacctaaaagattcaagagttaaatgatttttggcatgcacaatttgattttattgccatcaaaagtttcatgacaacttagtcagaacaaaacgtcgatcacctttaatttagcacaggccttccatttatttctaaacttttttttaactcaccatttgactttctgatattgtaaaatgtgtgtgctgtttttttgtgtaattgaagcctctgaaaaaataaatgaggtgggttttgctgtaatgtccctagtacttggctaaagctagtaaaataaatagatcccattcacaattgccacaaagagaataaaatacctaggaatccaaattacaaggaatgtgaaggacctcttcaaggagaactacaaaccactgcttaaggaaataagagaggacacaaacaaatggaaaacattccatgcttatgaataagatgaaacaagatcatgaaaatggctatactccccaaagtaatttatagattcagtgctatccccatcaagctaccattgactttcttcacagaattagaaaaaactacttcaaatttcatatggaaccaaaaaagagctcacataaccaagacaatcctaagcaaaaagaacaaagctgtaggcatcacgctacctgacttcaaactatactacaaggctacagtaaccaaaatagcatggtactggtgccaaaacagatatatagaccaatggaacagaacagaggcctcagaaataactccacacatctacaaccatctgctgtttgacatacctgagaaaaacaagaaatggggaaaggattccctatttaataaatggtgttgggaaaactggctagccatatgcagaaaactgaaactggatcccttccttacaccttatacaaaaattaactcaagatggattaaagacttaagtgtaagacctaaaaccataaaaaccctagaggaaaacctaggcaataccattcaggacataggcatggacgaatacttcatgactaaaacaccaaaagtaatggcaataaaagccaagattgacaaatgggatctaattaaactaaagagcttctgcacagcaaaagaaactatcatcagagtgaacaggaaccgacagaatgggagaaaatttttgcaatctatccatctgacaaagggccaatatccagaatctacaaagaacttaaacaaatttacaagaaaaaaaaccccatcaaaaagtgtgcaaagaatatgaacagacacttctcaagagaagacatttagtcagccaaaaaacatatgaaaaaaagctcatcactggtcattcagagaaatgcaaatcaaaactacagtgagataccatgtcacaccaattagaatggtgatcattaaaaagacaggaaacaacagatgctggagaggatgtggagaaataggatgcttttacactgttggtgggagtgtaaattagttcaaccactgcggaagacagtgtggcgattcctcaaggatctagaaccagaaataccatttgacccagcaatcccattactgggtatatacccaaaggactataaatcatgctgctatagagacacatgcacacgtatatttattgtggcactattcacaatagcaaagacttggagccaacccaaatgcccatcaatgatagactgaataaagaaaatgtggcacatacaccatggaatactatgcagccataaaaaaggatgagttcatgtcctttgcagggacatggatgaagctggaaaccatcattctcagcaaactaacacaagaacagaaaaccaaacaccgcatgttctcactcataagtgggagttgaacaatgagaatacatggatacagggcagggaacatcacacaccagggcctgtcagggcgtggggggctaggggagggataacattagaaattcctaatgtagatgacgggttgatgagtgcagcaaaccaccatggcacgtgtatacctatgtaaccaacctgtacgttctgtacatgtatcccagaacttaaagtataataaaaattaaaaaaaataaagatctgatgttttgttaaacctgataagttttgtactagtaaaattctagaattctaagcatagatttaaacattgctgaaaaatgagtttgtgtgttttatgccttccaggggacagttaagtgggcagtatttatttaatatacctgcttcagccccatttgaattgtaagcactctgaaagcatgtctcatagtcgtctgtatccctggtgtctcccacagtgccctgcttacctgcaggcctttttgtattttctgtccaagtaccctaatagggtggtgcagaatggatgtacagatctgtggatgacctcagcagcttaatccaaggcacccctcgggaagcctgaaatgtctttgaagtcttatgtattatcctaaaatccattgacattttatattctaccctacaaaataagtatgtgttactatttttctttccaaattgttgagtaaaactcattgtattcatcctgtgactttgtactgcccagcctagctcattgttttttacctgcctcatttcctgagctgggcattgctcagtttcagaaggtatcaggtgtcattgaacacctgatatgaaggatgtaaaagttctctcttttctatctaggtgtctatattttaattggaggctagatgatatttgcaacctgtctttatctaaagcattgtcagtgaactcacctacttaggaattcatatgcaccttagttaaaaaaaatgtattgtggttttaaattttttcctcaaccagtgtaatatgaagaattctttttattttttaagagattctaagaaaatgttcacattatcaaaactagaattctatcaacttttaagacatttaattattttggaataaaatgtgaatttttagacagaaaatggcaaaaactagtatgaaaatatatcatgttacatgtgaaattatgacagttgttaacctattaagttaatcatgttaaatatgtaataatttggggctaaatgaatgtatattataaattatatcagtgaagatcaaccatgtgtgtgctttaattattaattttaaagagtgagctctaagaatgaacacatcagatgtgagtattattttaaaaaatcaaaaagaattatctagttattgtatatatgtttttaatattatgactctggtcctttggaatgaatgctattattgcttatctgtatttttttccttttttctttagaaagcacaacatcaggaagtgtgtttgaaagaagtacaaaatagtcttgagaagtcggaaaatcaaaatgagagtattaagaattatttacagtttcttaaaacttcttatgtaacaatgtttgaataaattgtcaaatttattttctct

SEQ ID NO: 4292 - DNA, 1584 bp, Homo sapiens
ggccatcagccccctcggcctcggctcgaggggcggggagctgcgcgcgcccctcggtccgaccgacaccctccccttcccgccgcagcccggccgcgccccgccgccgccgccgccgccatgggctgcctcgggaacagtaagaccgaggaccagcgcaacgaggagaaggcgcagcgtgaggccaacaaaaagatcgagaagcagctgcagaaggacaagcaggtctaccgggccacgcaccgcctgctgctgctgggtgctggagaatctggtaaaagcaccattgtgaagcagatgaggatcctgcatgttaatgggtttaatggagagggcggcgaagaggacccgcaggctgcaaggagcaacagcgatggtgagaaggcaaccaaagtgcaggacatcaaaaacaacctgaaagaggcgattgaaaccattgtggccgccatgagcaacctggtgccccccgtggagctggccaaccccgagaaccagttcagagtggactacatcctgagtgtgatgaacgtgcctgactttgacttccctcccgaattctatgagcatgccaaggctctgtgggaggatgaaggagtgcgtgcctgctacgaacgctccaacgagtaccagctgattgactgtgcccagtacttcctggacaagatcgacgtgatcaagcaggctgactatgtgccgagcgatcaggacctgcttcgctgccgtgtcctgacttctggaatctttgagaccaagttccaggtggacaaagtcaacttccacatgtttgacgtgggtggccagcgcgatgaacgccgcaagtggatccagtgcttcaacgatgtgactgccatcatcttcgtggtggccagcagcagctacaacatggtcatccgggaggacaaccagaccaaccgcctgcaggaggctctgaacctcttcaagagcatctggaacaacagatggctgcgcaccatctctgtgatcctgttcctcaacaagcaagatctgctcgctgagaaagtccttgctgggaaatcgaagattgaggactactttccagaatttgctcgctacactactcctgaggatgctactcccgagcccggagaggacccacgcgtgacccgggccaagtacttcattcgagatgagtttctgaggatcagcactgccagtggagatgggcgtcactactgctaccctcatttcacctgcgctgtggacactgagaacatccgccgtgtgttcaacgactgccgtgacatcattcagcgcatgcaccttcgtcagtacgagctgctctaagaagggaacccccaaatttaattaaagccttaagcacaattaattaaaagtgaaacgtaattgtacaagcagttaatcacccaccatagggcatgattaacaaagcaacctttcccttcccccgagtgattttgcgaaacccccttttcccttcagcttgcttagatgttccaaatttagaaagcttaaggcggcctacagaaaaaggaaaaaaggccacaaaagttccctctcactttcagtaaaaataaataaaacagcagcagcaaacaaataaaa

SEQ ID NO: 4293 - DNA, 1613 bp, Homo sapiens
gccggttagaagctctgctccccggcggggacactcagtcgcgtcggcaccgcggagcgggctgcgtcaggtggctggccggcgcggcgctcccctgctctctggctccgggctgcggcgcggcggctggagcgagcccctgtcccggcgcggggcggcggcgggcggccggcaggcgctgccttgcgtgtgagtgcacctcactcacatgtgctggagaatctggtaaaagcaccattgtgaagcagatgaggatcctgcatgttaatgggtttaatggagagggcggcgaagaggacccgcaggctgcaaggagcaacagcgatggtgagaaggcaaccaaagtgcaggacatcaaaaacaacctgaaagaggcgattgaaaccattgtggccgccatgagcaacctggtgccccccgtggagctggccaaccccgagaaccagttcagagtggactacatcctgagtgtgatgaacgtgcctgactttgacttccctcccgaattctatgagcatgccaaggctctgtgggaggatgaaggagtgcgtgcctgctacgaacgctccaacgagtaccagctgattgactgtgcccagtacttcctggacaagatcgacgtgatcaagcaggctgactatgtgccgagcgatcaggacctgcttcgctgccgtgtcctgacttctggaatctttgagaccaagttccaggtggacaaagtcaacttccacatgtttgacgtgggtggccagcgcgatgaacgccgcaagtggatccagtgcttcaacgatgtgactgccatcatcttcgtggtggccagcagcagctacaacatggtcatccgggaggacaaccagaccaaccgcctgcaggaggctctgaacctcttcaagagcatctggaacaacagatggctgcgcaccatctctgtgatcctgttcctcaacaagcaagatctgctcgctgagaaagtccttgctgggaaatcgaagattgaggactactttccagaatttgctcgctacactactcctgaggatgctactcccgagcccggagaggacccacgcgtgacccgggccaagtacttcattcgagatgagtttctgaggatcagcactgccagtggagatgggcgtcactactgctaccctcatttcacctgcgctgtggacactgagaacatccgccgtgtgttcaacgactgccgtgacatcattcagcgcatgcaccttcgtcagtacgagctgctctaagaagggaacccccaaatttaattaaagccttaagcacaattaattaaaagtgaaacgtaattgtacaagcagttaatcacccaccatagggcatgattaacaaagcaacctttcccttcccccgagtgattttgcgaaacccccttttcccttcagcttgcttagatgttccaaatttagaaagcttaaggcggcctacagaaaaaggaaaaaaggccacaaaagttccctctcactttcagtaaaaataaataaaacagcagcagcaaacaaataaaatgaaataaaagaaacaaatgaaataaatattgtgttgtgcagcattaaaaaaaatcaaaataaaaattaaatgtgagc

SEQ ID NO: 4294 - DNA, 7247 bp, Homo sapiens
cgtccccagccccgtcgccggcggaggcgggcgcgggcgcgtccctgtggccagtcacccggaggagttggtcgcacaattatgaaagactcggcttctgctgctagcgccggagctgagttagttctgagaaggtttccctgggcgttccttgtccggcggcctctgctgccgcctccggagacgcttcccgatagatggctacaggccgcggaggaggaggaggtggagttgctgcccttccggagtccgccccgtgaggagaatgtcccagaaatcctggatagaaagcactttgaccaagagggaatgtgtatatattataccaagttccaaggaccctcacagatgccttccaggatgtcaaatttgtcagcaactcgtcaggtgtttttgtggtcgcttggtcaagcaacatgcttgttttactgcaagtcttgccatgaaatactcagatgtgaaattgggtgaccattttaatcaggcaatagaagaatggtctgtggaaaagcatacagaacagagcccaacggatgcttatggagtcataaattttcaagggggttctcattcctacagagctaagtatgtgaggctatcatatgacaccaaacctgaagtcattctgcaacttctgcttaaagaatggcaaatggagttacccaaacttgttatctctgtacatgggggcatgcagaaatttgagcttcacccacgaatcaagcagttgcttggaaaaggtcttattaaagctgcagttacaactggagcctggattttaactggaggagtaaacacaggtgtggcaaaacatgttggagatgccctcaaagaacatgcttccagatcatctcgaaagatttgcactatcggaatagctccatggggagtgattgaaaacagaaatgatcttgttgggagagatgtggttgctccttatcaaaccttattgaaccccctgagcaaattgaatgttttgaataatctgcattcccatttcatattggtggatgatggcactgttggaaagtatggggcggaagtcagactgagaagagaacttgaaaaaactattaatcagcaaagaattcatgctaggattggccagggtgtccctgtggtggcacttatatttgagggtgggccaaatgttatcctcacagttcttgaataccttcaggaaagcccccctgttccagtagttgtgtgtgaaggaacaggcagagctgcagatctgctagcgtatattcataaacaaacagaagaaggagggaatcttcctgatgcagcagagcccgatattatttccactatcaaaaaaacatttaactttggccagaatgaagcacttcatttatttcaaacactgatggagtgcatgaaaagaaaggagcttatcactgttttccatattgggtcagatgaacatcaagatatagatgtagcaatacttactgcactgctaaaaggtactaatgcatctgcatttgaccagcttatccttacattggcatgggatagagttgacattgccaaaaatcatgtatttgtttatggacagcagtggctggttggatccttggaacaagctatgcttgatgctcttgtaatggatagagttgcatttgtaaaacttcttattgaaaatggagtaagcatgcataaattccttaccattccgagactggaagaactttacaacactaaacaaggtccaactaatccaatgctgtttcatcttgttcgagacgtcaaacagggaaatcttcctccaggatataagatcactctgattgatataggacttgttattgaatatctcatgggaggaacctacagatgcacctatactaggaaacgttttcgattaatatataatagtcttggtggaaataatcggaggtctggccgaaatacctccagcagcactcctcagttgcgaaagagtcatgaatcttttggcaatagggcagataaaaaggaaaaaatgaggcataaccatttcattaagacagcacagccctaccgaccaaagattgatacagttatggaagaaggaaagaagaaaagaaccaaagatgaaattgtagacattgatgatccagaaaccaagcgctttccttatccacttaatgaacttttaatttgggcttgccttatgaagaggcaggtcatggcccgttttttatggcaacatggtgaagaatcaatggctaaagcattagttgcctgtaagatctatcgttcaatggcatatgaagcaaagcagagtgacctggtagatgatacttcagaagaactaaaacagtattccaatgattttggtcagttggccgttgaattattagaacagtccttcagacaagatgaaaccatggctatgaaattgctcacttatgaactgaagaactggagtaattcaacctgccttaagttagcagtttcttcaagacttagaccttttgtagctcacacctgtacacaaatgttgttatctgatatgtggatgggaaggctgaatatgaggaaaaattcctggtacaaggtcatactaagcattttagttccacctgccatattgctgttagagtataaaactaaggctgaaatgtcccatatcccacaatctcaagatgctcatcagatgacaatggatgacagcgaaaacaactttcagaacataacagaagagatccccatggaagtgtttaaagaagtacggattttggatagtaatgaaggaaagaatgagatggagatacaaatgaaatcaaaaaagcttccaattacgcgaaagttttatgccttttatcatgcaccaattgtaaaattctggtttaacacgttggcatatttaggatttctgatgctttatacatttgtggttcttgtacaaatggaacagttaccttcagttcaagaatggattgttattgcttatatttttacttatgccattgagaaagtccgtgagatctttatgtctgaagctgggaaagtaaaccagaagattaaagtatggtttagtgattacttcaacatcagtgatacaattgccataatttctttcttcattggatttggactaagatttggagcaaaatggaactttgcaaatgcatatgataatcatgtttttgtggctggaagattaatttactgtcttaacataatattttggtatgtgcgtttgctagattttctagctgtaaatcaacaggcaggaccttatgtaatgatgattggaaaaatggtggccaatatgttctacattgtagtgattatggctcttgtattacttagttttggtgttcccagaaaggcaatactttatcctcatgaagcaccatcttggactcttgctaaagatatagtttttcacccatactggatgatttttggtgaagtttatgcatacgaaattgatgtgtgtgcaaatgattctgttatccctcaaatctgtggtcctgggacgtggttgactccatttcttcaagcagtctacctctttgtacagtatatcattatggttaatcttcttattgcatttttcaacaatgtgtatttacaagtgaaggcaatttccaatattgtatggaagtaccagcgttatcattttattatggcttatcatgagaaaccagttctgcctcctccacttatcattcttagccatatagtttctctgttttgctgcatatgtaagagaagaaagaaagataagacttccgatggaccaaaacttttcttaacagaagaagatcaaaagaaacttcatgattttgaagagcagtgtgttgaaatgtatttcaatgaaaaagatgacaaatttcattctgggagtgaagagagaattcgtgtcacttttgaaagagtggaacagatgtgcattcagattaaagaagttggagatcgtgtcaactacataaaaagatcattacaatcattagattctcaaattggccatttgcaagatctttcagccctgacggtagatacattaaaaacactcactgcccagaaagcgtcggaagctagcaaagttcataatgaaatcacacgagaactgagcatttccaaacacttggctcaaaaccttattgatgatggtcctgtaagaccttctgtatggaaaaagcatggtgttgtaaatacacttagctcctctcttcctcaaggtgatcttgaaagtaataatccttttcattgtaatattttaatgaaagatgacaaagatccccagtgtaatatatttggtcaagacttacctgcagtaccccagagaaaagaatttaattttccagaggctggttcctcttctggtgccttattcccaagtgctgtttcccctccagaactgcgacagagactacatggggtagaactcttaaaaatatttaataaaaatcaaaaattaggcagttcatctactagcataccacatctgtcatccccaccaaccaaattttttgttagtacaccatctcagccaagttgcaaaagccacttggaaactggaaccaaagatcaagaaactgtttgctctaaagctacagaaggagataatacagaatttggagcatttgtaggacacagagatagcatggatttacagaggtttaaagaaacatcaaacaagataaaaatactatccaataacaatacttctgaaaacactttgaaacgagtgagttctcttgctggatttactgactgtcacagaacttccattcctgttcattcaaaacaagcagaaaaaatcagtagaaggccatctaccgaagacactcatgaagtagattccaaagcagctttaataccggattggttacaagatagaccatcaaacagagaaatgccatctgaagaaggaacattaaatggtctcacttctccatttaagccagctatggatacaaattactattattcagctgtggaaagaaataacttgatgaggttatcacagagcattccatttacacctgtgcctccaagaggggagcctgtcacagtgtatcgtttggaagagagttcacccaacatactaaataacagcatgtcttcttggtcacaactaggcctctgtgccaaaatagagtttttaagcaaagaggagatgggaggaggtttacgaagagctgtcaaagtacagtgtacctggtcagaacatgatatcctcaaatcagggcatctttatattatcaaatcttttcttccagaggtggttaatacatggtcaagtatttacaaagaagatacagttctgcatctctgtctgagagaaattcaacaacagagagcagcacaaaagcttacgtttgcctttaatcaaatgaaacccaaatccataccatattctccaaggttccttgaagttttcctgctgtattgccattcagcaggacagtggtttgctgtggaagaatgtatgactggagaatttagaaaatacaacaataataatggagatgagattattccaactaatactctggaagagatcatgctagcctttagccactggacttacgaatatacaagaggggagttactggtacttgatttgcaaggtgttggtgaaaatttgactgacccatctgtgataaaagcagaagaaaagagatcctgtgatatggtttttggcccagcaaatctaggagaagatgcaattaaaaacttcagagcaaaacatcactgtaattcttgctgtagaaagcttaaacttccagatctgaagaggaatgattatacgcctgataaaattatatttcctcaggatgagccttcagatttgaatcttcagcctggaaattccaccaaagaatcagaatcaactaattctgttcgtctgatgttataatattaatattactgaatcattggttttgcctgcacctcacagaaatgttactgtgtcacttttccctcgggaggaaattgtttggtaatatagaaaggtgtatgcaagttgaatttgctgactccagcacagttaaaaggtcaatattcttttgacctgattaatcagtcagaaagtccctataggatagagctggcagctgagaaattttaaaggtaattgataattagtatttataactttttaaagggctctttgtatagcagaggatctcatttgactttgttttgatgagggtgatgctctctcttatgtggtacaataccattaaccaaaggtaggtgtccatgcagattttattggcagctgttttattgccattcaactagggaaatgaagaaatcacgcagccttttggttaaatggcagtcaaaattttcctcagtgtatttagtgtgttcagtgatgatatcactggttcccaactagatgcttgttggccacgggaagggaaatgacttgttctaattctaggttcacagaggtatgagaagcctgaactgaagaccattttcaagagggacggtatttatgaatcagggttaggctccatatttaaagatagagccagtttttttttttaaatagaacccaaattgtgtaaaaatgttaattgggttttttaaacattgttttatcaagtcactgttaagtagaagaaagccatggtaaactgatacataacctaaattataaaagcagaaacctaactcactcgtcaagggaagttaccttttgaggaaagttaaagtacttttttccctatctgtatctatagcaacaacccagaacttacaaacttctccaaagattttattgattgttatatcaaatcagaatgtaaacatgaactcttgcatatatttaaaattgtgttggaacatttgaacatgaatgctgtttgtggtacttaagaaattaattcagttggattatcattatgtgatactggcagattgcagtgcaaccttatgccaataaaatgtaatttaacagccccagatattgttgaatattcaacaataacaagaaaagcttttcatctaagttttatgctttaattttttttctttttttttctttttcttttgtttccttggtactaattttaatttttatttggaagggagcagtataaagcttatttgtatttagtagtgtatctcatagatacagacaaggcaagagatgataagctgtttaaatagtgtttaatattgattgggggtggggagaaagaaaaagtgtattacttaaagatactatatacgttttgtatatcattaaatctttaaaagaaatgaaataaatttattgtttacag

SEQ ID NO: 4295 - DNA, 934 bp, Homo sapiens
tatttataaacacactcacagggccagatttgggccacgggccatagttgccagcccggctttaactgctggtcctcacgttagtctcactgcctcctgcagggtgggcatgtgggtgtcgtgttcacgcagccccttcctccaccccacagacacgctggtggctgtcctggagcgcgacacactgggcatccgtgaggtgcggctgttcaatgccgttgtccgctggtccgaggccgagtgtcagcggcagcagctgcaggtgacgccagagaacaggcggaaggttctgggcaaggccctgggcctcattcgcttcccgctcatgaccatcgaggagttcgctgcaggtaacagagctcgggctcaggggctggtttgggaggggagtggcacacaggtgggcatctgggtaccgaggatagtgcccccgagttcactgcggaaagcctggcagatgcctggcatatacagataggaagaaacctggcttgtgaggacgcgtccacagggccatctgttagccccggcccggctctgtccccaccgtgcacactgccagaccccgcctctcgtgtctgtccagctgttttggtggcatcttcccaggagggaagggagtccccgtctcgcgcccttgtgctacctgctggtgcaggtaccagtgtctgtgacgagctcaggagggctctgacatggccggggtggctgtcatgcgcccgagtgggccttggggtcccctgctgcagggcctgggttccagggtgacgtgaaggggcagcgctaacgatgcctcctgccctcgtggctgctcactgcctgacgccatccagctctggagcaaaacaggcctggaactttccagaaggggctgggacagagccctggggctggtgcacactcgccgtctggccttccccaggtccacgcggcc

SEQ ID NO: 4296 - DNA, 1811 bp, Homo sapiens
tgcaacggggcccccccagggcagctaggaggtcctcccctctcctctccaccaccccctgctgcccccctcccggggtggggtttgggggggtggagtggacttctgggagccggcccggggaaagcaccccctgccccatccctgcagattgggatgaagtgttcagacagccatagaggagtcgggggttgacacggcccctgcctctccccaccccacccccaccccaccgaaagccatgggagtagttcagggaaatgggggtgcagcccagccaccccccattcgggtactcaatctcaggtgtccacaagttctgcccacggtaggggctgcctggccccccagacctcgggggtagagccaggagtggggcagcgttaggatgcccggaggggctccaggtgttgcttctgagacctgggatggggagggaggggacctctgggttcttccaaagaacatttgactcagtggggtcgggagggaatcctggcttatttattttcctctgtcctcgggtgtgggggccctagctcgccctctctgggtgggtgggtgagagaggctgcaggggaggctggcaccgggcttgggcctccagtccctgccttgctgactttggccgttgcggtatcacgtgacaatcaactctcccttaacgacgactgcggctgttgggctgcgctgccctccctggcctgcaggtggggccgtggagcccatgcccgccggggttgcaggctcttccgggcctgggctgcagcctggcccggccctgcttccctggcctcccctccttctcctgggtgcttggaagaggtgggtcctggcccgtggttgaggtcttgcctcgtggactggaagcagagggctggctgtgcagcctcctggggtagctcgttttttttgcaccgggtagaatattttttcaggcacggattcctttttttctgggcccccatgggtggtccggcatcctcagggggtgtgagtgtgtgtggggggtctctgagctgaacttgggtggggtggggacttgttcctcgggggccacctttgtgtccttgtcagcggtcgtcctgctgtggcctgggttgcatttcctcttggggggggtattgaggacccccagcctggaatgagaagggtccccggttccatgtcagacccagaaaggtggatccccccactgttggctgcaggaggtttttggtacccccttttgttccagaaccgtcctgcctctcgcttggggacaggggggctttggatggcactggtgtgcacctggacccagccccggcctggcaggatccagggatgggtgcctgggatcctggggggagggaggcaggggacgcccttctggagctgggctcggagggtcctgccccatccagccctcggctctctgtgttctctgtccctagcctcaaaccctcttctggcagcgctagtgagatgccttagtctgtgggggtgggtgggggactggggccccgttttcctttgtgagtcttggttggccccagccctggcaggggcctgtctggagcaggggtaggtagggctgtgggttccagaactctataactgggcccctctccagtgtccaggggcttggagagacctgcgcccacccctccactctcccaggagtcgctgatcactgggacctggttccagccgtttgcaggggaggcggctccgagaggcgtgtgctttccgtgggtggcgcccctcccccgccctgcctggcctcatccttgtatttaattaattaaacaagcccctttttaaaccct

SEQ ID NO: 4297 - DNA, 1413 bp, Homo sapiens
aggtggagcaagatggctgtggagctgggcgtgctgctcgtccggccccggcccggaaccgggctgggtagagtgatgcggaccctcctgctggtgctgtggctggcgacgcgcggaagcgcgctctactttcacatcggagagacggagaagaagtgctttattgaggagatcccggacgagaccatggtcataggaaactaccggacgcagctgtatgacaagcagcgggaggagtaccagccggccaccccggggcttggcatgtttgtggaggtgaaggacccagaggacaaggtcatcctggcccggcagtatggctccgagggcaggttcactttcacttcccatacccctggtgagcaccagatctgtcttcactccaattccaccaagttctccctctttgctggaggcatgctgagagttcacctggacatccaggtaggtgaacatgccaatgactatgcagaaattgctgctaaagacaagttgagtgagttgcagctacgagtgcgacagctggtggaacaagtggagcagatccagaaagagcagaactaccagcggtggcgagaggagcgcttccggcagaccagtgagagcaccaaccagcgggtgctgtggtggtccattctgcagaccctcatcctcgtggccatcggtgtctggcagatgcggcacctcaagagcttctttgaagccaagaagcttgtgtagctgtcccaggcgtcacaacccatcctcccaggctgggggagaaaggacctcctggaactgacttcttctgtcaggaggactggtttccagccatacctgttctggaagggagaggggctggaggcacccacaggcacaagctgaaggcagcagcttggctaatactgagcaggtagtggggcaaattcctgccctctctctctggcctctgggccgtttggtagtaatcacccaggggctggtaaagcccctcctcttggcacctcagaatcacagtgttactgatcagggatgtgaggctgctgttgggggtggggggaggggaatgggcaggcaagccagtcttctgtcttcctttgctaacttagggttttgagcaggttggggtatggtgcctgtcatacccacctgccaccctgggaacctcactgttctctctttcagcctagacctgctgatccagggtgtgtgtgagttgagggtgggtggaggggtttgcagtgtgggaatgtggccctgcagttgacctgagctgcttcacatggttgtccattctggggcttaaagaactgggaccagaccaagtagaggccttggtgctggttggggtggggcctgcagagtcttagttactgatttcattttcaataaatgtaggtttgttacatgagtttcccaataaaaaaaaaaatg

SEQ ID NO: 4298 - DNA, 2057 bp, Homo sapiens
tgtggaaatgaagcatctctttctgttttctctttgagatggtttgagttagattgtgtctcttccaagcttgccacaccccagtgcctccagtcatctgctttcttgaaggatggccacgctggtgaattctagacaaattctaacccggggagagggctggagaatttctggtcctggttgggagatactccctgttaaaccttcggatatgctgacctagctgaggtagccaggggctatttaaaaattcaaaatctcagatctggctgtggataaacccccaaggtggtacgtgcagtacttggaggcgtgagggcagaaggtcctccccagcagtttgtacgggacacatcatctatgggatattagtaaatatccttaaggaaaggcttctgtggtcaaaaccaggttcagcaggttatttcactatggggcttctcaggacgcttaacctactcatccccctctgggctttgcaaacgaggccgccattgctttctttctgctatgtagaaatagattgaggcgtaagggtcggatgtcctttctccattcatcaggctccctcttcctgaggagctgctgtcagaacagcctggggctgctgtgttgcaggttatggtggcatatccttggcggtggaaggccccagcaaagtggacatccagacggaggacctggaagatggcacctgcaaagtctcctacttccctaccggcatggggtttatatcgtctccaccaaattcgctgacgagcacgtgcctgggagcccatttaccgtgaagatcagtggggagggaagagtcaaagagagcatcacccgcaccagtcgggccccgtccgtggccactgtcgggagcatttgtgacctgaacctgaaaatcccaggtgggcgtcggggactagtagggtggggaagccttggctccagccttcagggcagtgggtgcctttgggaaccaagtttaggcatggcccagaacacagtatccaagtcggctgtgctgaccttttcatttcacttcatttcattatgttcttctatgtttattttcacagagtctcatccaagaaaaacaaatgtttaccttgctacctttttcctcttccaaataaaaatagctttattgtgtcacatgggggaaacgtagatatgcttttagatttttagattaactatctgtcaaatagaatcatgtcagtgaaagaactggccctgccgatgccagggtctggaagtatttaagaggtggcagcccagcggcatccttctagtatttctctttcattcctgaaattagaacgagggctgtgctgcagaactcgctgggccacatctagccctttggtggtgaattgttcttcttgggccccgattagccagtcaacaggtcacacagtctgtctgaaatgtgttccaagttctttctataaagaatccttccagagggaagccactgtgagtgaaaattttgaggctcctctgcccagaagttggcatgtcctgtggaattgcacaaattctacagagaagggaaatctaaatcgtcttcagatggagcttgtgttgcgagctctggagagggggttgtctttctacactgcatctcccatccttcctaacgagtcacggagctgtcgactccgccttcttggctttagttaacaggttcttcttgtgtagtcacatcaacgtcgggtcacatgggaatgtggtaaagcctcattactgtagagttcagacatgatcacttaaaaagagctttattgggccgggcgcggtggcttactcctataatcccagcactttggggggccgaggcaggcagatcacctgaggtcaggagttcgagaccagcctggctaacatggcaaaaccctatctcttttaaaaatacaaaaataagcagggcgtggtggcgggcacctgtaatcccacctactcaggaggctgaggcacaagaattgcgtaaacctgggaggtggaggttgcagtgagctgaaattgcaccgctgcactccagcctgggcaacaaagtgagactccttctc

SEQ ID NO: 4299 - DNA, 5015 bp, Homo sapiens
gaggtcagaccggttgctttcccgggagttcggcgtttgctggggctgcagcagctgaagtgtagtgttttcttgggactggcggtctgcacttctctcccgggttccatctccccccgcccggtggtgaggccctcgaggagggctcggacgggtgtagcgatccgcgctagaggaagacgaggcccgggaacgcatgtcccccagggcaggttagggggctggaggggtcaaatcccggggtacttgtggagactctttagcgtggcttcttctctctgctgagaccccgagagctttcccagttctcctcccaggaccaccggggttcctgaagatcgggacttttctgcgcccctccaccaacagcccatctcctgtctatgaagaaagacccttcgtagaaacaacttccccgctgctgacgcgttttcccgtcccgtccccgaagtagtctactatgacctcgttgtgagcctctgaacgattttgacactttcccgaggcctagggtattatatcctaaccttactaaagaccacagaggtgcttgccattatgggaaatcagcttgctggcattgctccctcccagatcctttctgtagagagttatttttcagatattcatgactttgaatatgataaaagcctggggagtactcggttttttaaagttgctcgagccaagcaccgagaaggcctggtcgttgtgaaggtttttgcaattcaggatcccacattgcctttaaccagctataaacaagagctggaggaactgaaaatcaggcttaattctgcacagaattgtctacctttccagaaagcatcagaaaaagcatctgagaaagcagctatgctctttaggcagtatgtgcgagacaatctctatgatcgcatcagtacccgtccattcttgaataacattgagaagcgctggattgctttccagatcctgacagctgtggaccaagcacacaaatctggagttcgtcatggggacatcaagactgagaatgtgatggtcaccagttggaattgggttcttctaactgattttgccagttttaagcccacttatcttccagaagacaacccggcagatttcaattatttctttgacacatcacggaggagaacttgctatattgctcctgaacgttttgttgatggtgggatgtttgccactgagttagaatatatgagagatccttcaactccgcttgtagacttaaatagcaatcagagaacaagaggagagttgaagagagcaatggacatcttttcagcaggttgtgtgatagctgagctttttacagaaggtgtaccattatttgatctctctcaacttttggcttatagaaatggacattttttccctgaacaagtgctaaataaaattgaagatcacagtatcagagaattggtaactcagatgattcaccgtgagccagataaacgtttagaggcagaagattacttaaaacagcagcgtggcaatgcctttcctgaaatattttacacttttcttcagccctacatggcccagtttgccaaggaaacgtttctttctgcagatgagcgtattctggttatacggaaggatttgggcaacattattcacaatctctgtggacatgatctgccagaaaaagccgaaggagagcctaaggaaaatgggctggttatcttggtatctgttataacatcctgcctacagacccttaaatactgtgattccaaactagctgctttggaactgattcttcatttggctccaagattaagtgttgaaatccttttggatcgtattactccatatcttttgcatttcagcaatgactctgttcctagggtgagggctgaagccttgaggacgttgaccaaagttcttgctctcgtcaaagaggttcctcgtaatgatatcaatatttatccggaatacattctgccaggcatagcccacttagcccaagatgatgctactatcgttagactagcctatgctgaaaacatagctctgctggcagaaacagctctgagattcttggaattagtacagttaaaaaatcttaatatggaaaatgaccccaataatgaagaaatagatgaggttacacatccaaatggaaattatgacacagagctccaagccttacatgaaatggtccagcagaaagttgttactttgctaagtgaccctgaaaatattgtaaaacaaaccttgatggaaaatggaataacacggctgtgtgtattctttggacgtcagaaagccaacgatgttttgttgtcccacatgattactttcctaaatgataagaatgattggcatctacgtggagcattttttgatagtatagttggtgttgctgcctatgttggctggcaaagctcctcaattctcaagcctctgctgcaacaaggtcttagtgatgctgaggaatttgtcattgtgaaagctctttatgcccttacttgtatgtgccagttaggactgctacaaaaaccccatgtttacgaatttgccagtgatattgcccccttcctgtgtcatcccaatttatggatacgttatggtgccgtgggatttatcacagtggtagctcgtcaaataagtacagctgatgtctactgtaaactgatgccttatcttgacccatatattacccaaccaataatacagattgaaagaaaacttgttctgctcagtgttttaaaggaaccagtaagtcgttctatatttgattatgctttgaggtctaaagatattactagcttgttcagacatcttcacatgcgtcagaagaaacgaaatggttctcttcccgactgccctccgccagaggatcctgccatagcacagcttctgaagaagttgctctcacagggaatgacagaggaagaggaagacaaacttctggcactgaaagacttcatgatgaaatctaataaagcaaaggccaatatagtggaccagagccatcttcatgatagtagtcagaaaggtgtaattgacttggcagctttaggcataactgggagacaagttgatcttgttaaaaccaaacaagaaccagatgacaaacgggccagaaaacatgtaaaacaagactcaaatgtaaatgaagaatggaaaagcatgtttgggtcactggacccaccaaacatgccacaggccctacctaaagggagtgatcaggaggtgattcagactgggaaacctcctcgttccgagtcctctgctggcatttgtgtccctttgtcaacttcttcacaggttccagaagtgacaactgtccaaaataaaaaaccagtaataccggttttaagtagtacaatcttaccatccacctatcagattcgaattacaacttgtaaaactgaacttcagcaactcatccagcaaaagcgggagcagtgcaatgctgagagaatagctaagcagatgatggaaaatgctgaatgggagagtaaaccaccaccacctggatggcgtcctaaagggctgttagttgcccatcttcatgagcataaatctgctgtgaatcgaattagagtctctgatgaacactcactttttgcaacatgttcaaatgatggcacagtgaaaatctggaacagtcaaaagatggaggggaagaccaccactaccagatctattcttacatacagccgaattggaggacgagtcaagacgctcacattctgccaaggctcccactatttagccatagcatctgataatggtgctgtccagcttcttggaattgaggcttctaagctgcccaagtctcctaaaatccatcctctacaaagcagaattctagatcagaaggaggacggttgtgttgtggatatgcatcacttcaactctggagcacagtctgttcttgcctatgccactgtgaatggctctctggttggctgggaccttaggtcttcaagcaatgcgtggactttaaagcatgatttaaagtcgggcctcatcacttcctttgctgtggacatccaccaatgctggctctgcattggtacaagcagtggtaccatggcttgttgggacatgaggttccagttgccaatttcaagtcactgtcatccttccagggctcgaatcagacgcctctcaatgcaccctctgtatcagtcctgggtgattgcagctgttcagggcaacaacgaagtgtccatgtgggacatggagactggtgacagaagatttactctctgggccagcagtgcaccaccactttctgaattacagccttctcctcatagcgtccatggtatctactgtagtcctgcagatggaaatcctatcctactaacagctggctcagatatgaaaataaggttttgggacttggcttacccagaaaggtcctatgttgttgcaggaagtactagttccccatctgtgtcctactacaggaaaataattgaaggcactgaagttgtccaggaaattcagaataagcagaaagtaggaccaagtgatgacacccctcgaaggggcccagagtccctgcccgtgggacatcatgacatcatcactgatgtcgccacattccagaccacacagggcttcatcgtaactgcttctagagatgggattgtgaaggtgtggaaataaaacctactgatttgtataaattttaatagttataaatataatactataactcgagaaaaggcatttctagagaacagattcatttgcttaattttcaaaattatgtctccatattactgtttcatgactgactgactaaatgacacccaaaatggttaagatgtacttgactagtttacttatgcatctctttgcaagaatcagccagccaacaatgtctgggatttttattgtatatgttatagaggtgagaaatgtaaaatatgaaaatgaatatgtttattttgtattgaaaaagatggttgaaaagatggttgtaagctattatagtataaacacatttttgctattaaaaatgctattcaaagcagttaaactgt

SEQ ID NO: 4300 - DNA, 1018 bp, Homo sapiens
ctgggaggccgggccgggctcgggggccaccccgggggcccgggccatggatgtgcgccgtctgaaggtgaacgaacttcgcgaggagctgcagcgccgcggcctggacactcgaggcctcaaggccgagcttgctgagcggctgcaggcggcgttggaggccgaggagcctgacgacgagcgggagctcgacgccgacgacgaaccggggcgacccgggcacatcaacgaggaggccgagttacagccagccaccctacaaccagggaggttacagccagggctacacagccccaccgcctccacctccaccaccacctgcctacaactatgggagctacggcggttacaacccggccccctataccccaccgccaccccccactgcacagacctaccctcagcccagctataaccagtatcagcagtatgcccagcagtggaaccagtactatcagaaccagggccagtggccgccatactacgggaactacgactacgggagctactccgggaacacacagggtggcacaagtacacagtagccagtgtgacccagaggctcccggaggcccctgccggcttcctccaccagcgcctgcctcggcccctcctctgcccccgccagatcccgtggtgctggggatggggtcatcccagggctgcctccctccagcccactgcctcccctctgaggggcttccttcccctccatagggccaggcatttttttctggattcaaacaggcaacaatgaccttttattttctgtttgtccccacctccccagccttccacctcctgttcttcctaccttcttcctttttgactaaataatccccacctcccttgatcatacagtgaggctacagtgactgaggggagaatcccctcctgttcactctcccaaccctgctccagcccctcagcttcccagaccctcatgcagttggttgtaaattctcccaggagctgttttactgtctacttttcaggattaaaaaaaaaatcaaaactt

SEQ ID NO: 4301 - DNA, 1640 bp, Homo sapiens
atttttagtagagatggggttttgccatgttggccaggctggtcttgaactcctgacctcaggtgatccacccgcctcggcctcccaaagtgctgggattacaggcgtgagccaccgcgcccgcccttctgtctatgtctttcttattcactattccagttttcttcaccttctcccttctggaaggccactcttctgggtggaggggaccagacttcagaaggtactgacctcttcttcttgttctctttggggcacttccttcctcctagccaacttcacgttgccagatgttggggacttcctggatgaggttctgttcattgagctgcagcgggaggaagcggacaagctagtgaggcagtacaacgaggaaggccgcaaggctgggccaccccctgaaaagcgctttgacaaccgaggtggtggtggcttccggggccgcgggggtggtggtggcttccagcgctatgaaaaccgaggaccccctggaggcaaccgtggcggcttccagaaccgagggggaggcagcggtggaggaggcaactaccgaggaggtttcaaccgcagcggaggtggtggctatagccagaaccgctggggtaacaacaaccgggataacaacaactccaacaacagaggcagctacaaccgggctccccagcaacagccgccaccacagcagcctccgccaccacagccaccaccccagcagccaccgccaccacccagctacagccctgctcggaaccccccaggggccagcacctacaataagaacagcaacatccctggctcaagcgccaataccagcacccccaccgtcagcagctacagccctccacagagctttggcttttttccctccactttccagccgagttacagccagccaccctacaaccagggaggttacagccagggctacacagccccaccgcctccacctccaccaccacctgcctacaactatgggagctacggcggttacaacccggccccctataccccaccgccaccccccactgcacagacctaccctcagcccagctataaccagtatcagcagtatgcccagcagtggaaccagtactatcagaaccagggccagtggccgccatactacgggaactacgactacgggagctactccgggaacacacagggtggcacaagtacacagtagccagtgtgacccagaggctcccggaggcccctgccggcttcctccaccagcgcctgcctcggcccctcctctgcccccgccagatcccgtggtgctggggatggggtcatcccagggctgcctccctccagcccactgcctcccctctgaggggcttccttcccctccatagggccaggcatttttttctggattcaaacaggcaacaatgaccttttattttctgtttgtccccacctccccagccttccacctcctgttcttcctaccttcttcctttttgactaaataatccccacctcccttgatcatacagtgaggctacagtgactgaggggagaatcccctcctgttcactctcccaaccctgctccagcccctcagcttcccagaccctcatgcagttggttgtaaattctcccaggagctgttttactgtctacttttcaggatt

SEQ ID NO: 4302 - DNA, 1293 bp, Homo sapiens
gcggagcaagcatcacaccatggcgtatgagtgttcctctgtgtagactcaacctgcgcctcgccgtcccccattcgcacacccgatgcccgggggtcgctacggacttaaaatctccgcaccgcaccctccacctcagaaacgttcctggatccgaacactgccccctgacgacctagagagatcccggctcccagcccactgagtggcttcagcctcagtcccccgcccacttcatccctcaggcacctcccaactcctggcctctctgcacgaggcgcctgccccgggccccgcctacaggggacccagctcttcttgcagccactggaagctgatcacctggagtgaagacctcacacgaagaagtctggaagaagaggaagaggaaagaaaaggagtcagggatggcccttactcaggtacggttgacatttagggatgtggccatagaattctctcaggaggagtggaaatgcctggaccctgctcagaggatcttatacagggacgtgatgttggagaactactggaaccttgtttctctgggactgtgtcattttgatatgaatattatctccatgttggaggaagggaaagagccctggactgtgaagagctgtgtgaaaatagcaagaaaaccaagaacgccggaatgtgtcaaaggcgtggtcacagacctgctcaggagatggaaacattggctgctgctccttggcatctgctgccccaaacctcatggaagagtctccagccgtctccgcctgtcgaggtccctcggccatttcttccattctgcttttgccactttcatgggggtgtgtgataagcgagtgggttctatcttctaagattgttctcagcataaccgtaaagacacctaacaaaatccttctgtcattgatcctcagtcttacatggggtgcgtattctgtttttccaggcttcagcacagaaatacaagtactgcatgttgtcacttacatttggaatctaaaccaataaaactaatagcagcaaagagtagaatgtgggttaccacaggttggggactggagggaatagggagatgttggtcactgggtgaaaacattaggagtaaatgataggtttttgagatgacttatatggtaataggcttgtttccatcagtccatattgtatacctataacagaatatcagtttgtttcctgtaaatatatataactataatttgtcaatatagaatttttttaaaaatcatattccagttcttattgtgttggttctaaataaaaatgcttctttctctt

SEQ ID NO: 4303 - DNA, 1956 bp, Homo sapiens
cagacccggaagtggatcgtgcggagcaagcatcacaccatggcgtatgagtgttcctctgtgtagactcaacctgcgcctcgccgtcccccattcgcacacccgatgcccgggggtcgctacggacttaaaatctccgcaccgcaccctccacctcagaaacgttcctggatccgaacactgccccctgacgacctagagagatcccggctcccagcccactgagtggcttcagcctcgctggaagaagtctggaagaagaggaagaggaaagaaaaggagtcagggatggcccttactcaggtacggttgacatttagggatgtggccatagaattctctcaggaggagtggaaatgcctggaccctgctcagaggatcttatacagggacgtgatgttggagaactactggaaccttgtttctctgggactgtgtcattttgatatgaatattatctccatgttggaggaagggaaagagccctggactgtgaagagctgtgtgaaaatagcaagaaaaccaagaacgccggaatgtgtcaaaggcgtggtcacagatatccctcctaaatgtacaatcaaggatttgctaccaaaagagaagagcagtacagaagcagtattccacacagtggtgttggaaagacacgaaagccctgacattgaagacttttccttcaaggaaccccagaaaaatgtgcatgattttgagtgtcaatggagagatgacacaggaaattacaagggagtgcttatggcccagaaagaaggtaaaagagatcaacgcgacagaagagacatagaaaacaagcttatgaacaatcagcttggagtaagctttcattctcatctgcctgaactgcagctatttcaaggtgaggggaaaatgtatgaatgtaatcaagttgagaagtctaccaacaatggttcctcagtgtcaccacttcaacaaattccttctagtgtccaaacccacaggtctaaaaaatatcatgaacttaaccatttttcattactcacacaaagacgaaaagcaaacagttgtggaaaaccttataaatgtaatgaatgtggcaaggcgttcactcagaattcgaaccttacaagtcataggagaattcatagtggagagaagccttacaaatgcagtgagtgcggcaaaacctttactgttcgttcaaatctaactattcatcaggtcatccatactggagaaaaaccttacaaatgtcatgagtgtggcaaggtcttcaggcacaattcataccttgcaactcatcggcgaattcatactggagagaaaccttacaagtgtaatgagtgtggaaaagcctttagaggacattcaaacctaactacccatcagttaattcatactggagaaaaaccgttcaaatgtaatgaatgtggcaagctcttcactcaaaattcacaccttataagtcattggagaattcacactggagagaaaccttacaagtgcaatgagtgcggcaaagcctttagtgttcgttcaagcctagcaatccatcagacaatccacactggagaaaaaccttacaaatgtaatgaatgtggcaaagtctttaggtacaattcatacctcggaaggcatcggagagttcatactggtgagaaaccttacaagtgtaatgaatgtggcaaagccttcagtatgcattcaaacctagctacccatcaggtcatccatactggaacaaaacctttcaaatgcaatgaatgcagcaaggttttcactcaaaattcacaacttgcaaatcatcgaagaattcatactggagagaaaccttacaagtgtaatgagtgtgggaaagccttcagtgttcgttcaagtctgactacccatcaggcaatccattctggagagaaaccttacaaatgtattgaatgtggcaagagcttcactcaaaaatcacaccttagaagtcatcgg

SEQ ID NO: 4304 - DNA, 2230 bp, Homo sapiens
atacaagaaaaaaatcacatctttatgccaataccattctttcacaatactagaagaacagattcagagtacaattacataactggttggttacattttgcatccagtgagtaacaccatcatcttcttagtttctatatctatttatttatttatttatttatttatttatttatttatttatttttgagaccaagtcttgctgtgttgcccaggctggagtgcagtagcacgaactcggcctcttcagtagccagtaccacaggcgtgcaccaccatgcctggctaatgttttttgtatttttagtagagacaggatttcactatgttgcccaggctggtctcgaactcctggcctcaagtgatgcgtccgccgtatctcaaaataataagagctatttatgacaaacccacagccaatatcatactgaatggacaaaaactggaagcattccctttgaaaactggcgcaagacagggatgccctctctcaccactcctattcaacacagtgttggaagttctggccagggcaatcaggcaggagaaagaaataaagggtattcaattaggaaaagaggaagtcgaattatccctgtttgcagatgacatgattgtacatgtagaaaactccatcgtctcagcccaaaatctccttaagctgataagcaacttcagcaaagtctcaggatacaaaatcaatgtgcagaaatcacaagcattcctatacatcaataacagacaaagagagagccaaatcatgagtgaactcccattcacaattgctacaaagagaataaaatacctaggaatccaacttacaagggatgtgaaggacctcttcaaggagaactacaaaccactgctcaaccaagtaaaagaggaccaaacaaatggaagaacattccatgctcatggatgggaagaatcaatattgtgaaaatggccatactgcccaaggtaatttatagattcaatgccatccccatcaagctaccaatgactttcttcacagaattggaaaaaactactttaaagttcatatggaaccaaaaaagagcctgcattgccaagacaaccctaagccaaaagaataaagctgaaggcatcaccctatccaacttcaaactatactacaaggctacagtaaccaaaacagcatgctactggtaccaaaacagagatacagaccaatggaacagaacagagccctcagaaataataccacacatctacaaccatctgatctttgacaaacctgacaaaaagaagaaatggggaaaggatgccctatttaataaatggtgctgggaaaactggctagccatatgtagaaagctgaaactggatcccttccttacaccttatacaaaagttaattcaagatggattaaagacttaaatgttagacctaaaaccagaaaaaccctagaagaaaacctaggcaataccattcaggacataggcatgggcaaggacttcatgactaaaacaccaaaagcaatggcaacaaaactcaaaattgacaaatgggatctaattaaagagcttctgcacagcaaaagaaactaccatcagagtgaataggcaacctacagaatgggagaaaatttttaccatctacccatctgacaaagggctaatatccagaatctacaaagaacttaaacaaatttccaagaaaaaatcaaacaatcccatcaaaaagtgggcaaaggatatgaacagacacttctcaaaagaagacattcatgcagccaacagacacatgaaaaaacacatgcacacgtacattgactgcagcactatttacgatagcaaagacttggaaccaacccaaatcaatgatagactggattaagaaaatgtggcacatatacaccatggaatactatgcagccaaaaaaaggatgagttcatgtcttttgtagggacatggatgaagctggaaaccatcattctgagaaaactatcacaaggacagaaaaccaaacactgcatgttctcactcataagtgggaactgaacaatgagaacaccaggacacagggtggggaacatcacacactggggcctgttgtggggtggggggagaggggagggatagcattaggagatatacctaatgtaaatgacgagttaacgggtgcagcacaccaacatggcacatgtatacatacgtaacaaacctgcatgttgtgcacatgtaccctagaacttaaagtataat

SEQ ID NO: 4305 - DNA, 1689 bp, Homo sapiens
agttcctgagagaagaaccctgaggaacagacgttccctcgcggccctggcacctctaaccccagacatgctgctgctgctgctgcccctgctctgggggagggagagggcggaaggacagacaagtaaactgctgacgatgcagagttccgtgacggtgcaggaaggcctgtgtgtccatgtgccctgctccttctcctacccctcgcatggctggatttaccctggcccagtagttcatggctactggttccgggaaggggccaatacagaccaggatgctccagtggccacaaacaacccagctcgggcagtgtgggaggagactcgggaccgattccacctccttggggacccacataccaagaattgcaccctgagcatcagagatgccagaagaagtgatgcggggagatacttctttcgtatggagaaaggaagtataaaatggaattataaacatcaccggctctctgtgaatgtgacagccttgacccacaggcccaacatcctcatcccaggcaccctggagtccggctgcccccagaatctgacctgctctgtgccctgggcctgtgagcaggggacaccccctatgatctcctggatagggacctccgtgtcccccctggacccctccaccacccgctcctcggtgctcaccctcatcccacagccccaggaccatggcaccagcctcacctgtcaggtgaccttccctggggccagcgtgaccacgaacaagaccgtccatctcaacgtgtcctacccgcctcagaacttgaccatgactgtcttccaaggagacggcacagtatccacagtcttgggaaatggctcatctctgtcactcccagagggccagtctctgcgcctggtctgtgcagttgatgcagttgacagcaatccccctgccaggctgagcctgagctggagaggcctgaccctgtgcccctcacagccctcaaacccgggggtgctggagctgccttgggtgcacctgagggatgcagctgaattcacctgcagagctcagaaccctctcggctctcagcaggtctacctgaacgtctccctgcagagcaaagccacatcaggagtgactcagggggtggtcgggggagctggagccacagccctggtcttcctgtccttctgcgtcatcttcgttgtagtgaggtcctgcaggaagaaatcggcaaggccagcagcgggcgtgggagatacgggcatagaggatgcaaacgctgtcaggggttcagcctctcaggggcccctgactgaaccttgggcagaagacagtcccccagaccagcctcccccagcttctgcccgctcctcagtgggggaaggagagctccagtatgcatccctcagcttccagatggtgaagccttgggactcgcggggacaggaggccactgacaccgagtactcggagatcaagatccacagatgagaaactgcagagactcaccctgattgagggatcacagcccctccaggcaagggagaagtcagaggctgattcttgtagaattaacagccctcaacgtgatgagctatgataacactatgaattatgtgcagagtgaaaagcacacaggctttagagtcaaagtatctcaaacctgaatccacactgtgccctcccttttatttttttaactaaaagacagacaaattcct

SEQ ID NO: 4306 - DNA, 5815 bp, Homo sapiens
gcgtgaggccgagggaggggcggcggcgcgagcggcggcggcggcggttccagcatgaagaggagagctggcctggggggcagcatgaggtcagtggtgggcttcttgtcccagcggggcttgcatggggaccccctgctcactcaggactttcagaggagacgcctgcggggctgcagaaacctctacaagaaggacctcctcggccacttcggctgtgtcaatgccattgaattctccaacaatggaggccagtggctggtctcaggaggagatgaccgccgggttctgctatggcacatggaacaagccatccactccagggtcaagcccatacagctgaaaggagagcaccattccaacattttttgcctggctttcaacagtgggaacactaaagtgttctctggaggcaatgatgagcaagttatcctccatgatgttgaaagcagtgagacattggacgtgtttgctcatgaagatgcagtatatggcttgtctgtgagcccagtgaatgacaacatttttgccagttcctcagatgatggccgggttctcatttgggacattcgggaatccccccatggagagcccttctgcctggcaaactatccatcagcctttcatagtgtcatgtttaaccctgtggagcccaggttgttggccacagccaattcaaaggaaggagtgggactctgggacattcgaaaacctcagagttctctcctgcgctatggtggaaacctgtccctccaaagtgccatgagtgtacgattcaacagcaacgggacccagctcctggccctgaggcgacgcctgccccctgtgctctatgacatccattcccgcctgcctgtgtttcagtttgacaatcagggttacttcaactcatgcaccatgaaaagctgctgttttgcaggagatcgtgaccagtatatcctttcgggctctgatgacttcaacctgtacatgtggagaattcctgcagatccagaagcaggtggcattggtagggtggtcaacggagccttcatggtgctgaaagggcatcgatctattgttaaccaagtccgatttaatccccacacctacatgatctgctcttctggtgtagaaaagattatcaagatctggagcccatacaagcagccaggatgtactggagacctcgacggtcggattgaggacgattcccgctgcctctatacccatgaagagtacatcagccttgtgctgaacagtgggagtggcctgtcgcatgactacgccaaccagtcggtccaggaagacccccggatgatggccttctttgactcactggtacgccgagagatcgagggctggagctctgactcagacagtgacctcagtgagagtactatcctccaactgcacgctggggtcagcgagcgctcaggctacactgactcagagtcttcggcctcattgcctcgctccccgcctcccacagtagatgagtctgccgacaacgccttccacctggggcccctgcgggtcaccaccacaaacacagtagcctcaactccaccaacacccacgtgtgaggatgcagcctctcgccagcagcgtctgtctgctctgcggcgctaccaagacaaacgcctcctggccctttccaatgagtccgattctgaggagaatgtctgtgaggtggaactagacacagatctctttccccggccacggtcacccagccccgaagatgaatccagcagttccagcagctctagcagctctgaggatgaggaggagctgaatgaacgccgagcctctacctggcagcggaatgccatgcggcgccgacagaagacaacccgagaagacaagcccagtgccccaatcaagcccaccaacacttacattggagaagacaactatgattacccccagatcaaagtggatgacctctcctcctccccaacctcgtcccctgagcggagcacttccacgctagagattcaaccaagccgggcatcaccaacttctgacatagaatcagttgagcgaaaaatttataaagcttacaagtggctccgctactcttatatctcctactcaaataacaaagatggagagacctccttggtgaccggggaggcagatgaagggagagcaggaaccagccacaaagacaacccagccccttcttccagtaaggaagcctgtctaaacatagcaatggcccagaggaaccaggacctgccacctgaaggctgcagcaaggacacttttaaagaagagactcctagaactcccagcaatggcccaggccatgagcacagcagccatgcttgggcagaggtgccagagggtacctctcaggacactggcaatagcggctctgtagagcacccttttgaaaccaagaagctcaatggaaaggccctgagcagtcgggctgaggagccgccttctcctcctgtccccaaggcatctggctccactctcaacagcgggtctggcaactgtcccaggacccagtctgatgacagtgaggagaggagcctcgaaaccatctgtgccaaccacaacaatggacgcttacaccctcgtccccctcaccctcacaataacgggcagaacttgggggagctggaggtggtggcctactcttccccaggacactcagacactgaccgtgataactcgtccctgacagggacactcctacacaaagattgttgcgggtctgaaatggcctgtgagacccccaatgctggaacaagagaggaccccactgacaccccagccacagatagtagcagggctgttcatggccacagtggcctcaaaaggcaacgaattgaattggaagatacagattcagagaattcctcctcagagaagaaattaaaaacatgataaatacaaagggaaaacaaaaagctacaaaagtagccttacaaaaaaaaaaaaattgtttagtgaatacagaggaaaggaaaaacaagtattaaaggcacatgaaaccagggcctgaaattttgtgtctgatgctgctcccttctatccaacattcaacaacgggtctgaatgtctagctggccattggcttgtgctgtgttaagaaaggggaaaaaaaaataacccaagtgactcctttctagtgagacgtgagcgtagtgtgccgcgcaaggctctgtggaagtaaatctttgttgagacgttcgacttgttcttgtgtacgcacaatggcacgtgtgcgcttattgtctcataagaccttccttttagttctccatcagaaaggacctatgaatttgtactttttgccatctcaccctgtttacatgccataggtgttctggtctggatgatgggtgcctgttaaatcaggttgtgctgccagtgagttgtagatttatgctggaagaatggagaatggaaacaggccttcagcccattggctgcgctggagaggaaagcatggttcctttcttaaagaaatcttccatgttttctctaagtaacacttctttattgagcatttaatgtggacatactataaaaaagaatttttaatgctaatgagaggtttagcacttaagatcagattcaagagaatatagattcctgataaatttcactgtttgcaaattgagcagtgctgcaacatgtactgtatgaaggccataaaatagagctagtcatggataacagactttaaccagttaggtgctagatcctaagaggcactcacaaggccagcaggtgcttccttggctcccatgatcgatcgaggcatagtgaaagaagggcaaagacagctttccagagctttgtgctcaggctactaaagtagttgttataggtgtgttaacgaagaagcttagtgaggagcagaatgtggtactatattcatttaactcaacccagaaccattggtcagaattggtgggactggcatcttccctcagacttgcagttgatagaggctgtggtgttctcactagactttgcagagcagtaggcatctcaaggtaacagattcttattgagtaggtctattaggagtcagaaggtgttggggaggagtctctggcttatgactcctggttcccattagtcttaagtcttctggttcccataaaagactcagttttattgaggtagatacaggtttagaagagaaaagagcaacagattttcagcgttgcagtcactcggttatctatgaagggttgtgcaaaacaggaaggtctgggaatgaccagatatcttgttggcataaatgttatgaaaaggcagaatactggcaagaaatgaggaagagagagaaaaacaatataactttcttgagtgcaaaggtgctagacaactaggagcccagctgggattggtgtagggagggccgaacgctgactagtgtggcctcactgccccaggcttcctttcagaggaaggcctgtcctgctggaactggagccaaggggaggctgcctatgaaggcagaagatgtggatgaattcaggcactgggggtgggggggttatttataaacacaaggtggttggtttaagccaaaaggagataccatcctgataagctctgtgaaagagaagatgtgcctggtgtgtgtaatgcggctggggtatgaaaacactgagaaggagatgaaggagtgtgtgtagcatgggggtgtgtacaacttaacacctggacttttactgggggagtgggaaagtgattctgtaaccaacattagaattactttggatttgtaatcagattggttctatgatttgtctttgactattcacagataattgtaaatgctggttttataagcccaagtcattttacatttgcttttccaaaatgtattaaattggaattttttaatcctttatatacaaaaaaaatacgatcactcagtgtgtgtttctcttccccttcttagtcagcacacccagtcctttattttattctattctatttattttattttaataagtacttagcctcttctgacttctcaaaggacaatcggatacatatcttcctgaaaagaagtagttaaagttcccttgggaactagctacttggtagttacaattcccaaatgcagaacttggtcttttcatgttaaaagccttaatctcatttgggtactcaaaagagaaatcagagtttattctggttaacttgagaagccaagaaagatcatttttagcaagtatgccttccatccttggcagaggcttcccagcatcctaggctcagcttaccgggtgataggccccataagacacacacatgagcagggtgagaaatgcttgctttatagctgctccaccctcatctccagagattttgtgtctatggttgtgggtctggaaacctggcaggaaccacttctagagtacctttgcctaaactcttttagaattgaggccccaactttgatggcacatttaatacccaatttcttccataatagatatttttaatagcaggacagatggcactgattagatcaagaactatttggaagtgcctcttatgtttttttcctgcattctgtacataaagttttaagtggcaggtccagatatgtaaaatcatttctctctattttccagctggttttgttaatgattctctaggacagcaggtaaatgagttaagttgttggcttggggcaagtgaagtttgtgactatgcttgatttaataagctgagagtctcttgtttgtctgtcaaggtgccttcctctgctgaagccttacctccttctcacccagtaacggttaactcttctcttgtgtatatgcaaataaacctattattcact

SEQ ID NO: 4307 - DNA, 2140 bp, Homo sapiens
agataataacaaggactgttctggtgtgtccttacacctcacacgtctgccacagcctttaattgctggcatgtaccttatgatgtctgttgacactgttatcccagcaggagaaaaagtggtgaattctgacatttcatgccattataaaaattatccaatgcatgtctttgcctatagagttcacactcaccatttaggtaaggtagtaagtggatacagagtaagaaatggacagtggacactgattggacggcagagccctcagctgccacaggctttctaccctgtggggcatccagttgatgtaagttttggtgacctactggctgcaagatgtgtattcactggtgaaggaaggacagaagccacacacattggtggcacgtctagtgatgaaatgtgcaacttatacattatgtattacatggaagccaagcatgcagtttctttcatgacctgtacccagaatgtagctccagatatgttcagaaccataccaccagaggccaacattccaattcccgtgaagtctgatatggttatgatgcatgaacatcataaagaaacagaatataaagataagattcctttactacagcagccaaaacgagaagaagaagaagtgttagaccagggtgatttctattcactactttccaagctgctaggagaaagggaagatgttgttcatgtgcacaaatataatcctacagaaaaggcagaatcagagtcagacctggtagctgagattgcaaatgtagtccaaaaaaaggatcttggtcgatctgatgccagagagggtgcagaacatgagaggggtaatgctattcttgtcagagacagaattcacaaattccacagactagtatctaccttgaggccaccagagagcagagttttctcattacagcagcccccacctggtgaaggcacctgggaaccagaacacacaggagatttccacatggaagaggcactggattggcctggagtatacttgttaccaggccaggtttctggggtggctctagaccctaagaataacctggtgattttccacagaggtgaccatgtctgggatggaaactcgtttgacagcaagtttgtttaccagcaaataggactcggaccaattgaagaagacactattcttgtcatagatccaaataatgctgcagtactccagtccagtggaaaaaatctgttttacttgccacatggcttgagtatagataaagatgggaattattgggtcacagacgtggctctccatcaggtgttcaaactggatccaaacaataaagaaggccctgtattaatcctgggaaggagcatgcaaccaggcagtgaccagaatcacttctgtcaacccactgatgtggctgtggatccaggcactggagccatttatgtatcagatggttactgcaacagcaggattgtgcagttttcaccaagtggaaagttcatcacacagtggggagaagagtcttcagggagcagtcctctgccaggccagttcactgttcctcacagcttggctcttgtgcctcttttgggccaattatgtgtggcagaccgggaaaatggtcggatccagtgttttaaaactgacaccaaagaatttgtgagagagattaagcattcatcatttggaagaaatgtatttgcaatttcatatataccaggcttgctctttgcagtgaatgggaagcctcattttggggaccaagaacctgtacaaggatttgtgatgaacttttccaatggggaaattatagacatcttcaagccagtgcgcaagcactttgatatgcctcatgatattgttgcatctgaagatgggactgtgtacattggagatgctcataccaacaccgtgtggaagttcaccttgactgagaaattggaacatcgatcagttaaaaaggctggcattgaggtccaggaaatcaaaggaaagggaagtggaggcttaaaccttggtaatttctttgcaagccgtaagggctacagtcgaaaagggtttgaccggcttagcactgagggcagtgaccaagagaaagaggatgatggaagtgaatcagaagaggagtattcagcacctctgcctgcgctcgcaccttcctcctcctga

SEQ ID NO: 4308 - DNA, 1399 bp, Homo sapiens
gtcggatccagtgttttaaaactgacaccaaagaatttgtgagagagattaagcattcatcatttggaagaaatgtatttgcaatttcatatataccaggcttgctctttgcagtgaatgggaagcctcattttggggaccaagaacctgtacaaggatttgtgatgaacttttccaatggggaaattatagacatcttcaagccagtgcgcaagcactttgatatgcctcatgatattgttgcatctgaagatgggactgtgtacattggagatgctcataccaacaccgtgtggaagttcaccttgactgagaaattggaacatcgatcagttaaaaaggctggcattgaggtccaggaaatcaaagaagccgaggcagttgttgaaaccaaaatggagaacaaacccacctcctcagaattgcagaagatgcaagagaaacagaaactgatcaaagagccaggctcgggagtgcctgttgttctcattacaacccttctggttattccggtggttgtcctgctggccattgccatatttattcggtggaaaaaatcaagggcctttggaggaaagggaagtggaggcttaaaccttggtaatttctttgcaagccgtaagggctacagtcgaaaagggtttgaccggcttagcactgagggcagtgaccaagagaaagaggatgatggaagtgaatcagaagaggagtattcagcacctctgcctgcgctcgcaccttcctcctcctgaaaaccaagctttgatttagattgagtaagatttacccagaatgtcagattcctttccctttagcacgtttaaagttctgtgtatttaattgtaaactgtactagtctgtgtgggactgtacacactttatttacttcgttttggttaagttggcttctgtttctagttgaggagtttcctaaaagttcataacagtgccattgtctttatatgaacatagactagagaaaccgtcctctttttccatcataattctaatctaacaatggaagatttgcccatttacacttttgagactttttggtggatgtaaataaccccattctttgcttgaacacagtattttcccaatagcactttcattgccagtgtctttctttggtgcctttcctgttcagcattcttagcctgtggcagtaaagagaaactttgtgctacatgacgacaaagctgctaaatctcctatttttttaaaatcactaacattatattgcaatgaaggaaataaaaaagtctctatttaaattcttttttaaattttcttcagttggtgtgtttttgggatgtcttatttttagatggttacactgttagaacactattttcagaatctgaatgtaatttgtgtaataaagtgttttcagagc

SEQ ID NO: 4309 - DNA, 1452 bp, Homo sapiens
gcgtggaggtcgacgactccgtcgcagactacggacctgtctgggtctcagccgccaaagaccccgtccggaagtactagccggacatcatgagtggctgtcgggtattcatcgggagactaaatccagcggccagggagaaggacgtggaaagattcttcaagggatatggacggataagagatattgatctgaaaagaggctttggttttgtggaatttgaggatccaagggatgcagatgatgctgtgtatgagcttgatggaaaagaactctgtagtgaaagggttactattgaacatgctagggctcggtcacgaggtggaagaggtagaggacgatactctgaccgttttagtagtcgcagacctcgaaatgatagacgaaatgctccacctgtaagaacagaaaatcgtcttatagttgagaatttatcctcaagagtcagctggcaggatctcaaagatttcatgagacaagctggggaagtaacgtttgcggatgcacaccgacctaaattaaatgaaggggtggttgagtttgcctcttatggtgacttaaagaatgctattgaaaaactttctggaaaggaaataaatgggagaaaaataaaattaattgaaggcagcaaaaggcacagtaggtcaagaagcaggtctcgatcccggaccagaagttcctctaggtctcgtagccgatcccgttcccgtagtcgcaaatcttacagccggtcaagaagcaggagcaggagccggagccggagcaagtcccgttctgttagtaggtctcccgtgcctgagaagagccagaaacgtggttcttcaagtagatctaagtctccagcatctgtggatcgccagaggtcccggtcccgatcaaggtccagatcagttgacagtggcaattaaactgtaaataacttgccctgggggcctttttttaaaaaacaaaaaccacaaaaattcccaaaccatacttgctaaaaattctggtaagtatgtgcttttctgtgggggtgggatttggaaggggggttgggttgggctggatatctttgtagatgtggaccaccaaggggttgttgaaaactaattgtattaaatgtcttttgataagccttctgctcacatttttgtgaatgtctgaagtatatagtttgtgtatattgacagagctcttttataactaaagcaaatttaatttttttgtactagaaaaaaatttgaacattttagttcttggttataaaaatgttaattcagaattagtttaatgccttaattaaactaattaatagctttggacacttaaaagagctctaaatttgcttgtacataaaggcttaatttgttttccttgttagggtcaagggtgtcctccactctttaacagctgctggacagacacattagagcagctgtttgttattgataataaaatattataaaacta

SEQ ID NO: 4310 - DNA, 1579 bp, Homo sapiens
gggttatcctaatcgttgtcttggtcactcttggttgggcctggttgactttgccagtcagctcctacagtgatcagttggccacctctagatctgtgtttgccggtctagacgttatcggtgcacttccttgaagtgccaggttgcagcgatcccagagcgttgataacgtgatctgatccctaagttgagacctgtcttcctgtaacgcttccgaataagaggtccggtcgaaaagagttgaaagatacgaaattaggtggtcgttggaatcctgatcgcagtaaagtggtccttggtaactgctcgagtagaacatgtctgcatccgccaatagtccgctaatagggagggctgtgcgattaaaggcttccatcgattgggtagtgtccttcaagtgggtggcgaagagccagtcgggcatatgtcatgaaggtttctccgaccgattaatggtttgctgcttgactagcctagggaaataataataaaggtaaagtaaacttttttaatgacatatggggcacaaaataactggtgtcttgtaaatgttctgtttttttaaataaaacttctctactttagtctttactttaaaaatatgtactgtttccttttttgttgtttttttgtttgtttttttttcttttgtactgagctcagcatagactaatactaccttaatgttaaaatctgaatttcttttagcattttgcttaaaagcaatatgctatttgcttattccgtgccctgacatagataatttttgaattctgatagaatacaagtgtggtaaatgccatgtttgtactttatctaacatcttctctttcagtagtcttgttttttttatatcatgtgattgtttgtgtgtcccctttcctcttctttgcttaacacaattatcttgtgttaaggatctcaaagatttcatgagacaagctggggaagtaacgtttgcggatgcacaccgacctaaattaaatgaaggggtggttgagtttgcctcttatggtgacttaaagaatgctattgaaaaactttctggaaaggaaataaatgggagaaaaataaaattaattgaaggcagcaaaaggcacagtaggtcaagaagcaggtctcgatcccggaccagaagttcctctaggtctcgtagccgatcccgttcccgtagtcgcaaatcttacagccggtcaagaagcaggagcaggagccggagccggagcaagtcccgttctgttagtaggtctcccgtgcctgagaagagccagaaacgtggttcttcaagtagatctaagtctccagcatctgtggatcgccagaggtcccggtcccgatcaaggtccagatcagttgacagtggcaattaaactgtaaataacttgccctgggggcctttttttaaaaaacaaaaaccacaaaaattcccaaaccatacttgctaaaaattctggtaagtatgtgcttttctgtgggggtgggatttggaaggggggttgggttgggctggatatctttgtagatgtggaccaccaaggggttgttgaaaactaattgtattaaatgtcttttgataagc

SEQ ID NO: 4311 - DNA, 4756 bp, Homo sapiens
tgaagcttttaattttttattgttcaatctgtctctcttttccattgtaatttctcgcttttgtgtcatgcttagaaagcctttttcaacttcagtttatgtctttatccggaatttatttttggttatgtgaaatgagattttttttcagccatatagctagttgtttcagtgcttttttttttttcgaatggtcagttctttgcacagtgatgtaaaagctaccctttatcatcagctaaatgtctatatgtctttttctactctactgatctatttctatatcaatgtcacagtattttaatgattatagattttaatgtttttctcttactgatatagggaattctaattagtttttcctttcaaaaggtatttggccttttattcatttggaaaagtaaatacattaataaaaggccaaatacaggattttgtcagttgccttttcagcatgtactgatataatcattttgtttttaccttttaatctcttaatacagtgtcataatgatgttgtattaaaatatttattcatttctcccaagtcacaaaagtaaagccaggaaacttaaatatagcaggtcattgaaaatacaaatttgttctttgcagtattcttaaagccttagaattttttgtgttttgtcatccagcataccgaccttgtgctcatctttttactctgcttatctactttcattttacaaaacatcattttggaatttcccaagatacttaaatttttattatttattaactatgtgcagaaaaacttggggtctctcttcatgccagctaattacactactgctgtaaaatgaagatgcaattagggaaagcaaggcagcaacttactaccatttattctatgctgtagtcagatgatgatggtgaactctgattttgttataaatgactgtagatctttgataaacctttgatgttactgttgttgaattaatttctcctgtcttacagcggcctctgttgaccccaaaccttaagatctttttagcgtatgagaccttaataaatgatagaagaagaaaaaaaattgtgtttgcaattttgtgatttttttaacatatggactcacagattatataagcttcaggtcccacaacacatgagtctgcctctgggtgtaaggggtgaagagtgggggttttatttaccccagttcttgcccacaattgtgctatcactgctagaaagctgatctctatgatggggagccaatcgttgtttactttactttcagtaattaaagttaatttaatctacttgattaaaattttatctcatatcctatttaactccacccccaaccccaccatggagtaggagatagccagccagttctttcactcctccacccctgctctaccctcttcaacttctaacccttctggcattggagtagggagacaggattggagaaaaggtgttctggtctgatgccacagtttttacttagccagacatgaaattacaagcccctgttggttattgttgcttctctagctaacattggccgtgaatttgaatgccttctgcgtgtgttccagtgctggttctgttacaggtagaagggtgcaaactcttcagaggggcccataggaagcttccctactgaatagttctttggtgttggagatccagcatccacgatatagacctggttctcttttttggtgtctacttagctcatagtaatcaactatatctttcctttgcattcttgttcttccagtcagcaaggttacaggctgctccactgcagcaccttgttcagggttttattttaccagggctgctataacaaagaaccactgactgggtggcttagacaacagaaatgtattgtttcacagttctggaagttagaaggtgtcaacggggttgtttccttctgagggctgtgagaacgaatctgttgcatgccttttcacctcgcttccagtgggttgctggcaatgtttggtgttccttggtttgtaggtatgggtgggaagaaaataatagagttttatccctttggtttttatctgaaataaggaaaagtgtacttcactaatatttgctttatagatttggagcccatgtatgtcatttatgaataaatatactagagatatgaagttaaattttctattgatataatatttaagaagtatagaccatgagcttcttgagaacaaatctttttctaatttgtctctatattccacaaatgtgatgtattttattgtaatgttaatgaatttctgaggtagataataatgtagttctgtaaaatagttctgccatttaaactcatttaagatcaaatagggcatgctttacatatctgttgatgcaactgttttgtccaactacagccgaatttacaacagattcaaatactaaccagaaggaaattaatgagttgattgtggtatttttttttcaatcagaagtgttttctggatacatctagatacagtgttgtaacaatccaggtgataaatgtattgaacattttttataattgtggtttttaatgtaaaaaaagaaaggtatgaaaacccttgacttttttttgagttgccaaaacatttctgtaataatgtatacattctccatagctattagtacccgttagctttttttaattgaacagttggcccttcatatctctgggttctgcatatgtgtggattcaaccaaccatggatcaaaaatattcttaaaaaaattgcatctgtactgaacatgtacagacttttgttctcatcactattccctaagtaatatagtgtaataactatttacataggatttacattgtattaggtattacaagtaatctagagatgatttaaagtacatggaaggttatgcataggttatatacaaatactgtgccctcttttatcagggatttaagcatccatggattttgatgtctgtaggaggtcctggaaccaatcccccatggataccgagagattactgtgtatgacttaaggtctataacatgatgttttgatatacatagtgaaatgattactacagtccagcaaattaacatatctgttatctcatatacttctctccctccctccttccttctctccctccctccctccctctcttcccttctcttttccttcatagtaagagtatctaaaatctactcccttggaaatttccagtataaaatattattaaccatagtcctcatgttgtacactagatctctagatttagcctacatagctgcaaactttataccctttgacctaattcttcccattttctctgccccaggtaaccagtattctgctctttgttgctatctgtgtatttgttgttgcattttttggtttttcattatgttttttttttaattccacatataagtgagatcatgcagtgtttttctctgtgtgtctggcgtatttcacttagcataatgtcctctaagttcattaatgttttgcaaatggcaggatctctctctttttcaaggatgaatatttcattacatacacacacacccacatcatagtttctttattcgtcaacaggcacttcagttgcttccataacttgtattgtgaataatgttgcaatgaatatgggaatgcagatttttttaataagattgtgatttcatttcctttgagtagatactcagaagaggcgggattgcagggtcatattactagttctatttttaattccttaagaaacctccatactgttttccacacgggctgcacaaatctgcatttccaccaacagtgtacaagggttcccttttcctcccactcttactaacacttgttatctcttgtttttttgataatagccatcctaaaaggggtgaggtgatatcttattgtggttttgattttcattttcctgatgattagtgatgttgagcatcttttcatatacctgttggccatttttatgtcttttgagaaatgtttattcaggttctttgcccattttttaattaggttattcaattttttggcattgcatcgttatatatttttgatattaaccccttatcagatacatggtttgcagatattttctcctaatgcgtaggcctccttttcattttgttgattgtttcctttgctgtgcaaaaaaaggctattaacttttatccggtaccacacgtccaaagttagatttaaattaacatagttttcattgtaaaattagcaatggtaaatttgtcgaagcattaaacagcctcattaaatgttcataggagcaaataaccatgtcaaataccctgttcagatatggaaaaattttgctcatttaacaaatattaagcacttactatgtgcccagcattgactaatgttcagtgaaatccttttgttaagagattcttttgaaaaacaatcagactataaatattatttattggtggaaaagagtaaaacatctatatgctataaaaaggccgggtgcggtggctcacgcctgtaatcccagcactttgggaggctgaggcgggcggatcacgaggtcaggagattgagaccatcctggctaacacggtgaaaccccatctctactaaaaatacaaaaaattagcggggccaggtggcaggcacctgtagtcccagctactcgggaggctgaggcaggagaatggtgtgaacctgggaggtggagcttgcagtgagccgagatcgcgccactgcactccagcctgggtgacagagcgagactccatctc

SEQ ID NO: 4312 - DNA, 3826 bp, Homo sapiens
aaacgctaatggactccactacagcgactgctgagctgggctggatggtgcatcctccatcagggtgggaagaggtgagtggctacgatgagaacatgaacacgatccgcacgtaccaggtgtgcaacgtgtttgagtcaagccagaacaactggctacggaccaagtttatccggcgccgtggcgcccaccgcatccacgtggagatgaagttttcggtgcgtgactgcagcagcatccccagcgtgcctggctcctgcaaggagaccttcaacctctattactatgaggctgactttgactcggccaccaagaccttccccaactggatggagaatccatgggtgaaggtggataccattgcagccgacgagagcttctcccaggtggacctgggtggccgcgtcatgaaaatcaacaccgaggtgcggagcttcggacctgtgtcccgcagcggcttctacctggccttccaggactatggcggctgcatgtccctcatcgccgtgcgtgtcttctaccgcaagtgcccccgcatcatccagaatggcgccatcttccaggaaaccctgtcgggggctgagagcacatcgctggtggctgcccggggcagctgcatcgccaatgcggaagaggtggatgtacccatcaagctctactgtaacggggacggcgagtggctggtgcccatcgggcgctgcatgtgcaaagcaggcttcgaggccgttgagaatggcaccgtctgccgaggttgtccatctgggactttcaaggccaaccaaggggatgaggcctgtacccactgtcccatcaacagccggaccacttctgaaggggccaccaactgtgtctgccgcaatggctactacagagcagacctggaccccctggacatgccctgcacaaccatcccctccgcgccccaggctgtgatttccagtgtcaatgagacctccctcatgctggagtggacccctccccgcgactccggaggccgagaggacctcgtctacaacatcatctgcaagagctgtggctcgggccggggtgcctgcacccgctgcggggacaatgtacagtacgcaccacgccagctaggcctgaccgagccacgcatttacatcagtgacctgctggcccacacccagtacaccttcgagatccaggctgtgaacggcgttactgaccagagccccttctcgcctcagttcgcctctgtgaacatcaccaccaaccaggcagctccatcggcagtgtccatcatgcatcaggtgagccgcaccgtggacagcattaccctgtcgtggtcccagccggaccagcccaatggcgtgatcctggactatgagctgcagtactatgagaaggagctcagtgagtacaacgccacagccataaaaagccccaccaacacggtcaccgtgcagggcctcaaagccggcgccatctatgtcttccaggtgcgggcacgcaccgtggcaggttacgggcgctacagcggcaagatgtacttccagaccatgacagaagccgagtaccagacaagcatccaggagaagttgccactcatcatcggctcctcggccgctggcctggtcttcctcattgctgtggttgtcatcgccatcgtgtgtaacagacgggggtttgagcgtgctgactcggagtacacggacaagctgcaacactacaccagtggccacatgaccccaggcatgaagatctacatcgatcctttcacctacgaggaccccaacgaggcagtgcgggagtttgccaaggaaattgacatctcctgtgtcaaaattgagcaggtgatcggagcaggggagtttggcgaggtctgcagtggccacctgaagctgccaggcaagagagagatctttgtggccatcaagacgctcaagtcgggctacacggagaagcagcgccgggacttcctgagcgaagcctccatcatgggccagttcgaccatcccaacgtcatccacctggagggtgtcgtgaccaagagcacacctgtgatgatcatcaccgagttcatggagaatggctccctggactcctttctccggcaaaacgatgggcagttcacagtcatccagctggtgggcatgcttcggggcatcgcagctggcatgaagtacctggcagacatgaactatgttcaccgtgacctggctgcccgcaacatcctcgtcaacagcaacctggtctgcaaggtgtcggactttgggctctcacgctttctagaggacgatacctcagaccccacctacaccagtgccctgggcggaaagatccccatccgctggacagccccggaagccatccagtaccggaagttcacctcggccagtgatgtgtggagctacggcattgtcatgtgggaggtgatgtcctatggggagcggccctactgggacatgaccaaccaggatgtaatcaatgccattgagcaggactatcggctgccaccgcccatggactgcccgagcgccctgcaccaactcatgctggactgttggcagaaggaccgcaaccaccggcccaagttcggccaaattgtcaacacgctagacaagatgatccgcaatcccaacagcctcaaagccatggcgcccctctcctctggcatcaacctgccgctgctggaccgcacgatccccgactacaccagctttaacacggtggacgagtggctggaggccatcaagatggggcagtacaaggagagcttcgccaatgccggcttcacctcctttgacgtcgtgtctcagatgatgatggaggacattctccgggttggggtcactttggctggccaccagaaaaaaatcctgaacagtatccaggtgatgcgggcgcagatgaaccagattcagtctgtggagggccagccactcgccaggaggccacgggccacgggaagaaccaagcggtgccagccacgagacgtcaccaagaaaacatgcaactcaaacgacggaaaaaaaaagggaatgggaaaaaagaaaacagatcctgggagggggcgggaaatacaaggaatattttttaaagaggattctcataaggaaagcaatgactgttcttgcgggggataaaaaagggcttgggagattcatgcgatgtgtccaatcggagacaaaagcagtttctctccaactccctctgggaaggtgacctggccagagccaagaaacactttcagaaaaacaaatgtgaaggggagagacaggggccgcccttggctcctgtccctgctgctcctctaggcctcactcaacaaccaagcgcctggaggacgggacagatggacagacagccaccctgagaacccctctgggaaaatctattcctgccaccactgggcaaacagaagaatttttctgtctttggagagtattttagaaactccaatgaaagacactgtttctcctgttggctcacagggctgaaaggggcttttgtcctcctgggtcagggagaacgcggggaccccagaaaggtcagccttcctgaggatgggcaacccccaggtctgcagctccaggtacatatcacgcgcacagcctggcagcctggccctcctggtgcccactcccgccagcccctgcctcgaggactgatactgcagtgactgccgtcagctccgactgccgctgagaagggttgatcctgcatctgggtttgtttacagcaattcctggactcgggggtattttggtcacagggtggttttggtttagggggtttgtttgttgggttgttttttgttttttggttttttttaatgacaatgaagtgacactttgacatttcc

SEQ ID NO: 4313 - DNA, 1917 bp, Homo sapiens
gaattcagtggcctaccaagtggcatagctgaggtcagtggagaatcctccagagctgagattgggagcagcctgccctcgggagcatattatggcagtggaactccatctagtttccccactgtctctcttgtagacagaactttggtggaatctgtaacccaggctccaacagcccaagaggcaggagaagggccttctggcattttagaactcagtggtgctcattctggagcaccagacatgtctggggagcattctggatttctggacctaagtgggctgcagtccgggctgatagagcccagcggagagccaccaggtactccatattttagtggggattttgccagcaccaccaatgtaagtggagaatcctctgtagccatgggcaccagtggagaggcctcaggacttccagaagttactttaatcacttctgagttcgtggagggtgttactgaaccaactatttctcaggaactaggccaaaggccccctgtgacacacacaccccagctttttgagtccagtggaaaagtctccacagctggggacattagtggagctaccccagtgctccctgggtctggagtagaagtatcatcagtcccagaatctagcagtgagacgtccgcctatcctgaagctgggttcggggcatctgccgcccctgaggccagcagagaagattctgggtcccctgatctgagtgaaaccacctctgcattccacgaagctaaccttgagagatcctctggcctaggagtgagcggcagcactttgacatttcaagaaggcgaggcgtccgctgccccagaagtgagtggagaatccaccaccaccagtgatgtggggacagaggcaccaggcttgccttcagccactcccacggcttctggagacaggactgaaatcagcggagacctgtctggtcacacctcgcagctgggcgttgtcatcagcaccagcatcccagagtctgagtggacccagcagacccagcgccctgcagagacgcatctagaaattgagtcctcaagcctcctgtactcaggagaagagactcacacagtcgaaacagccacctccccaacagatgcttccatcccagcttctccggaatggaaacgtgaatcagaatcaactgctgcagaccaggaggtatgtgaggagggctggaacaagtaccagggccactgttaccgccacttcccggaccgcgagacctgggtggatgctgagcgccggtgtcgggagcagcagtcacacctgagcagcatcgtcacccccgaggagcaggagtttgtcaacaacaatgcccaagactaccagtggatcggcctgaacgacaggaccatcgaaggggacttccgctggtcagatggacaccccatgcaatttgagaactggcgccccaaccagcctgacaacttttttgccgctggagaggactgtgtggtgatgatctggcacgagaagggcgagtggaatgatgttccctgcaattaccacctccccttcacgtgtaaaaagggcacagtggcctgcggagagccccctgtggtggagcatgccaggaccttcgggcagaagaaggaccggtatgagatcaattccctggtgcggtaccagtgcacagaggggtttgtccagcgccacatgcccaccatccggtgccagcccagcgggcactgggaggagcctcagatcacctgcacagaccccaccacctacaaacgcagactacagaagcggagctcacggcaccctcggaggagccgccccagcacagcccactgagaagagcttccaggacgcacccaggacgctgagcccaggagcctgccaggctgacgtgcatcccacccagacggtgtcctcttcttgtcgctttttgtcatataaggaatccca

SEQ ID NO: 4314 - DNA, 2792 bp, Homo sapiens
catccgcttgaacaccaaagaagacaaaaatggtgtccccgacttagtggccctgctggctgtgagagacaccccggacgaggagccggtggacagcgacacttcggagagcgactcgcaggaaagtggggaccaagaaacagaggagttggataatcctgagttcgtggccattgtggcctataccgacccgtcggacccctgggcccgggaggagatgttgaaaatcgcttctgttatcgagtcgctgggctggagcgacgagaaagacaagcgagaccccctccgacaggtcttgtccgtcatgtccaaggacactaacgggacccgcgtgaaggtggaagaggcgggccgcgaggtggacgccgtggtcctgcgcaaggccggggatgacggggacctccgggagtgcatttccaccttggcgcagccggatctccctccccaggcgaagaaggctgggcgtggcctcttcgggggctggagcgagcaccgtgaggacgaagggggtcttctggagctggtggcgctcctggctgcccaggacatggcggaggtgatgaaggaggaaaaagaaaacgcctgggaaggcgggaagtacaaataccccaaaggcaaactgggggaggtattggcgctcctggccgcccgggagaacatggggtccaacgaggggtcggaggaggcttcggacgaacagtccgaggaggagtcggaggacaccgagagcgaggcgtcggagccggaggacagggcatccaggaagccccgggccaagagggcgcgcacggcccccaggggcctgactccggccggcgcgcctcccaccgcttccggggcccgcaaaacccgcgcgggcggccgaggccgaggccggggcgtcactcccgagaagaaagccgggagccggggctcggcccaggacgacgccgcaggaagcaggaagaagaaggggagcgcgggcgccggggcccatgccagggcaggcgaggccaagggccaggcgcccactggatccaaggccgcgcgcgggaagaaggcccgtcggggccggaggctgccccctaaatgccgctagtggccccccaagaagccgcccaggctgcgagcaggccccgcagggcacccgcccgcctgtggcccccgccctcccctcccctcttcctgtcctccgcagacgcaatctcctcgcttcacagcgcgcccgggccgcgttttgccagcgtcacgttcccctctcgggccctcgcaggccgggggcgccagcgatcccgacggaggaagcccggatgggaggaggaaagagaagtgggcgcccgaggcagcagcgcagggccgagatggggacgcgccaagtggaccaggattgggggcccgggttgcccccggagggggtgtgtgtgtggacgccgggcacctgcagaggcgagcagggctcttcgtggcgctctcggggcctgcgcctggcaggtgctgtaggccgctgtcgcccctaccccagtctgactgggccctgggtctgtggtggaggctcagtcaccagccgcgcagcgcgtgtcagggcgcaactctcagccaggggaggccccagctcccagccaggggaagagatgattccagaaaggaaagtctgagagatagaaggcggttgggaaggggaggaggaggaaaggggagaggaacggtgggagaagggaaagaggaggaggagggggaggggggagcagagggaagacacatgccagccctgcctactggggcgcccctgataacaaaggaaccagccccaggccaaggccacctgcccctgaccacaagttgaatttgtcactcagactgcagtgtttcccaacattctaattatttgcagaggtgttcaatttggggtaattcacttaaaatccagttttggttcttctgggctgagtgggccctggcccctcccataggctgtggctcccctgggtgccccctctccagtggagctgacccaccgctcagcgctggccttgcagcccttactaaaagacttgaaagtccctgggttcaccccctgagtgaattaaaggccagaggggccccgaagggcactgtgagggacagaggctcacctgggcagtgcagaagccggccgcgtgtccctccttacaggggatgaaatgacctggggaggaaaccccagccctgccctggaggttccagagtaggcgggccggtgctgtgaggcttcacaacctgctgtcccaagcacgcttgagttgtatgtgagtctgtgccgtgccgtgccgtatgcttcagctcctgcaaccccggctgagctcgatttttacctaaatatcagtctccacgggaccccaccttcattcatgccttcttgtccctggggcaatgtgtgtgcttcctcgtcccaatttccattccctggcagtgaggagcccatcgtgccagggggccctgccccacttgtccctgggaaggaataggagggtttgggtgtgacctcacagtccagaccagactgtcccagtcctatgtcagggacacccagatgtagaagctgactgagacctgctgcagggcgtgggtgctcccctctgcttggaggctgtccctggacagtgacccacccactgaggaccaggctgggtgtaccttgagctgggcacagcagcctgtggtgttgcctgtgggtggggagggccccaggtgtgcttctcccgtagcagtcctaggcttctctccctgtgccctgtgtcacctggatcctccagtaaagtgaaattcagcactgt

SEQ ID NO: 4315 - DNA, 3629 bp, Homo sapiens
aggaataggaaaattgtccacggctgatggtaaagcctttgcagatcctgaagtacttcggaggttgacatcgtctgttagttgtgcgttggatgaagctgctgctgcacttacccgtatgagagctgaaagcacagcaaatgcagggcagtcggacaaccgcagtttggcagaagcctgttcagaaggagatgtaaatgctgtgcgaaagttactcattgaagggcgaagtgtaaatgaacacacagaggaaggggagagcctcctttgtttagcttgttctgctggatactatgagcttgcacaggttttgttggcaatgcatgcaaatgtggaagataggggaatcaaaggtgacattacacctttaatggctgctgctaatggaggacatgtcaaaattgtgaagttgctgctagctcataaagcagatgttaatgcacagtcttcaacaggcaatacagcacttacatatgcttgtgctggaggctatgtagatgttgtaaaggtgctcttggaatccggtgctagtattgaggaccataatgaaaatggtcatacccctcttatggaagctggaagtgctggacatgtggaagtagccagattgctgctagaaaatggggctggcattaatacgcattctaatgaatttaaagagagtgcccttaccttagcttgttacaaaggacacttagagatggtgcgatttcttttggaagcaggcgcggatcaagagcataaaacagatgaaatgcacactgctctgatggaggcttgcatggatggccatgttgaagtagctaggttacttcttgacagcggtgcccaagtgaacatgcctgctgattcatttgagtcaccattaactttggctgcatgtggtgggcatgtggaacttgcggctttacttattgaaagaggagctagcctggaagaggtcaatgatgaaggttatacaccattgatggaagcagctcgagaaggacatgaagaaatggtggcattacttcttggtcaaggagcaaatatcaatgcacagacagaagaaactcaagaaactgccttgactctggcttgctgtggaggctttctggaagtggcagactttctaattaaggcaggagccgatatagaactagggtgttctacccctttaatggaagctgctcaagagggtcatttggagttagttaaatacttattagctgcaggagctaacgttcatgcaacaacagcaacaggggatacagcactaacatatgcctgtgaaaatggtcatactgatgtagcagatgtcttacttcaggcaggcgcagatctggaacatgaatctgaaggtggaagaactcctttaatgaaagctgcaagagctggtcatgtttgtactgttcagttcttaattagtaaaggagcgaatgtgaatagaaccacagctaataatgaccatactgtactgtccctggcttgtgcagggggtcatctggcagtggtggaactacttttggctcatggggcagatcctactcaccgtttgaaagatggctcaactatgttgatagaagcagcaaaaggtggccatacaagtgttgtttgctatctcttggattatcctaataacttgctttcagcccctccaccagatgtcactcagttaactcccccatcccacgatttaaatagggctcctcgtgtaccagttcaagcactgcccatggttgttccacctcaggagcctgacaaaccacctgccaatgttgccaccactcttcccatcaggaataaagctgcttctaaacaaaagtccagcagccatttgccagcaaacagccaggatgtacagggttacatcaccaatcagtctccagagagcattgtagaagaggctcagggaaagttaacagaactggaacagaggataaaagaagccatagaaaagaatgcacagctgcagtccttggaactggctcatgctgaccaacttaccaaggagaagatcgaggagctcaacaaaacaagggaggaacaaattcagaagaaacaaaagattttggaggaactacagaaagtagaacgagagttacaactgaaaactcagcagcagctaaaaaagcagtatctagaggttaaagctcaaagaattcaacttcagcaacagcagcaacagtcttgccaacacctgggattactaactcctgttggagttggagagcagctttctgagggagactatgcacggttacagcaagtggatcctgttttacttaaagatgaaccccagcagactgctgctcagatgggttttgcgccaatccagcctctgcgatgcctcaagctttgcctctggcggcaggtcccttgcctccagggtccatcgcaaatcttacagaactgcaagtcctatcatctctccttcagccatgcttcctatctaccctgccattgatattgatgcacagactgagagtaatcatgacacggcactaacacttgcctgtgctggtggccacgaggaactggtacaaacactgctagagagaggagctagtatagagcaccgagacaagaaaggttttactccactcatcgtggctgccacagctggtcatgttggtgttgtggaaatattgctggacaatggtgcagacattgaagcccagtctgaaagaaccaaggacacaccactctccttggcttgttctgggggaagacaggaggtggtggagctattgttagctcgaggggcaaataaagagcacaggaatgtttctgattacacacctctaagtctggctgcttctggtggctatgtgaacatcatcaaaatattactaaatgcaggagctgagattaactctagaactggtagcaaattgggcatctctcctctgatgttagcagctatgaatgggcatacagctgctgttaagctcctgttagacatgggctctgacataaatgctcagatagaaaccaatcggaacactgcccttactttagcctgcttccaaggaagaactgaagtggttagtcttctgcttgatagaaaagcaaatgttgaacacagagctaagactggtctcacaccactaatggaagctgcctctggtggatatgcggaggtgggccgagttcttttggataaaggtgctgatgttaatgcccctccagttccctcctcaagagatacagctttaaccatagcagcagataaagggcattacaaattctgtgagcttcttattggcaggggagctcatattgatgtacgtaacaagaaggggaacactccattgtggctagcagcaaatggtgacacctcgatgtggttcagttactggtgcaagcaggtgcagatgtggatgcagcagataaccgcaagataactcctcttatggcagcatttagaaagggtcatgtgaaggtggtgcgctacttagtcaaagaagtcaatcagtttccatcagattctgaatgtatgagatacatagcaaccatcactgataaggagatgctgaagaagtgtcatctttgtatggagtcaatagtacaagccaaagatagacaggctgctgaagcaaacaaaaacgccagcattttgttagaggagttagacttggaaaaggtaa

SEQ ID NO: 4316 - DNA, 1940 bp, Homo sapiens
ctgaagttgggagctggggccagggccctgggcccagcattgccagccttggctcagatgggcgtctttgtcttcttgacccccgggatctctgccatcctgtgagctcagtccagtgcccagtatccgtacctagccctgacccagagctgctgcgagtgacttgggccccaggcctgaagaattgcttggccatctcaggtactgccgagcaggatttcgtcttgttatctgatctctttcttccaggagactgttgggtgctcaggaaggagcctccagcaccatgataaacctggctccaggagttaaagttgctcacagagaaattcgaactctccaggttcttcagtggcaggccttttcctaccctggctactaaacttccacacattggcagcaggcctttcctagcctagcaggaattcaggtctcaggttggtggaggggcctgcagacagtaagacactgggacagacatcgggctgggtcagaaagaaaaggggacagtggctaacacggtgaaaccccgtccctactaaaaatacaaaaaattagccaggcatggtggcaggcgcctgtagtccggcttatagggcactttagatggaaacaaatgactggatctttaactcctacctttctctcctctcttcctgtaatgttgttactgaaggcaggaagggagactccttggctaaagagcagagcaagagcctcaaagtggtctttgtgagccaccctggactactggttcagtagagggttgagtcaagcaatatttgaggacgggatataaacagtatttcttaaagttgtcaccaatttttcccccgatgaggccattccagacccaaattagtcataacagagccaggacaataatcacatctcctgattctgagcctgaatgcttcccacaggactgcgtcgctcccactgctctgaggtccattgtgggggagagttgccactgggattccacctcaaggcctggggaccaagcctccaggattcctcttgagactcctccactatttcattaccatcccgccacatcttctagtgctatgccctggttccctttggaatcctctcaatcccaaagaaggcctcctaccacctctaaggcatcaaaggtgttagaaagtgccccaagactcaacagggcatccatctcatcatagaagacactggtgcctggtgtgtaggtgctcctggctttgcagtagtcggtcaggaggtttttgaaccgatagcaacattgctccagggtccacaggaagccatgttctcacagctgctcagccataatccggtacacctggtggtttcgatggcaggtgcggagtttttcgtggatccaggcctctgagaattcccagaaaaatcttggtttctttgtatccccagtgcactcctgccaccttctcatcctccagggcctgccactccagctcgctccaggtcttggcttttctccagattagcacctggccagacttgactctcaccccagccactgagcagtctttcacactctctttttctccagaatttgaagatctagatgctgtgggttttcatcctactccacgtgggagttcactttgggcctatggattggaaaatccagcgtgacctcattttcagaattctgctgagttatttctaggtggttcttcagtccaggttctggatccctccatgcctcctaggagctgctcactatctcctggccacccctgctcttctctgcaggaattcccagagccacatcaggcagggcttggcatcccgttctttaacgtaatgtaatacatttcacacgtcttccgtctccatttggattatcaacatgacgtacataacccgttccattgaccggataacaagcagccatggcttttgtccggcccggggacgcgcgaggcggggac

SEQ ID NO: 4317 - DNA, 2663 bp, Homo sapiens
cgccgcagcgcccgcaccgcgataaaaggggcggccgcgtttcctgacgcgagatccgcgctcgccgccgcccgcccaggcggcgatgacacggcgcccgcggcggcccggaggcgccgggtgggccgtttgctgaccggatcgcggctacccgccagcgtgtccgcggcgccgccgccagcatgggctgtgccccgagcatccacatttccgagcgcctggtggccgaggacgcgcctagccccgcggcaccgccgctgtcgtccggcgggccgcgcctcccgcagggccagaagacggccgccttgccccggacccgcggcgccggcctcttggagtcggagcttcgcgacggcagcggcaagaaggtagcagtagctgatgtgcagtttggccccatgagatttcatcaagatcaacttcaggtacttttagtgtttaccaaagaagataaccaatgtaatggattctgcagggcatgtgaaaaagcagggtttaagtgtacagttaccaaggaggctcaggctgtccttgcctgtttcctggacaaacatcatgacattatcatcatagaccacagaaatcctcgacagctggatgcagaggcactgtgcaggtctatcagatcatcaaaactctcagaaaacacagttattgttggtgtagtacgcagggtggatagagaagagttgtccgtaatgcctttcatttctgctggatttacaaggaggtatgtagaaaaccccaacatcatggcctgctacaatgaactgctccagctggagtttggagaggtgcgatcacaactgaaactcagggcttgtaactcagtattcactgcattagaaaacagtgaagatgcaattgaaattacaagcgaagaccgttttatacaggagtggcaaggaatttactatgccaaaaagaaaaacggagataatatacaacaaaatgtgaagataatacctgtcattggacagggaggaaaaattagacactatgtgtccattatcagagtgtgcaatggcaacaataaggctgagaaaatatccgaatgtgttcagtctgacactcatacagataatcagacaggcaaacataaagacaggagaaaaggctcactagacgtcaaagctgttgcctcccgtgcaactgaagtttccagccagagacgacactcttccatggcccggatacattccatgacaattgaggcgcccatcaccaaggtaatcaatattatcaatgctgcccaggaaagtagtcccatgcctgtgacagaagccctagaccgtgtgctggaaattctaagaaccactgagttatattcaccacagtttggtgctaaagatgatgatccccatgccaatgaccttgttgggggcttaatgtctgatggtttgcgaagactatcagggaatgaatatgttctttcaacaaaaaacactcaaatggtttcaagcaatataatcactcccatctcccttgatgatgtcccaccacggatagctcgggccatggaaaatgaggaatactgggactttgatatttttgaactggaggctgccacccacaataggcctttgatttatcttggtctcaaaatgtttgctcgctttggaatctgtgaattcttacactgctccgagtcaacgctaagatcatggttacaaattatcgaagccaattatcattcctccaatccctaccacaattctacacattctgctgatgtgcttcatgccactgcctattttctctccaaggagaggataaaggaaactttagatccaattgatgaggtcgctgcactcatcgcagccaccattcatgatgtggatcaccctgggagaaccaactccttcctgtgtaatgctggaagtgagctggccattttgtacaatgacactgctgtgctggagagccaccatgcggccttggccttccagctgaccactggagatgataaatgcaatatatttaaaaacatggagaggaatgattatcggacactgcgccaggggattatcgacatggtcttagccacagaaatgacaaagcactttgagcatgtcaacaaatttgtcaacagcatcaacaaacccttggcaacactagaagaaaatggggaaactgataaaaaccaggaagtgataaacactatgcttaggactccagagaaccggaccctaatcaaacgaatgctgattaaatgtgctgatgtgtccaatccctgccgacccctgcagtactgcatcgagtgggctgcacgcatttcggaagaatatttttctcagactgatgaagagaagcagcagggcttacctgtggtgatgccagtgtttgacagaaatacctgcagcatccccaaatcccaaatctctttcattgattacttcatcacagacatgtttgatgcttgggatgcctttgtagacctgcctgatttaatgcagcatcttgacaacaactttaaatactggaaaggactggacgaaatgaagctgcggaacctccgaccacctcctgaatagtgggagacaccacccagagccctgaagctttgttccttcggtcatttggaattcctgagggcagccagagctccttggtcctttcagtactaggcagaacagcccccgatctgcatagcctgtgaaagc

SEQ ID NO: 4318 - DNA, 2093 bp, Homo sapiens
ctaacagaacagtagcaatagtttttaggataccatcttgaatgtctagttggtgtgcaatagcttttctttctaagatggcaataatgattcatttctactacattttgcaaaagtgtttttgttgcttatacacattttcaataaccaaggtagccttcatatgtagccttaaagcattacctcttgattgtatctttagattgatataaagtacttgcatatagagtatttgaagtgatagattattagatttgctctatgtctgaaaagagagctattctgcagtgcctaaatatcatttaaacagtaaatattaataggaaatattgctatatctgaatatataatacaaaagtttgatcatggtgacacaaatgttggacatttttttccttataaaaggctctttttttatatattgtacaatatatttggagattcagagcatagtgactatagtcgaaaactgagattgcacttccaaaattggccacaagtaaataatcttatgaagggattctttatcatgtttcaaacaagtgggttacaagcagactttgagacacttttccacagaaacaatactatgaattggtgattgagttcccaggccaagcctccctcaacaggttcaactctaatatacctaacctgtgatactgaaggtgcctgcctgagttttgggtctctgagacagggtagtgtgagtagtttggaggaaggacagtgcaactttccaccccttttcctaagaacaaggtctttctccttttaatttttccactcattttcacctcctaatgcccttgagatccaggtacactcctgggagttttgttcacctctcccaactgagaaccttcccactgggctccatcctccctcctgaggttcttcatattccagagtcacccacccttctcctcccattagtcagttctctaagtacagctgatgtcatgtggtgctgagaagaaagcagatcacacttcatcacagaaagaatgccttgtgattatcttctccacatctgaaattccttttgacacctgcattgggccgactgccattcccatgactgctgcacctgcgtttttagagaatgcctcataacccactgattctcattcacagagaatgggagaacggaatgaagaaagattccagcagcttatagaaggatagcaatattttgggacagggaaaatcctgtcatacctcatctcttcctcaggaggagttctgagctggtcctgcttttcatagttgtttcttttcttccacttaagaactcatagatttttcttactgtcctaaggaagtccttacctctgaggtatctcctcaatgaatactgttttcaaggctgaaatagttcattatgttaataaccttctttatgttctcagggaaatgcttaggtggtgtcacaaaatgtgccttttcttttctttttttttttttttttttgaggcagagtctcgctctgttgcccaggctggagtgcagtggtgcgatcttggctcactgcaagctccgcctcccgggttcacgccattctcctgcctcagcctcccaaggagctgggactacaggctcccgccaccacgcctggctaatttttttgtatttttagtaaagacgggtttcatcgtgttagccaggatggtctcgatctcctgacctcatgatccgcccgcctctgcctcccaaagtgctgggattacaggcctgagccactgtgcccagccaaaatgtgcctttgcaaagtttgcgaaatcagattttgtatcccaatagaaccaaaatatttatgaggatgctagcattttccaagcatagtaattagttcacaactgagaaatattatgtctgtagtagataaatattagttgtgcattttaatttaattctcctttttccattttgtctcatgaagtaccttattgcaaaaatcccactgagtaatagctcataaattataatctttcaaatagccatgctaccagcgtacaacagtgatacatgtaaccccaaatgtgatgtgagaggacgattactttgtaaataaaacttgttattgacatttt

SEQ ID NO: 4319 - DNA, 5098 bp, Homo sapiens
acatgctcctcctgtccttctggcggagcgtgcttcccgctgcggggacgttcgagcaatggcagccctgctgagatccgcgcgttggttgctgcgtgccggggcggccccgcgcctcccgctctccctgcgcctcctccctggcggcccgggccggctgcatgccgcctcctatctgcccgccgctcgcgccgggcccgtggccggaggactactgagcccagccaggctgtatgccattgctgccaaagaaaaagatattcaagaggagtccactttttcttctaggaagatttccaatcagtttgattgggctctaatgagactagatctttctgttcgaagaactggccgcattccaaagaagcttctacaaaaagtttttaatgatacctgccgctcaggtggcctaggtggtagtcatgccttgcttctactacgtagttgtggttctctcttgcctgaactaaagcttgaagagagaacagaatttgctcataggatatgggacacacttcagaaattaggtgctgtgtatgatgtgagtcactataatgctttacttaaagtctatcttcaaaatgaatataaattctcaccaactgatttcctggcaaaaatggaggaagcaaacattcaaccaaatcgagtgacataccagagattgattgcttcttattgtaatgtaggagatattgaaggtgccagcaagattcttggatttatgaaaactaaggatctcccagttacagaggcagtattcagtgcccttgtgacagggcatgccagagctggtgatatggagaatgcagaaaacattctcacagtgatgagagatgccggaattgagcctggtccagacacatacctcgcattattgaatgcatatgctgagaagggcgacattgaccatgttaagcagactctggagaaggtggagaagtccgagcttcaccttatggaccgtgatttactgcaaattatttttagcttcagtaaagctgggtatcctcagtatgtctcagaaattttggaaaaagttacatgtgaaagaagatatattccagatgcaatgaacctcattttacttttagtcactgaaaaattggaagatgtagcgttgcaaattttactagcatgccccgtatcaaaggaagatggcccaagtgtctttggcagtttctttttacaacactgtgtgactatgaatacgcctgtggagaagctaacagactactgtaagaagttaaaggaagtccagatgcactcctttcctctgcagttcaccctccattgtgctttactcgccaataaaactgatttggcaaaagccttaatgaaggctgtgaaggaggaaggttttcctatcagacctcactatttctggccattgctagttggacgtcggaaggaaaaaaatgttcaaggtataattgaaatcctcaaaggaatgcaagaattgggagtacatcctgatcaggaaacatatacagattatgtgattccatgctttgatagtgtaaactcagcacgagccattttgcaggaaaatggatgtctgtctgatagtgatatgttttctcaagctggattgagaagtgaagcagcaaatgggaacttagactttgtattatcatttttgaaatcaaatacattgcccatctcgctgcagtctataagaagtagcctactgctaggcttcaggaggtctatgaatataaatctttggagcgagataacagaattgttgtacaaggatggacgttattgccaggagcctcgaggaccgacggaagctgttggctattttctttataacttgattgacagcatgagtgactcagaggtacaggccaaggaggagcatttgagacaatacttccatcagctggagaagatgaatgtaaaaattcctgaaaatatctacagaggcattcgtaatctcctggaaagctaccatgttcctgaattgattaaggatgctcacttgttggttgagagtaagaatttagactttcaaaaaactgtgcaacttacatcatctgaattggagtccacacttgaaacactaaaagctgaaaatcaacctataagagatgtcctaaagcaactcatattagtgctttgttcagaagagaatatgcaaaaagcccttgaattgaaagcaaaatatgaatccgacatggttactggtggctatgcagctttaataaatttatgctgtcgacatgataaagtagaagatgccttgaacttgaaagaagaatttgaccgcttagattcatctgctgtccttgacaccggcaagtatgtaggccttgtaagagtattggcaaagcatggcaagctccaagatgctattaacattctgaaggagatgaaagagaaggatgttcttatcaaagatacaacagccttgtcctttttccacatgctaaatggcgcagctttaagaggtgaaattgaaacagtaaaacagttgcatgaagccatcgtgactctagggttagcagaaccatccaccaacataagtttcccattggtcactgtacacttggaaaagggcgacctatctactgctcttgaggtcgccattgactgctatgaaaagtataaagtattaccaaggattcatgatgtcttgtgtaaactggtagagaaaggcgagactgatctaattcagaaagcaatggactttgtgagccaagaacaaggtgaaatggtgatgctctatgatctcttctttgccttcctacaaacaggaaattacaaagaggccaagaagatcattgagactccagggattagagctcgatctgcaaggcttcagtggttttgtgacagatgtgttgcaaataatcaggttgaaactctggaaaaattagtggagctgacacagaagctatttgaatgtgatagagaccagatgtactacaatctgctaaaactgtataaaataaacggtgactggcaaagagctgatgcagtctggaataaaatccaagaagaaaatgttattcctcgtgaaaagacattaagattattagcagaaatccttagagagggtaaccaggaagttccgtttgacgtacctgagttgtggtatgaagatgaaaaacattccctgaattcttcgtcagcctcaaccacagaacctgatttccagaaagatatattgattgcctgccgattgaaccaaaaaaaaggggcatatgatattttcctgaatgcaaaagagcaaaacattgtgtttaatgctgaaacctacagcaatctcattaaattactgatgtcagaagattattttacacaagcaatggaagtgaaagcattcgcggagacccacatcaagggcttcacactgaacgatgctgccaacagccgcctcatcataacgcaagttaggcgggattatttgaaagaggctgtgacaacactgaaaacagtattggatcagcagcagaccccttctaggttagcagtgacccgtgtcatccaggcattggccatgaagggtgatgttgaaaacatagaagtagttcagaagatgttaaatggactcgaagactccattggactttcaaaaatggttttcatcaataacattgctttggctcaaataaagaataataacatagatgccgcaatagaaaacattgaaaatatgcttacttcagagaataaagtcattgaaccccaatacttcggcttggcatacttattcagaaaagtaatagaggagcagttggaaccagcagttgaaaagagtaacatcatggcggagagattggccaatcagtttgcaatttataaacctgtcactgattttttccttcaacttgtggatgcaggcaaggtggatgatgccagagctctcctacagagatgtggtgcaattgctgaacaaaccccgattttgttgttgttcctccttaggaattctaggaaacaaggaaaggcatcaactgtgaaatctgtgttagaattgattcctgaattaaatgaaaaggaagaagcatacaattccctcatgaaaagctatgtctcagagaaagatgtcacatctgctaaagcactgtatgaacatttgactgcaaagaatacaaaattggatgatctgtttctaaagcgttacgcatctttgctgaagtatgctggagagcctgtccctttcattgaaccccctgaaagctttgaattttatgcacagcagctaagaaaattgagggaaaactcttcttgaaataaccaggcgatactttgttttgtatatatttgtgattctgtgtctacatgttattttgaagtatatctgagggaaaaataaatgaaaattttctttatgtacttatgtatgtgtgatgcatgttcaaagtcttattgaccataactctgtgcacttggttattggacatttttggagtttttttctctgggaaaaatcgatagtgttttcttcaatgctgctgctgtgtgaagccatactttttcaggattcttcccctaattggctctttggtttccctgctctgtttcatttatttcattaaaatgttattcctttatttaagattcacttattagtctgctgtttctctgaaaaattttagagctaggtatagtgaccgtgaactttctaacgcataatattctgtgatacagccattccgtacatgtgtgaagtcctgcataactttcgaactttgttaaatgttggcactaggagtcatcagatctaggcttcatcattttccagtgagaagcagagacccaaagggcctgttacttgtgcttggtcaggggactgtctgtcatgcctggaggctcttcggcacacttccccatctttcccttctgccactgtggcttcaagcacctctgttcatagagcgtctctgaaattgagtctcggtcatgacttatcccgaagtagagcaatgtgtttcctctcattgtagtttcaggactttgtcagtacaagctctgccctaggcttgttactttatactcatatcctgaaaagatgtgatttcatctatgaaggggtaaaatattggtttgtatttaattgtttgaaataaaagtgatccctatattg

SEQ ID NO: 4320 - DNA, 3050 bp, Homo sapiens
tgtgtccctgcggcgctaagaaggggagactgaggctgaggctggggaacatcgggcagcatgagcggctgcgggctcttcctgcgcaccacggctgcggctcgtgcctgccggggtctggtggtctctaccgcgaaccggcggctactgcgcaccagcccgcctgtacgagctttcgccaaagagcttttcctaggcaaaatcaagaagaaagaagttttcccatttccagaagttagccaagatgaacttaatgaaatcaatcagttcttgggacccgtggaaaaattcttcactgaagaggtggactcccgaaaaattgaccaggaagggaaaatcccagatgaaactttggagaaattgaagagcctagggctttttgggctgcaagtcccagaagaatatggtggcctgggcttctccaacaccatgtactcacgactaggggagatcatcagcatggatgggtccatcactgtgaccctggcagcgcaccaggctattggcctcaaggggatcatcttggctggcactgaggagcagaaagccaaatacttgcctaaactggcgtccggggagcacattgcagccttctgcctcacggagccagccagtgggagcgatgcagcctcaatccggagcagagccacactaagtgaagacaagaagcactacatcctcaatggctccaaggtctggattactaatggaggactggccaatatttttactgtgtttgcaaagactgaggtcgttgattctgatggatcagtgaaagacaaaatcacagcattcatagtagaaagagactttggtggagtcactaatgggaaacccgaagataaattaggcattcggggctccaacacttgtgaagtccattttgaaaacaccaagatacctgtggaaaacatccttggagaggtcggagatgggtttaaggtggccatgaacatcctcaacagcggccggttcagcatgggcagcgtcgtggctgggctgctcaagagattgattgaaatgactgctgagtacgcctgcacaaggaaacagtttaacaagaggctcagtgaatttggattgattcagtttcttgtgttttttctgaacactccaggagaaatttgcactgatggctcagaaggcttacgtcatggagagtatgacctacctcacagcagggatgctggaccaacctggctttcccgactgctccatcgaggcagccatggtgaaggtgttcagctccgaggccgcctggcagtgtgtgagtgaggcgctgcagatcctcgggggcttgggctacacaagggactatccgtacgagcgcatactgcgtgacacccgcatcctcctcatcttcgagggaaccaatgagattctccggatgtacatcgccctgacgggtctgcagcatgccggccgcatcctgactaccaggatccatgagcttaaacaggccaaagtgagcacagtcatggataccgttggccggaggcttcgggactccctgggccgaactgtggacctggggctgacaggcaaccatggagttgtgcaccctagtcttgcggacagtgccaacaagtttgaggagaacacctactgcttcggccggaccgtggagacactgctgctccgctttggcaaggtaaccaggccctcccaggcctgggtcgcaagcggtcctccaatttggccagcattcatgagactactttttgtcaagcatcctttgggaccaggcctagaacagaaatgttgatcaccctggagggatggggtggtgaggtcaggctgactttgtcagcctggggcccacttagctactcggatgggtacccttgctgggtgagttttctgcagtgtttttctgtgcacctttcaggtagagaggctccctagaatcgggagggcagctccacctggggcctgaatctagggacctgattggtggggcccttgctgctgaaggtggcagtagcacagtaagcactggcttctggtctcagccaagcttctgggacctggtcttgccttaacccctccctgaatctagagctcaaagagaagggaaaacagaaggtggctgggagccgttctcccacaacctgaagagaaaggtgttattgactccactttctcaaggaacacaggagactaagacaggcaaagatgcagcccagggagggaccatgtgggggactggtctaggtagtgagtccccacttggagcctctgtgatcccagaccatcatggaggagcagctggtactgaagcgggtggccaacatcctcatcaacctgtatggcatgacggccgtgctgtcgcgggccagccgctccatccgcattgggctccgcaaccacgaccacgaggttctcttggccaacaccttctgcgtggaagcttacttgcagaatctcttcagcctctctcagctggacaagtatgctccagaaaacctagatgagcagattaagaaagtgtcccagcagatccttgagaagcgagcctatatctgtgcccaccctctggacaggacatgctgaggcaggggacagtgtcccctgctaccgcccgcccctacccatggcccgttgctggatgactgttactcttttttcagaaggtgttgggattatcacaggttaagccttttgttccccgtctgcacctgaagggttgtcgcctggcctgggagagcctcttccaggttttgacctgcaggcagtgctctctaacaggaccatcacagcttctgaactgagccggagagagagaatggaattgctgacccctggaactggcgggtattctggtcattgaggagacaccatagtggaaactggggcttatgctgctgcctccagggtgtgaggtgggtggggacctgtgtcaggtgtggatagccatttctgctcaaccacacattctctaagaaacagcttgaaagctctgtctgggtcattcatttaaactagaagcagaggcacttaaaacatgtaccaggaaccatttaacaaagaatataaaatgtcacaatctg

SEQ ID NO: 4321 - DNA, 1401 bp, Homo sapiens
gttgtttccgggaagcgggactccaaatgggtcgcagtcgcagccgctctccacggagggaacgtaggcgttcccggtccacatcccgggagagagaacgcaggcgccgagaaaggtccaggtctcgggagagagatcggagaaggagccgctcgcgatccccgcaccgaagacgctcccgatctccaagacgacatagatccacatctccttccccttctcgactgaaagaaagaagagatgaggaaaagaaagaaacaaaagaaacaaagagcaaagaacggcagattactgaggaagacttagagggcaaaacagaggaagaaatagaaatgatgaagttaatgggatttgcctcctttgactccacaaaagtaagaaggtggatggctctgtaaatgcctatgccataaatgtctctcagaagaggaagtacaggcagtacatgaatcgaaaaggtggattcaacagacctttggatttcattgcatgagaattgaagtgttgaaggatgattttttttcccctcatcttggtcagagagtggattttgtattttgtatttaacttgcattcaaaaaacaggatctcagttctcctttcttgtaaagtaagaaaatcttatttatgatatatgcagttaacttaccttgcctcaacagaagaaaggttaaatattacatttttttcttttaggaaatatcatttgtggcaggcgtcaaccccattttatttgtccttattcctgtggaagcagtatatgttttcttcctgaatgctcattaggacttcttaaaaaacatgaaagtaatttggaagtaagtttatccaataaagcagtatttctacccttttagatttgataaatatttttattactaaagaatctccccagacattttcttttttttttcacacatagatttaagtatcttgattgttagtagtctaaaaatgggaagaatgaaaaagcataactagatttttctatcttctgtggtcgcccgcccccccccaaaaaaataccatttatggttctctccgcaagtataaaagcattacatgcaaaaaaaagatctcagagaaaacaaaagtaaaagaaaagcagaaaatcacctgttatctactcccagaaataatcaatttcaacattttggtatatgtttttccaggcttctttgggttgatcccacctatgagatcagaatatgtatgcagttctttctttaacccttttttctcctatgtactgtgaacatttaaaaagtacttttaaatattctttggaaacttagcttttagtaactacttggttgtatcataatttattaactaatgttttattggtaaacattggcttgcctcccatgacttgccattataattaaaactgtgactact

SEQ ID NO: 4322 - DNA, 1242 bp, Homo sapiens
atggaatcctgctcacaaaatcactttaagatcttttcgaagctgttaatttttcttagtgttgtggacactgcagacttgtccagtgctcccacggcctgtacggacactgtggaaggcctccctctgtcggctttttgccatctgtgatatgccataggtgtgacaatccgagcagtggagtcattcagcgggagcactgcgcgctatcccctcacattctctatgtactatgtatgtatgtattattattattgctgccaagagggtctgatggcacgttgtggggtcggggggtggggcggggaagtgctctaacttttcttaaggttttgttgctagcccttcaagtgcactgagctatgtgactcggatggtctttcacacggcacatttggacatttccagaactaccatgagatggtttagacgggaattcatgcaaatgaggggtcaaaaatggtatagtgaccccgtccacgtcctccaagctcacgaccttggagccccgtggagctggactgaggaggaggctgcacagcgggagagcagctggtccagaccagccctgcagcccccactcagccggcagccagatggccccgcaaggcctccagggatggcccctagccacaggccctggctgaggtctctgggtcggtcagtgacatgtaggtaggaagcactgaaaatagtgttcccagagcactttgcaactccctgggtaagagggacgacacctctggtttttcaataccaattacatggaacttttctgtaatgggtacaatgaagaagtttctaaaaacacacacaaagcacattgggccaactatttagtaagcccggatagacttattgccaaaaacaaaaaatagctttcaaaagaaatttaagttctatgagaaattccttagtcatggtgttgcgtaaatcatattttagctgcacggcattaccccacacagggtggcagaacttgaagggttactgacgtgtaaatgctggtatttgatttcctgtgtgtgttgccctggcattaagggcattttacccttgcagttttactaaaacactgaaaaatattccaagcttcatattaaccctacctgtcaacgtaacgatttcatgaacgttattatattgtcgaattcctactgacaacattataactgtatgggagcttaactttataaggaaatgtattttgacactggtatcttattaaagtattctgatcct

SEQ ID NO: 4323 - DNA, 5841 bp, Homo sapiens
gttctctgctgctactgtaaaaacgaaatgagtggtcctgctcaggttccaatgatgtccccaaatggttctgtgcctcctatctatgtgcctcctggatatgccccacaggttattgaagacaatggtgttcgaagagttgtcgtggtccctcaggcaccagagtttcaccctggtagtcacacagttctccaccgttctccacatcctcctctacctggtttcattcctgtcccaactatgatgccgcctccaccacgtcatatgtactcacccgtgactggagctggagacatgacaacacagtatatgccacagtatcagtcttcacaagtctatggagatgtagatgctcactctacacatggaaggtccaactttagagatgaacgatctagtaaaacatatgaacgtttgcagaaaaaattgaaggatcgccaaggaacacagaaagataaaatgagcagtccaccatcatcaccccagaaatgcccttctcccattaatgaacataatggacttataaaaggacaaattgctggtggtataaacacaggatcagcaaaaatcaagtctgggaaggggaaaggtggtacacaagttgatacagaaattgaagaaaaagatgaagaaactaaagcatttgaagcacttctttccaacattgtcaaaccagtggcctccgacatccaggcaaggacagtagtacttacctggtcaccaccttccagcctcattaatggtgaaacagatgaaagtagtgtaccagagctctatggttatgaagttctgatctcaagtactggaaaagatgggaaatacaaaagtgtatatgtaggagaagaaacaaatatcactttaaatgatctcaagccagccatggattaccatgcaaaagtccaggcagaatataattctataaagggaactccttcagaggctgaaatctttaccaccttgagctgtgaacctgatatacctaatccaccaaggatagccaatcggaccaaaaattcactcactttgcaatggaaggcacctagtgacaatggttctaaaatccaaaactttgtattagaatgggatgaaggaaaaggaaatggagaattttgtcagtgttacatgggctcacagaaacaatttaaaattactaaactttcaccagcaatgggctgtaaattcagactatcggccagaaatgactatggtacaagtggttttagtgaagaagtcttatattacacctcaggctgtgctccttctatgccagcaagtcctgtattaaccaaggctggaattacttggttatccttacaatggagtaagccctcaggaacaccatcagatgaaggaatttcttacattttagagatggaggaagaaacttcaggatatggttttaagcctaaatatgatggagaagatcttgcttacacagtgaaaaatctcagacgtagtactaagtataaatttaaggttattgcttacaactcagaaggtaaaagtaatccaagtgaagtagtagaatttactacttgccctgataaaccaggcatacctgtaaagccttcagtgaaaggaaagatacattcacacagttttaaaataacctgggatccaccaaaagacaatggcggagcaaccatcaataaatatgtagtggagatggcagaaggttctaacggaaacaaatgggaaatgatatacagtggtgctaccagggaacatctttgtgatcgactgaatccaggctgtttctatcgtttacgagtttactgcatcagtgatggaggacagagtgcggtctctgaatctttacttgtgcagactccagctgtgcctcctggcccatgcctccctcccagattacagggtagacccaaagcaaaagaaatacagttacgatggggaccccctctggttgatggtggatcacccatttcctgttacagtgtggaaatgtctcctatagaaaaagatgaacctagagaagtttaccaaggttctgaagtagaatgtacagtgagcagccttcttcctggaaagacatacagcttcagactacgtgcagctaacaaaatggggtttggaccattttcagaaaaatgtgatattactacagcccctgggccaccagatcagtgcaagccccctcaagtgacatgtagatctgcaacttgtgcacaagtgaattgggaggttcctttgagtaatggaacagatgtcactgaatatcgactggagtggggaggagttgaaggaagtatgcagatatgttactgtgggcctggtctcagttatgaaataaaaggactttcaccagcaactacctattattgcagggtccaggctctgagtgttgtgggtgcaggccctttcagtgaagtagtagcctgtgtgactccaccatcagttcctggcattgtgacctgtcttcaagaaataagcgatgatgagatagaaaatccccattattcaccttctacatgccttgcaataagctgggaaaagccttgtgatcatggttcggaaatccttgcctacagcatagactttggagataaacaatccctaacagtgggaaaggttacaagctatattatcaacaatttgcaaccagatacaacatacagaatacgaattcaagccttgaatagccttggagctggtcctttcagccatatgataaaattaaaaactaagcctctccctcctgatccacctcgtctggaatgtgttgcctttagccaccagaaccttaagctgaaatggggagaaggaactccaaagacattgtcaaccgattctattcagtaccaccttcagatggaggataagaatggacggtttgtatccctatacagaggaccatgtcatacatacaaagtacaaagacttaatgagtcaacatcctataaattctgtattcaagcttgtaatgaagctggggaaggtcccctctcccaagaatatattttcactactccaaaatctgtcccagctgccttgaaagcccccaaaatagagaaagtaaatgatcacatttgtgaaattacatgggagtgtttacagccaatgaaaggtgatccagttatttacagtcttcaagttatgttgggaaaagattcagaattcaaacagatttacaagggtcccgactcttccttccggtattccagccttcagctgaactgtgaatatcgcttccgtgtatgtgccattcgccagtgccaagactctctgggacaccaggacctcgtaggtccctacagcaccacagtgctcttcatctctcagaggactgaaccaccagccagcaccaacagagacactgtggaaagcacaaggacccgacgggcactgagtgacgagcagtgtgctgccgtcatccttgtgctgtttgctttcttttccattttgattgcctttatcattcagtactttgtaatcaagtgaaaatataactttattttttaactctattacattttattttgtcatgtactaaaattatttctgtattgcttttataaaaaacagtggcatttagcactggcattgagactatagcacatcatttttgccattttcagtgcttatattgttaggtagaggctggcactttattagaatgcaagccacaaaaatatcaattttgttttttttgttagggtgggtcttctttttttctttccctctctctttttttaacaaatgccttcttatagaaaaactttctaagaggcaacaatttagaatggatattttgacgaatcggcatgagtgtaacagtgataacctgatctgtttgttttaaagattattaccaagtgaaaaattcagaatgaatagaatttacactaacatgctatataaaatgttaaagtctgatgctgtgaaagcaatctagtgctatatttctacctcctcatttgtcttaattatttggtaagtgggattatgatgagtaactggaggggcttagaaacaaaaactggatgaaagagtatgcatgaagaaaagcttctttgataaatgtggagttcttcattataaatatatattcatgaattcacagataagtacttaaagaacagacagtttacttggcctaaaaatattttgatgtttactcaaaaagtacctcttcaggtcttgagaacatggaaaagaattgagtgcttttaaatactttttagaaagtaatcataaaagtaaattgaatttcaaacctatttggcttctgttttgtgaacctttgaactatatgtatgtgtataagggtatacacatacatatatggcatataacaagtgtacacatatacacataacaagtgtagaagtatatattacatacatacactcactctgtctggtataggctaattttgaagaactcccataagtttctgctgcttctcccataactgctgccaccaccatcagaattcataatcaaacctaacctttttgtttggggcaccaaatctgaagacaaaattaatttgcaccagtaaacttcaagctgctttctttcttgaaaactaaacgtttaacgtataatgtctgtttggatactgttccaaattgttgattgcatgtggttaatgttgcattagagcactttgcaattgcataattcattaatgttttgtgagcttgcatttgtgagttattggatgatcagactgaattttgtcaagtatcacattgtacatcttgcctagatgtcgatgactgcaagtaataatacagtttataatgaaactatctacaattcttgttttagcacatctgttatccgtaaaacacctgtaactagcttttttaatttattatttgaattttaggatagcgaatcactaatttttagttgctgaggttggcattttagtgattattaagcacttctgtcagtctttgaaaaaagaacgtattttttgtgctttgaagatctctgaagaatttcttttataatagaatgggcatgtattgtaacagttttatgtcaaatgatctgtgctgtagaaaaacattaacccttgttcaaaaaagaaatggataaacttggcctttctaagtggtaagaatgacctgtcactataatatactgtatgtttacattttatttaaatttaatctcttatgtatagggtgataaccttccccagaaacaacagtgattgcgattgttttctagaaacttctttaaagtgccacatttggcagtacaaatgagtctgagtgtaatagcccagagatttatatatagttgaatgtctaaaatggtaaaatgtgccactgtgtcaagttacagtggcttatgtttttcatagtaattcaaatgaacttcctatttttgatagtaaatgtcatttaatagtatacttgccatttgagcctcactgcaaaattagtgcagaggagaaaacaatttttaatgtaatcttgattttacctcatatactgtacattccaaaaactctaaactttttaaagattatagatacactaccaaacatatcaccttaaaattgtataaggctgaatgaacttcatacaaatgaaaaaaatctcataaaaatacataaactatgtagcaaaagtatctgtaaaatccatggaaaataaaagttgtatcattctttttgagatacgtttattgtattcatatatattcattatttgctacctgtttaagaaagtgaaatgttatggtctcccctcttccaatgagcttaaaacatttttcccaacagtatataaatcttcaacatgagaggatgtatatttattatataaagcccagtaaagaataaaattagaagttttatcctag

SEQ ID NO: 4324 - DNA, 1808 bp, Homo sapiens
ggagtatagggcttgaactgagagcctggcctcccagaaggttttaatagacctacggcacagaaattgacacagcccggaaaaggcccacaaagagaagcccaaccagccagcccccaggccgccccgccagggacccaccaatgaggcacagatggcagccgctgccgccctagcccggctggagcagaagcagtcccgggcctggggccccacatcgcaggacaccatccgaaaccagggtgagaaaggaacttcaagccgaagccaccgtcagcgggagccccgaggccccagggaccaacgtggtatctgagcccagagaggaaggctctgcccacctggctgtgcctggcgtgtacttcacctgtccgctcactggggccaccctgaggaaggaccagcgggacgcctgcatcaaggaggccattctcttgcacttctccaccgacccagtggccgcctccatcatgaagatctacacgttcaacaaagaccaggaccgggtgaagctgggtgtggacaccattgccaagtacctggacaacatccacctgcaccccgaggaggagaagtaccggaagatcaagctgcagaacaaggtgtttcaggagcgcattaactgcctggaagggacccacgagttttttgaggccattgggttccagaaggtgttgcttcccgcccaggatcaggaggaccccgaggagttctacgtgctgagcgagaccaccttggcccagccccagagcctggagaggcacaaggaacagctgctggctgcggagcccgtgcgcgccaagctggacaggcagcgccgcgtcttccagccctcgcccctggcctcgcagttcgaactgcctggggacttcttcaacctcacagcagaggagatcaagcgggagcagaggctcaggtccgaggcggtggagcggctgagcgtgctgcggaccaaggccatgcgggagaaggaggagcagcgggggctgcgcaagtacaactacacgctgctgcgcgtgcgcctccccgatggctgcctcctgcagggcactttctacgctcgggagcggctgggggcggtgtacgggttcgtccgggaggccctgcagagcgactggctgccttttgagctgctggcctcgggagggcagaagctgtccgaggacgagaacctggccttgaacgagtgcgggctggtgccctctgccctcctgaccttctcgtgggacatggctgtgctggaggacatcaaggccgcgggggccgagccggactccatcctgaaacccgagctcctgtcagccatcgagaagctcttgtgaaataaaagcagggttggcctcagccctgtgggtctgtctcatgctctccctgttcctctccccgccaccccagggcctccaagccacctctggaaatacttggctctgccccatgggcacgggaggggcgccagccgtggagctgtggaattgggccccgtggcagagcccccatcccttgggggctgtggggatgcgcccaagcccccgagggagaggcctggggacaccaacaaatctaagccctccctagctgcttggtaactgtgtcatgaagctgccggacagacacacgtggcatctccctgggcaggagagcaggcctgcagcatgggtcccgttcccgtgtgccgtgggtggcagtggctgcacctggcactagggctgctctgtggatgtgggtgacaacggcaggaggggacgctggccttcctgcacatagacctgcagttagtaaatcataagcccaaataaacaggttgtttg

SEQ ID NO: 4325 - DNA, 1358 bp, Homo sapiens
cgaggatgtcggtgaattacgcggcggggctgtcgccgtacgcggacaagggcaagtgcggcctcccggagatcttcgaccccccggaggagctggagcggaaggtgtgggaactggcgaggctggtctggcagtcttccagtgtggtgttccacacgggtgccggcatcagcactgcctctggcatccccgacttcagggacaaactggcagagctccacgggaacatgtttgtggaagaatgtgccaagtgtaagacgcagtacgtccgagacacagtcgtgggcaccatgggcctgaaggccacgggccggctctgcaccgtggctaaggcaagggggctgcgagcctgcaggggagagctgagggacaccatcctagactgggaggactccctgcccgaccgggacctggcactcgccgatgaggccagcagatccggcccagcgggaacctgccgctggctaccaagcgccggggaggccgcctggtcatcgtcaacctgcagcccaccaagcacgaccgccatgctgacctccgcatccatggctacgttgacgaggtcatgacccggctcatgaagcacctggggctggagatccccgcctgggacggcccccgtgtgctggagagggcgctgccacccctgccccgcccgcccacccccaagctggagcccaaggaggaatctcccacccggatcaacggctctatccccgccggccccaagcaggagccctgcgcccagcacaacggctcagagcccgccagccccaaacgggagcggcccaccagccctgccccccacagaccccccaaaagggtgaaggccaaggcggtccccagctgaccagggtgcttggggagggtggggctttttgtagaaactgtggattctttttctctcgtggtctcactttgttacttgtttctgtccccgggagcctcagggctctgagagctgtgctccaggccaggggttacacctgccctccgtggtccctccctgggctccaggggcctctggtgcggttccgggaagaagccacaccccagaggtgacagctgagcccctgccacaccccagcctctgacttgctgtgttgtccagaggtgaggctgggccctccctggtctccagcttaaacaggagtgaactccctctgtccccagggcctcccttctgggccccctacagcccaccctacccctcctccatgggccctgcaggaggggagacccaccttgaagtgggggatcagtagaggcttgcactgcctttggggctggagggagacgtgggtccaccaggcttctggaaaagtcctcaatgcaataaaaacaatttctttcttgca

SEQ ID NO: 4326 - DNA, 1838 bp, Homo sapiens
cgccgtgcgcaggcgcggagctagacctcgctgcagcccccatcgcctcggggagtctcacccaccgagtccgcccgctggcccgtcagtgctctccccgtcgtttgccctctccagttcccccagtgcctgccctacgcaccccgatggcggagctgcggcctagcggcgcccccggccccaccgcgcccccggcccctggcccgactgcccccccggccttcgcttcgctctttcccccgggactgcacgccatctacggagagtgccgccgcctttaccctgaccagccgaacccgctccaggttaccgctatcgtcaagtactggttgggtggcccagaccccttggactatgttagcatgtacaggaatgtggggagcccttctgctaacatccccgagcactggcactacatcagcttcggcctgagtgatctctatggtgacaacagagtccatgagtttacaggaacagatggacctagtggttttggctttgagttgacctttcgtctgaagagagaaactggggagtctgccccaccaacatggcccgcagagttaatgcagggcttggcacgatacgtgttccagtcagagaacaccttctgcagtggggaccatgtgtcctggcacagccctttggataacagtgagtcaagaattcagcacatgctgctgacagaggacccacagatgcagcccgtgcagacaccctttggggtagttaccttcctccagatcgttggtgtctgcactgaagagctacactcagcccagcagtggaacgggcagggcatcctggagctgctgcggacagtgcctattgctggcggcccctggctgataactgacatgcggaggggagagaccatatttgagatcgatccacacctgcaagagagagttgacaaaggcatcgagacagatggctccaacctgagtggtgtcagtgccaagtgtgcctgggatgacctgagccggccccccgaggatgacgaggacagccggagcatctgcatcggcacacagccccggcgactctctggcaaagacacagagcagatccgggagaccctgaggagaggactcgagatcaacagcaaacctgtccttccaccaatcaaccctcagcggcagaatggcctcgcccacgaccgggccccgagccgcaaagacagcctggaaagtgacagctccacggccatcattccccatgagctgattcgcacgcggcagcttgagagcgtacatctgaaattcaaccaggagtccggagccctcattcctctctgcctaaggggcaggctcctgcatggacggcactttacatataaaagtatcacaggtgacatggccatcacgtttgtctccacgggagtggaaggcgcctttgccactgaggagcatccttacgcggctcatggaccctggttacaactctgaacctatcctcggagctctgccctcccgtcctggaacgtctttctgccctgaggagagggtagtcagcatctccaattttcagcagctcaagaaccttggcccccacaggacttcgcagatgtcacattgcccctcagtcccctgaatgcccttcggacccaaccccaattccccaagcccctgaccccctagctgccggggttcccactcccagtgccacaaccccctcacctccctggcagcccctcagcgagcctgaggcccagcacccgctggctccccagcacatggtcccctcccatgggctgttgcccagggaaccggggcgcggtgggaacgagctgctggcctcggcatgtttcaataaagttgctgtgctgggagctactc

SEQ ID NO: 4327 - DNA, 2601 bp, Homo sapiens
gcccgctggcccgtcagtgctctccccgtcgtttgccctctccagttcccccagtgcctgccctacgcaccccgatggcggagctgcggcctagcggcgcccccggccccaccgcgcccccggcccctggcccgactgcccccccggccttcgcttcgctctttcccccgggactgcacgccatctacggagagtgccgccgcctttaccctgaccagccgaacccgctccaggttaccgctatcgtcaagtactggttgggtggcccagaccccttggactatgttagcatgtacaggaatgtggggagcccttctgctaacatccccgagcactggcactacatcagcttcggcctgagtgatctctatggtgacaacagagtccatgagtttacaggaacagatggacctagtggttttggctttgagttgacctttcgtctgaagagagaaactggggagtctgccccaccaacatggcccgcagagttaatgcagggcttggcacgatacgtgttccagtcagagaacaccttctgcagtggggaccatgtgtcctggcacagccctttggataacagtgagtcaagaattcagcacatgctgctgacagaggacccacagatgcagcccgtgcagacaccctttggggtagttaccttcctccagatcgttggtgtctgcactgaagagctacactcagcccagcagtggaacgggcagggcatcctggagctgctgcggacagtgcctattgctggcggcccctggctgataactgacatgcggaggggagagaccatatttgagatcgatccacacctgcaagagagagttgacaaaggcatcgagacagatggctccaacctgagtggtgtcagtgccaagtgtgcctgggatgacctgagccggccccccgaggatgacgaggacagccggagcatctgcatcggcacacagccccggcgactctctggcaaagacacagagcagatccgggagaccctgaggagaggactcgagatcaacagcaaacctgtccttccaccaatcaaccctcagcggcagaatggcctcgcccacgaccgggccccgagccgcaaagacagcctggaaagtgacagctccacggccatcattccccatgagctgattcgcacgcggcagcttgagagcgtacatctgaaattcaaccaggagtccggagccctcattcctctctgcctaaggggcaggctcctgcatggacggcactttacatataaaagtatcacaggtgacatggccatcacgtttgtctccacgggagtggaaggcgcctttgccactgaggagcatccttacgcggctcatggaccctggttacaagtgagaaggccctttttcttctccctccttcctttcatagacttccttgcccacccctcctcttctcccttggcagctcttgatggcaccccttcctggggggctggtcatgaatgcctcatggattcagggcctggggcctgtgtgtaggtatggagtgtggatgctgctacccactccagcagcttaggagcacttcctgaccttctccccctgtcacctgagacacaagtgttaactctccaggccctggctcttggtaattctggttccccgtggaaatccaggttggagggatataagactttctgcaccttgggtaaaccaaggtacaagaactcaaggatgaagcaagatgggaggatgtgtggaggccactctccaatggctacatggaaatcccaccagaattcagacagtggcatgtgtgcctggaccagggctgggcaggcctcagtgggaagagcctccccttcttagcctacccccatctgacagccctcccgttcctcctgagtttgtgtgaccagagacctgctggcttatccggagcactttgtccttcctttgctcttctggctggagcgagcttcagagctgttgccaagcagggtaccagggcctcagagccataggcctccttccagtccccaccccgtcccgggtctctaacaggtgctcaacctactccaccacactcccgagtgtcttggagggacagcatccttttttggcatttgtttgttgcgggtggggagaggattgaacccttaacctcacctcgctcgcaagtatcaagaaagggaacctgaccctaaacctaaaggtggccatacctggtttgtgaatgtattggagaggcatgcagcattacagtagaggggaagagaatgatgctaggtttgtgagtttcacccagtctggggagtctgtgaagcatatgtagtcaatacagacacactttttgtccctgcatgtctacagaatttctcctccttcaggccaggcccctcttctcccgccaccaccaaaatacaacccttaattaaaacaaacagcaaacaaaggacaccaaccacactccccagactaagccgagatagaaatggaagctagtgctttagggatattgtgttccataaattatcttgcctttttccactgttgttattatatcgtttcataacaaaattactttgaaccataaagttataaatacattttaaaagtc

SEQ ID NO: 4328 - DNA, 1925 bp, Homo sapiens
ccttagataggtaactgttgccaggaaaatgccctgtgtggattggcctggactaagcaggatcctcctctaaagagagagatgagatgaatgcctgacccaagtctgggatcttgggtgggaagcgtgtggatagtaggtcagaggtcagcagtgtctgtggtgtaggatgtaatcccatctccacagagctgcatacaagtgtgtttaagtgtgtgcaagtgattaactttgattagtagtttcaactctttacaatgaacatatttatcttttttaaaaaataaagccattttaaaagatcttgccataaaacaatcattccttaagtcaccacttaggatagacctagaatatttgtcctttctcaagagcaccagagagttttctggtaatccacgcaataaacagttataaaaggtaattgttgagatcaggggaagatggcagataggaggcagtgctaatgtgtagctcccacatggatggacaaaacaccatgtggagactcacactgtgaccctgttgtgctccaagaactatcataggaacatactgggaaaaccaaaagaattcacggatcctttgaaagaagacgcacaccactgtaaattctgtggaacaggagaaaaactgtcttggaggaaggcatccttctattctactgatcagaaagctggacaaagtcccactgccaggctacacagttggtgccatttgcggaggcccacccgcagcggtcacgtgaaggaccgagcgccgcgcgcccaggcggggcctccggcctgcacgaggagggcagagtccgttgcggctgccgccccgacgcccgcgcatccccgctcgccgcgcccgccgccgcgatgtccggggccggcctagccgcggtggtgagctgcctgcgcccgcagcccggcgaggagccgcagacccatgagaccttctgccagaaagtgggcctgctgtgcacgcttcagggtaagctgcagccccaggactggacattgttggacgaactgctgcagggcctgcaaacactgctgctcatgattttgtggcaggcttcccgtggcctcttcctgcactaccacgtggaggccctaaccctgcgtcgcatcagtagcttccgccagtacaagtatgacctggtggcagcgggcaaggctttggagggcatgttctgcaagctcaaccacctcctggaacacccgcaccagctgttcttcctctacctgctccccactctgtcccgcttcgtctccatcggcctctacatgcccgccaccagcttcttgctcctggtccttggtttcaaggctctgcaactgtggatgcagctgcatgaggccggagtgggccttgaggagctcaggggggtccctgaccctagtgtcccccctcccccagcacaggatggtaagcacacaggtcccagacaggggctggatggctctgaagctggtagccctgatctacctaatactgcagctgggctgcatcgccctcaccaacttctgactggacttcctgctggccgccactatggtgctgccgctgtgctcgccgagcctttgggccctggaccctctgtgctgtcctgctggtgttgacaagcccggcagccacgctccttggcagcccattcctgtggcgggagctgcaggaggcaccactgtcactggccaagggctggcagctcttcctggcagcactggcccagggtgcgctggagcaccacacctaaggcgccctgctcttcccactgctgtccctgggcctctgcccttgctgactacttttctggaatgtgctcttctggaagtgagatctgcctgtccggggcaccaggctgggacagagactccccaaggaccccattctgcctccttctggggaaataaacaagtgcctgtttcagctgcttt

SEQ ID NO: 4329 - DNA, 2911 bp, Homo sapiens
aggaaacacatttctactgtttaagccacttggctgggagtacttggttatggcagcctgagcagactaaaccagcacctcaaagagttgttatagggtatgcttagtggtaactggttcctaaaggccttgctttctaaggctgactcctcaccctgcaaggatgcattctccccactggcagatatgcaaccaggaacaggcattaacacgctttattcccagagttttaatattttccattgcataaaatatttgttcatgaaaatgacaaaattgctattagattctatcaccacatctctgttgattttactttctgcaaacacatacaagtaatgtaggcatacagttaaaaatgaaaccttatcctgtagttccagctactagggaggctgaagcaagagaatggcatgaacctgggaggcggagcttgtcgtgagcccagatcaggccactacactccagccggggcaacagagcgcaactccgtctcaaaacaaacaaacaaaacaaaacaaaaaaaacttatagacaagtacaaaatgagaagaaaaagtccctttcccttcatgcctctacttcctgctgtattctcaaaggtaagcactgattacagtttacttatggatctttccaggaaaatattttatgcatttatcagaaaatgtaagtatatgcatcctttaaaattctgcataaatcaaactctgcagggtactatcttcccatcctcatttgatattttgtagatcttttcctattggctgtacagatcacctcattctgtctcctgggtcatacaatatagctcacataattctaagtctgaaggttggtccaaatggttccaagaatgcaggtaccaaaaagtagtctcttgaagaggccatcagagacctggctgtttgtatcttcctcctctgccatccacagtgtcatcttcacccaaggtggctggagaagctgttaggaatatgtggttttttaaaaattacattcataggaaaaggggagggaagagaagaagaaaacctctccccctaagctcatggctctttttagtcaggctgagccaactaaagtcatgtacttcccttagataggtaactgttgccaggaaaatgccctgtgtggattggcctggactaagcaggatcctcctctaaagagagagatgagatgaatgcctgacccaagtctgggatcttgggtgggaagcgtgtggatagtaggtcagaggtcagcagtgtctgtggtgtaggatgtaatcccatctccacagagctgcatacaagtgtgtttaagtgtgtgcaagtgattaactttgattagtagtttcaactctttacaatgaacatatttatcttttttaaaaaataaagccattttaaaagatcttgccataaaacaatcattccttaagtcaccacttaggatagacctagaatatttgtcctttctcaagagcaccagagagttttctggtaatccacgcaataaacagttataaaaggtaattgttgagatcaggggaagatggcagataggaggcagtgctaatgtgtagctcccacatggatggacaaaacaccatgtggagactcacactgtgaccctgttgtgctccaagaactatcataggaacatactgggaaaaccaaaagaattcacggatcctttgaaagaagacgcacaccactgtaaattctgtggaacaggagaaaaactgtcttggaggaaggcatccttctattctactgatcagaaagctggacaaagtcccactgccaggctacacagttggtgccatttgcggaggtgacctttgacctttaacccacgcggccacccgcccgagctcttacccctgctgcccctcgcgcgtcccactccccgtccctgccggatccgcttccctgcgctgggcccagcgcgccgccagggaaggggccggagcctgggagcccgccccgccgtcgcccgtcctccgcccgcaggcccacccgcagcggtcacgtgaaggaccgagcgccgcgcgcccaggcggggcctccggcctgcacgaggagggcagagtccgttgcggctgccgccccgacgcccgcgcatccccgctcgccgcgcccgccgccgcgatgtccggggccggcctagccgcggtggtgagctgcctgcgcccgcagcccggcgaggagccgcagacccatgaggaccttctcctggcagctgcctatgttttggatgcccagtacaacagaaatgttccatttgaaactcacctcaggccatcagacgttactatttttataaccactagacaacgcaggttgccgcatacttctttatttgtgtagacctcgctcttgccctgtttgaagagcctgagttgcttcccctgcctttcttggccacctcaatagcagaagtactctgcctgactgcatactttggcagactggtacattttgcaaaagtcactcctcaaatggttttctggaaggatacaaaagacatctgcaccatggtaaccacagtggcgagtgttcattgtagtacctgtaagagtttatgaccgaaggcaggagccatgaagaaaaaagactcaatagatttgcttttgatgaaacaacaacacttccatacagtgaacgccataagcacaactgcaagcaaaccgcaaactgaagaacaaatagggcaaaatgtggcagtgcagacatttcagcatatcaagagcacttccaaattacaggaaaaaaaagatatctcaatagataattttgctgaagataagtgaaggcaactcataaggaaaaaatatgtaaaatggccgataggaaagatgtttaacgtcactaattaaaaattatagaataaaacgacaataaaataccatgtgtttgcctat

SEQ ID NO: 4330 - DNA, 1667 bp, Homo sapiens
gtcgttttattctataatttttaattagtgacgttaaacatctttcctatcggccattttacatattttttccttatgagttgccttcacttatcttcagcaaaattatctattgagatatcttttttttcctgtaatttggaagtgctcttgatatgctgaaatgtctgcactgccacattttgccctatttgttcttcagtttgcggtttgcttgcagttgtgcttatggcgttcactgtatggaagtgttgttgtttcatcaaaagcaaatctattgagtcttttttcttcatggctcctgccttcggtcataaactcttacaggtactacaatgaacactcgccactgtggttaccatggtgcagatgtcttttgtatccttccagaaaaccatttgaggagtgacttttgcaaaatgtaccagtctgccaaagtatgcagctgccaggagaaggtcctcatgggtctgcggctcctcgccgggctgcgggcgcaggcagctcaccaccgcggctaggccggccccggacatcgcggcggcgggcgcggcgagcggggatgcgcgggcgtcggggcggcagccgcaacggactctgccctcctcgtgcaggccggaggccccgcctgggcgcgcggcgctcggtccttcacgtgaccgctgcgggtgggcctgcgggcggaggacgggcgacggcggggcgggctcccaggctccggccccttccctggcggcgcgctgggcccagcgcagggaagcggatccggcagggacggggagtgggacgcgcgaggggcagcaggggtaagagctcgggcgggtggccgcgtgggttaaaggtcaaaggtcacctccgcaaatggcaccaactgtgtagcctggcagtgggactttgtccagctttctgatcagtagaatagaaggatgccttcctccaagaccagcaaggtccatggcttcattcttgaagaccaggaacccaccggaaggaaccaactccagacacaagaggattgtccaagcccaagagtttgatacccttaatgctcagattgtagtccttaaatagcctattttacaagaagaagcagagatccttggagaaatggatgattccaggtctgtttggaggcatcacccagttgtttggaggcaaacttgtgcacagtagtgatctcctcggttcactctgagtcatcaattctgcagctctcagtttgtggagaaattttctagaaattgagtgttaatttagtgttgcaggtagaacaggcaaagcagttcacgcaccaggccttattaagagcagagaccacatcaccttctataacacgaaacactgctcatggtacagctccccattactgttcacgatcgtctcagcgggcgcaaagccgcccttgcagcgctcgcaagtggcgctggccagggcgttggccatgttgaatttcgcataaaagtcacagaactccttgtagactttcacgtcactgtgcctgcgctgcagtttggaaacagccctctcgtcctcggtcccattggcctcgtggacagtgttaagggctgctcgggggatttcttcgttctctgggataatgcaggggcgcgctcggcctgagaaggccatcgtgggtgcttgagagctctgagcacagggatgagaat

SEQ ID NO: 4331 - DNA, 950 bp, Homo sapiens
ttctcatccctgtgctcagagctctcaagcacccacgatggccttctcaggccgagcgcgcccctgcattatcccagagaacgaagaaatcccccgagcagcccttaacactgtccacgaggccaatgggaccgaggacgagagggctgtttccaaactgcagcgcaggcacagtgacgtgaaagtctacaaggagttctgtgacttttatgcgaaattcaacatggccaacgccctggccagcgccacttgcgagcgctgcaagggcggctttgcgcccgctgagacgatcgtgaacagtaatggggagctgtaccatgagcagtgtttcgtgtgcgctcagtgcttccagcagttcccagaaggactcttctatgaggaacgaacgtgatggttaagctaccttcattaagcagcatgaccgcttcctgagctcctgctgccgcatttaggccctgtcagctgtgaggccactggtgctgagtcagagggaaaagctcagaacagccttgagcagcgaagaataaagcatgactcatctcgtcctgcccacccctcacactggactataaataccctccctgggtctgtgtgctgttattccaaaagatgcgatgaatacccagaactaggctattcatgggctgttgcccagttcaagctctattgggtcctgaggaagattactattttggctacattgtttatcattaaaaccagcccagggatgtgtaaacctgcatctggagaataagacatttctttttggttaaatgatattagagaaaaaaaaaactatccaaggctgctaacaaataatcttcactttcaattatatccagcaataagttgttctccagaaaagaaagcttggaaacttacccagtttgccttccatttgggacatgactgatgtgcttcagtctttgtataataaatgcatcttcgcc

SEQ ID NO: 4332 - DNA, 1374 bp, Homo sapiens
agatggcgggaggggtgcgcccgctgcggggcctccgcgccttgtgtcgcgtgctgctcttcctctcgcagttctgcattctgtcgggcggtgagcaatcgcaggcgctggctcagtcaataaaggatccgggcccaacacgcacattcacagtagttcccagggcagcagaaagtactgaaatcccaccttatgtgatgaagtgtccgagcaatggtttgtgtagcaggcttcctgcagactgtatagactgcacaacaaatttctcctgtacctatgggaagcctgtcacttttgactgtgcagtgaaaccatctgttacctgtgttgatcaagacttcaaatcccaaaagaacttcatcattaacatgacttgcagattttgctggcagcttcctgaaacagattacgagtgtaccaactccaccagctgcatgacggtgtcctgtcctcggcagcgctaccctgccaactgcacggtgcgggaccacgtccactgcttgggtaaccgtacttttcccaaaatgctatattgcaattggactggaggctataagtggtctacggctctggctctaagcatcaccctcggtgggtttggagcagaccgtttctacctgggccagtggcgggaaggcctcggcaagctcttcagcttcggtggcctgggaatatggacgctgatagacgtcctgctcattggagttggctatgttggaccagcagatggctctttgtacatttagctgtggtgtgtgcttcagaaaggagcagggcttagaaaaagcccttttgtccgtaggagttgatgtggtgtgagtgatatatttctatgtttttaatgtacagcatctgtactttgtttgccttgataaaggtaagataaatgaaacgctgaactatgctaatctggaatttgtttttatttgcctgaaatatatttttttctgtgaaaaaattaaaacgtacttaagccaggagaatgaattatacagtgattgaaaatccatttaattcctatgacttttgttttgtattgcccaagtcaaactacatcacttgtatctccagcccaaatgtagtctgccttgaaaagtctttcagctgtgactgcaggaagtgggagtgtttttattgttagctaattgctgtgactgcaggaagtgggagtgtttctgttgttggctaattgaagttattaggctcagcttcagtcatgtgtaagttttgcagtgtaatacatatgtagtctggtctgtatatatgaaaatttgaattaaactgcagaatgtttatgtctagttatggtttaaattttcttagtagtatataaaaggtaagagtactgaaaaattaataaaattgcaagttaag

SEQ ID NO: 4333 - DNA, 3174 bp, Homo sapiens
acagtcttccagctccacatcctgagaggacgcctctggagccgcgactgcccggggttgtgccggccgccgctgccgcccaggccgcctcagctctcctctgcgccggcccgctcactccgcccggccccagccctagcgctggccgcgaccccggcgcctttgaaacttctgctggtgtgagtgccctcaggggttccccaggaatatcgatacaacaccaacaggagatcatgaatcagacagataaaaatcaacaagaaatcccatcataccttaatgatgaaccaccagaaggttcaatgaaagatcacccacagcagcagccaggcatgttgtcccgtgtgactgggggtatcttcagtgttacaaagggagctgttggtgccaccattggtggtgtggcttggattggtggaaagagtctggaagtgaccaaaacagctgttacaactgtgccttccatgggaatagggctggtgaaagggggtgtctctgctgtggctggaggtgttacagctgttgggtctgctgttgtaaacaaagtgcccttaacaggaaagaagaaagacaaatctgactgaaatatagagatacacttgcgctccacagcactgtaatgccagtggcattgaattgctaaattatggactacaaccaagtcaactgttttggacgtttatcttctaaactgctgtgttgaaagtattgatgactggctttcatctaaaaagaagagaccaatacgagcacagtatatgaaggtttctcatacttaagttccaggtttttatctggtaaaatgttacacttactcggttgtaactgaagatatggtatgtttgaatatttactataagtctttcagtttgactaaaaatgtgaaagttgaatttagtagatgatcttcacagttccatatgtataatgtgccaggtaactcacctgccccttaagaagggaaccttgaattacataagccgtacctttgatgtgcctaatagtttcagatgtcttagttttttataaccatagttgattaggccaagaggcattcatttcttatttaagctggcaaaattagcaggaattagagaagtttaaaaagataaatggttttatgataatgttaaccatcttttgttagtaaatatgcgttctattattttaatcattgatgccttacaaaagaaaacatcttttctaataccctgaatatgtgctgttcttagaatcatctatggattcttttaaaggttgtttgtgaaattagttttccctttttagaatctcaggagtagtggggtaaagacatttcctgctgtcagtggataagacagagcttgttaactgttttggcagtagttaaaatcaaattgtacacttctcagcctgggttcatgcttcatcattaatacacctcacagtgcctaaggaacatttacttactggtcagaaggtattttggaagagtttcatattaaggaggaacaaataataattttaagttcttaaaaattacctaaaacaccccaaatataaaaagaagccttcacacctattctgtctttaggatgtcttaaattattagcagtactccttttttaaaaacactgtaaaagtaaccacaaatatgtgaggacttactattttaaatggaatggaatgagctccatagattagttttgaatataaagtatataaaagtgcatcagtggtttatataggctttaaaaacatgttatcttacagtcctttaaagcagccatagagtttgtatcatttttcaagccaatttcagtcagggatttgaattgtttgattatggatgataaatgtgtcatatcttattaatatgtctcatgtctcgttccttcttaatatgatttagctggaattcattttcttttcgtttcatgtttaatttcataaaacgtttaacaattggcatatatacttggcattcctgtccaccaaggattgtaatccaagcctgggaaaatcttaaatttctttttacttaaatctggaaatttgtctccattctgccacctttttttttttttttttttatagtggaggggaggaaaggggggtgataccttgcagtaagtaagtcgaaatagcatgcctgaaaatttgaaacagaccattctaacacccaaggcttgtttataaaatacttgagaattacattaatgtggaatcaacagatgcagaagaatataacataacttttaaaagctttcataaataccagcagcaattgtaagcaaatctacaaaggttcttgaacctttctattatatacaaaactgaaaagtcattaaggagttcaactaatcaggaattaaatggtcatttatttcatgcagtatgatttaaggtatttcttgagattctggtcaaatgtcataatcagcaaacgggattaaaaaaaaaactccaaaatcactaaataattatctaaataatggtattggagaacttgtttcctgctatttggaagagattgttgcttcattgctagtttgtatttctaacttctacagttatagactccactgtgctttgtgtctgaatttctcagtatagacattttgtttactgtatgcttgcatatttattttcaactttgtttgtctttaaaattgcttgaggaaaaatggttgtaattaatttctgctacagaaaagccacctggtacgttttgtctcatcaggattgttttaaattctaaactataagtttgttcagaggggcttttgcaatgatagcagaaaactgtacaaatgtacagttagttatagaggttcttgttgaaatgaacttaccatctgatgatatgtatgtacagctgtgtacttgagtcttttttagtttacttagaaagactagcagtttgacctgttaaacaggactagttcaagtcaagaaactaaggttgttgtatacacctggaggcatctgttattcagcttatcctttgagtgggtatttggcacaatgaggataaacttatgtgacccacttgaatggctgatctaataatgttgacattatgcattctgtacttagtgaaatgtcagatgaaaataactgatgaataatttttttgtattaaagggatgggaaaagaacacatgaatttgttaataaagcactatgatctgc

SEQ ID NO: 4334 - DNA, 2707 bp, Homo sapiens
ggcggccgagcaccgagcgctgggcaccgggcaccgagcggcggcggcacgcgaggcccggccccgagcagcgcccccgcccgccgcggcctccagcccggccccgcccagcgccggcccgcggggatgcggagcggcgggcgccggaggccgcggcccggctaggcccgcgctcgcgcccggacgcggcggcccgaggctgtggccaggccagctgggctcggggagcgccagcctgagaggagcgcgtgagcgtcgcgggagcctcgggcaccatgagcgacgtggctattgtgaaggagggttggctgcacaaacgaggggagtacatcaagacctggcggccacgctacttcctcctcaagaatgatggcaccttcattggctacaaggagcggccgcaggatgtggaccaacgtgaggctcccctcaacaacttctctgtggcgcagtgccagctgatgaagacggagcggccccggcccaacaccttcatcatccgctgcctgcagtggaccactgtcatcgaacgcaccttccatgtggagactcctgaggagcgggaggagtggacaaccgccatccagactgtggctgacggcctcaagaagcaggaggaggaggagatggacttccggtcgggctcacccagtgacaactcaggggctgaagagatggaggtgtccctggccaagcccaagcaccgcgtgaccatgaacgagtttgagtacctgaagctgctgggcaagggcactttcggcaaggtgatcctggtgaaggagaaggccacaggccgctactacgccatgaagatcctcaagaaggaagtcatcgtggccaaggacgaggtggcccacacactcaccgagaaccgcgtcctgcagaactccaggcaccccttcctcacagccctgaagtactctttccagacccacgaccgcctctgctttgtcatggagtacgccaacgggggcgagctgttcttccacctgtcccgggaacgtgtgttctccgaggaccgggcccgcttctatggcgctgagattgtgtcagccctggactacctgcactcggagaagaacgtggtgtaccgggacctcaagctggagaacctcatgctggacaaggacgggcacattaagatcacagacttcgggctgtgcaaggaggggatcaaggacggtgccaccatgaagaccttttgcggcacacctgagtacctggcccccgaggtgctggaggacaatgactacggccgtgcagtggactggtgggggctgggcgtggtcatgtacgagatgatgtgcggtcgcctgcccttctacaaccaggaccatgagaagctttttgagctcatcctcatggaggagatccgcttcccgcgcacgcttggtcccgaggccaagtccttgctttcagggctgctcaagaaggaccccaagcagaggcttggcgggggctccgaggacgccaaggagatcatgcagcatcgcttctttgccggtatcgtgtggcagcacgtgtacgagaagaagctcagcccacccttcaagccccaggtcacgtcggagactgacaccaggtattttgatgaggagttcacggcccagatgatcaccatcacaccacctgaccaagatgacagcatggagtgtgtggacagcgagcgcaggccccacttcccccagttctcctactcggccagcggcacggcctgaggcggcggtggactgcgctggacgatagcttggagggatggagaggcggcctcgtgccatgatctgtatttaatggtttttatttctcgggtgcatttgagagaagccacgctgtcctctcgagcccagatggaaagacgtttttgtgctgtgggcagcaccctcccccgcagcggggtagggaagaaaactatcctgcgggttttaatttatttcatccagtttgttctccgggtgtggcctcagccctcagaacaatccgattcacgtagggaaatgttaaggacttctgcagctatgcgcaatgtggcattggggggccgggcaggtcctgcccatgtgtcccctcactctgtcagccagccgccctgggctgtctgtcaccagctatctgtcatctctctggggccctgggcctcagttcaacctggtggcaccagatgcaacctcactatggtatgctggccagcaccctctcctgggggtggcaggcacacagcagccccccagcactaaggccgtgtctctgaggacgtcatcggaggctgggcccctgggatgggaccagggatgggggatgggccagggtttacccagtgggacagaggagcaaggtttaaatttgttattgtgtattatgttgttcaaatgcattttgggggtttttaatctttgtgacaggaaagccctcccccttccccttctgtgtcacagttcttggtgactgtcccaccgggagcctccccctcagatgatctctccacggtagcacttgaccttttcgacgcttaacctttccgctgtcgccccaggccctccctgactccctgtgggggtggccatccctgggcccctccacgcctcctggccagacgctgccgctgccgctgcaccacggcgtttttttacaacattcaactttagtatttttactattataatataatatggaaccttccctccaaattcttcaataaaagttgcttttc

SEQ ID NO: 4335 - DNA, 1022 bp, Homo sapiens
ctttgtgatggtcaacagcgtggcgctgaacggggatggctgtggcatctgctctgaaacagaagcagagctcattgaagtttctcacagactgaactgctcccgagaggcacgtggctccagccggtgtggacctgggcctctgctgcccacgtctgcccctgtcctcctgcagcattatcctctgtatcggagaagtgatgctaactgttctggggaagacgctgctcctgcagaggaaagggacatcccatttaaggagaactatgacgtgctttcacgggaggcatcacaaaagctgctgtggtggctccagccgcgcctggttctcagtggccacacgcacagcgcctgcgaggtgcaccacgggggccgagtccccgagctcagcgtcccatctttcagttggaggaacagaaacaaccccagtttcatcatgggtagcatcacgcccacagactacaccctctccaagtgctacctcccacgtgaggatgtggttttgatcatctactgtggagtggtgggcttccttgtggtcctcacactcactcactttgggcttctagcctcaccttttctttctggtttgaacttgctcggaaagcgtaagacaagatgaagagcaggcgccattataaatatcaaagcccaagaaatggaactttgggcagagatcatgttagaatcaagtggatgatgagaccaattacaggccgtctctctgcacagcacagaaattctcaatcactgaaatgagtaactgcaaaataaatagttgattgtactgttctcatgctataaaagtggacaggtactctacaacaaatctgttttctcatttttatcaaatatatgtatcatcaaaggttgcatctgtacagtatgtaaatgctattaatgtcgtcactcacatgcacgacagtccttgttcccccaggaagggcctggtggccccagcacacacttgggattatgtgtatacataaataaatattgggctgtttccctcttcctgtgaa

SEQ ID NO: 4336 - DNA, 1115 bp, Homo sapiens
acaatttctccttcctctggaaacctctgttttcttagatttggagcagggtggtcacactgaccttgcagagttctgagaatcagagacagaacataaaaggcctggaaaacattctccaaaaagaagctgcaacatgtgtggacaatgggcttttcatgcctctcttactgtctgttgacctggtgcaagaaacatgctctggtgatggctgtgagggaggaatgaggatagacatagacactcctgtgtctcaaacatgcttctttattactctgctatgactctgtcttccctggggcaggaccccagcctgcctacatttgcagacagacacagtggcatgtggagacaacagtgtgtcccaatgacttttctttaccccccagctgtcggcagtactcagtggaagggtgatattatgacactgatactgctattttgaaacctggaggatggaaaggtgcaaaaatctatcaccaagcaacagaaggtgcagaccgtgttggtggcggtaattttgtccatcaaatgaatatgtgtgaaaacattcccttcttcggccctacaggtcagaatggtggcagcggagcatcgtcattcttcaggattgccctactggccctacctcacagctgaaactttaaaaaacaggatgggccgccagccacctcctccaactcaacaacattctataactgataactccctgagcctcaagacacctcccgaatgtctccttcgtccccttccaccctcagtggatgataatatcaaggagtgtcctcttgctcctcttccaccctctcctcttccaccctcagtggatgataatctcaaggagtgtctccttgcccctcttccaccctctcctcttccaccctcagtggatgataatctcaagactcctcccttagctactcaggaggccgaggcagaaaaaccacccaaacccaagaggtggagggcggatgaggtgtaacaaccacccaagcccaagaggcagagggaggccgaggcacaacaattacccaaacccaagaggcggaggttgagtaagctgagaacacgccattgcactcaagcctgggcaacaagaataaatccatgggtcg

SEQ ID NO: 4337 - DNA, 2792 bp, Homo sapiens
caaaaactctgatactgctcatattaagtccatagaaattacttcgatccttaatggacttcaagcttctgaaagttctgctgaagacagtgagcaggaagatgagagaggtgctcaagacatggataataatggcaaagaggaatctaagattgatcatttgaccaacaacagaaatgatcttatttcaaaggaggaacagaacagttcatctttgctagaagaaaacaaagttcatgcagatttggtaatatccaaaccagtgtcaaaatctccagaaagattaaggaaagatatagaagtattatccgaagatactgattatgaagaagatgaagtcacaaaaaagagaaaggatgtcaagaaggacacaacagataaatcttcaaaaccacaaataaaacgtggtaaaagaaggtattgcaatacagaagagtgtctaaaaactggatcacctggcaaaaaggaagagaaggccaagaacaaagaatcactttgcatggaaaacagtagcaacagctcttcagatgaagatgaagaagaaacaaaagcaaagatgacaccaactaagaaatacaatggtttggaggaaaaaagaaaatctctacggacaactggtttctattcaggattttcagaagtggcagaaaaaaggattaaacttttaaataactctgatgaaagacttcaaaacagcagggccaaagatcgaaaagatgtctggtcaagtattcagggacagtggcctaaaaaaacgctgaaagagcttttttcagactctgatactgaggctgcagcttccccaccgcatcctgccccagaggagggggtggcagaggagtcactgcagactgtggctgaagaggagagttgttcacccagtgtagaactagaaaaaccacctccagtcaatgtcgatagtaaacccattgaagaaaaaacagtagaggtcaatgacagaaaagcagaatttccaagtagtggcagtaattcagtgctaaatacccctcctactacacctgaatcgccttcatcagtcactgtaacagaaggcagccggcagcagtcttctgtaacagtatcagaaccactggctccaaaccaagaagaggttcgaagtatcaagagtgaaactgatagcacaattgaggtggatagtgttgctggggagctccaagacctccagtctgaagggaatagctcgccagcaggttttgatgccagtgtgagctcaagcagtagtaatcagccagaaccagaacatcctgaaaaagcctgtacaggtcagaaaagagtgaaagatgctcagggaggaggaagttcatcaaaaaagcagaaaagaagccataaagcaacagtggtaaacaacaaaaagaagggaaaaggcacaaatagtagtgatagtgaagaactttcagctggtgaaagtataactaagagtcagccagtcaaatcagtttccactggaatgaagtctcatagtaccaaatctcccgcaaggacgcagtctccaggaaaatgtggaaagaatggtgataaggatcctgatctcaaggaacccagtaatcgattacccaaagtttacaaatggagttttcagatgtcggacctggaaaatatgacaagtgccgaacgcatcacaattcttcaagaaaaacttcaagaaatcagaaaacattatctgtcattaaaatctgaagtagcttccattgatcggaggagaaagcgtttaaagaagaaagagagagaaagtgctgctacatcctcatcctcctcttcaccttcatccagttccataacagctgctgttatgttaactttagctgaaccgtcaatgtccagcgcatcacaaaatggaatgcttcaaccactcccagaagacgtccttcactcccaaaatgaggcttttctgaaacggcgaggaccaccaaccgacggcgacaaacctgctccctcacccagcgcctcccttcgccgccgcccggcggccgactgccggaggggagggggcgtggccagagagcggaagtgcccggaacccggaagtgcgagctggcgcgcagctgcagtctgggagtctttggagtaagaatggccttggaagggatgagcaaacggaagagaaagagaagtgtccaggagggagagaatcctgacgacggcgttcgcgggagtccgccggaagactacaggcttggacaggtcgccagtagcttatttcgcggcgaacaccattccagaggtggcaccggtcggctggcgtccctcttcagttctctggagccccagattcaacccgtgtacgtgcctgtgcctaaacaaaccatcaaaaaaacgaaacggaatgaggaggaagaaagtacatcccagattgaaagaccactttcgcaagaacctgccaaaaaagtgaaagcgaagaagaaacacactaacgcagaaaaaaagttggcagacagggaaagcgctctagcgagtgctgatttagaagaagaaattcaccagaaacaagggcagaaaaggaaaaattctcaacctggtgttaaagtagcagatagaaaaatacttgatgacacagaagacacagttgtcagtcaaagaaagaaaattcaaatcaaccaagaagaagagagattaaagaatgagagaactgtgtttgttgggaatttgcctgttacatgtaataagaagaagctgaagtcgttttttaaagagtatggacaaatagaatctgtacgatttcgttctctgattccagcagagggaacgctatccaaaaagttggcagcaataaa

SEQ ID NO: 4338 - DNA, 4305 bp, Homo sapiens
gaatcactccgacccccccacctccgcccagatcccgagaaaaagaaagccctagggtggcagccagggtagtggtcccagtgcgatccagagagagggtccttacctcgatggggctgaccggcgtggaaggcaggggctgcaggtactcggggtgcaaaatgtggccagttcgtgccgtcagcatcttcagcaccttgattggcaggcggttggcctggcgcagggggtcagaggggggcacggcgtgcacaaaaggcttggtgctgccggccggggacgagcctgggccggggccggagctatttccagagagcgcgctggtccaggcagggtctgcaccgccgcctccgcctccgccgccgccgccgccgctgtgcttactgcttcttagggcagaaagcgagggcgctgtgctcatgacccacccgcgcgcatgggagcagcgggggggagggctccgggaggcgcggggcgggctcggggctgcgcgctcgccccgggagcaggagcagcgggaggaggaggagctggcgcggcggccacgggcgcccagcgcgccttctcggcgcctggagccagacgcgagtaatcctgggtggcccgcagcggagccgtggccgggctagaggagccggctggactgcgggagtgccgggcggctcgcggtgtccgcctcgggctgctcccctgcgctgcgttctcgcggccccgcgccggcgctgcgctctgcgatgcgagccgctgcgtgtccagccggggctctggcgaggaaactcacttcaaaagcagctgcaccaagggggagattaaagcctttgccgccttccaatcaaatgggagcccgaggtgattggagggtcaaggggatgtgacgcgtcccgcgccgccgccgccgccgctgccaggactctcagtgccggttttaatgggcagctccctcttcgccgcccccctgtgtgtcccctccctcgatttcgctgggaggacgagatggacatttattctacgtttgccatccgccgcctccctcttttttcctcctcgtcgttcttcctttccccagctcgaaaataaactgaaaccttcttttgaaggggggtgcgcgtgaggaacagactgcggggggtgtccagaaggagcaccggtgggagtgtggacaccggccggactgtcaactccaggggcgaagggaacctgcacacccagtgttttttccttcgcagtaatcgagatcccgcgcggcgcagcgcagccaccagggtaagaaggcaaggtggggagccggagctggaagaagcccgcccgcccgctctaatttcctcagattccgcggcggagaaaccagaagctagatgggcagtcgcagcggcggcggctcaacaccgcgaggagcgctgggctctccgcccttcccggccacgtgacgcccggggacgcgtagattggggcagcagcgggggtcacatgtttcctctgtttcaccctcagtctgtcccccaaccccccattcttactctcccaccctgttttcctccctcccccccttctttgggcatctccacccctccatcaattgtcaatgttcctcgaccgcaatcaatcagttatttgtcagctcttgtcaatcctcccgtgatttatgtcagcttttgttgctgattacaaggcgggtgcgacttgaagggaaaaagagagagggagagagagacggagaggaaggaggagattgagagggaactggaggaggggaaaagaggagcggcctcctgggatgggggtggggtgggggctctaagaaaaagaatgaaagaggcgcacggtgtcaggaaaatgaatagcgagagtaaagtgcgcaggtgcgcccagggcgccgagaggggcgcgcaggcctggagtgtgcgcctgccctctcggtgtcggagagacgcccttccacctctgggagcctcggtctgttggggtcgcggagttcgggcgcggctccgggtacccgagaccagcggcggcaacttctaacacgggagatttcccgccaccccaccccgccgccgcgagtcctcgcggggcgtgttgcgtgcggaggtcaggctgccaccctctgtagttccctaaccccaaactcggagacttctaagagccacaccaccaaggaacttctagtcctggaggtcaatggtggggcaaacctcgcctcaattctttgaccccctcgggtcgtaagcagggctaagaggctgcgaagaagaggcctggccatgggtgtatgggggaagaaacatctcaggctcactcatgccccctccccgaccttctcccacctgccgccatccccgcaggctggggagccagggtaactcggggctgctctctcgaatttattggaacgccgagtcggaatgagctgcgctaggagagccgagggaaggagcgagagagggagggggcggctgcctgtgggaacgcgggttcttccagggaagcggagcgggactgccgcgttcccctcgatttgcaccgtcactcgggttgtttgggaagaaaaggggaggcgctgtgcgtgccaccgggtacctggacctggatgcccagtgtgtatgcatgcctgtggcgctgcgtgagttatcggggctctgatagcgtccggagcgggttcgagggtctcctccaggaactcgcagaaattagagggggtggggaggaggacacacccccttcctcggaacgacttagaagactttgaatctcccctcctccgcttttccgccccggctcttcttttgttgtcaagtccttttgataaatggtggggctgggagctctgggagtcgggagccagtctgtgcccgcgtggggggcgggggccgagcctggagacccggtttcgaccggcgcgcacctggggctgagccgggtgcgcgcgggggtcgggtctggaactgcccttggtatgctcgccctctcctcttggcccatctcactcccctcccccacctgactcccctccccggcttctttctctgtctcccactccgcacgggtaccgagaactttccggggtgagttttagaatttgctcctaggcattctttttctgcgtttggattttatcccttgattctttgggttggtaaactttatgaaatggtaacttgactgaagctcatttggagagaagaggggagtgaggcggtgtgtgcttggggctggtgtttgtcagtgtgagcgtgtaagagcacacctgcattcaagggggtttgtagtgtccgtgcgacatctgagggaggtgagtcggcgagcgggtggcgaggccccacgctgagggaggcggttgtctggtctccggggagcaagtcccaggtgcgcgtttcggagggcgggacagtcctacgctgtctctgcggggcagcgcgtctgtgaagcactcttatccttcgggtgtgtccatgtgtgcctggttactgagtgcgcggccgtctaggtgtcgacccaaccaatggtagtgctcctaacgccgcgagcccacctttgggccgctatcgccgcggcctccccgcgaggcccgggcactgaaattctggggcctgcgacagggccgggggggacgcagccaagggcgtccctccccagcctccagactcagctcttccccctctcctctaattccagcagcttattacgccggcggctcaggggaggcagcctcagcacctgaagcctgggggggccgtggagtggctcctgcgtcccccggtgtggccacacacgctcgtggggctgcgctgtgctgcgtgggtgcgggtcgtggtcagcgtgcgttcgcttttctcaaaactccactccgagggtccgagcgcatgggggcgcctgggggcctgcgcgcccggggcttttgggaggcgccagcgtccgagcctgcgcacctcgcgcaggaggccaaacccccgaaggccggcgcgggcccgggagtgggggccattaattactctgcgccaggcctaaagcctccaacccccagcagcagttggcgtggatgtcctgcggattttatttgcaaacaatggaaatgatttgttttctctaaaaaaggagtgggcaaggcagatattggaggagggggtgggaggaggagaaggaaggggaaagagctgaggaaaaaagtttgaaaatgccttgaactattcactgtcgagatggctaatcagtattgaggccggagggcaggcgggccgcctttcaccgccgcttccctttcatctcgggctcggcggaggcgctcaattaaaagcctatcagtttgtaagt

SEQ ID NO: 4339 - DNA, 1754 bp, Homo sapiens
ctcctcagagaaattttgaaattgccttcaagatgtttgatttgaatggagatggagaagtagatatggaagaatttgaacaggttcagagcatcattcgctcccaaaccagtatgggtatgcgccacagagatcgtccaactactggcaacaccctcaagtctggcttgtgttcagccctcacaacctacttttttggagctgatctgaagggaaagctgacaatcaaaaacttcctcgaatttcagcgtaaactgcagcatgatgttctgaagcttgagtttgaacgccatgaccctgtggatgggagaattactgagaggcagtttggtggcatgctacttgcctacagtggggtgcagtccaagaagctgaccgccatgcagaggcagctcaagaagcacttcaaagaaggaaagggtctgacatttcaggaggtggagaacttctttactttcctaaagaacattaatgatgtggacactgcattgagtttttaccatatggctggagcatctcttgataaaggaaagggcaccatcttcatggggagaagatgagtacttgaaatatcaagacaattgcagaaggctgtgccctgagagaatggaagaactgggaaagagaaaaggaagtcagaagcttaagtgaccatgcagcaggtggccaggacagtggctaaagtggagctctcagaccacgtgtgtgatgtggtgtttgcactctttgactgtgatggcaatggcgaactgagcaataaggaatttgtttccatcatgaagcaacggctgatgagaggcctggaaaagcccaaagacatgggtttcactcgcctcatgcaggccatgtggaaatgtgcacaggaaactgcctgggacttcgctttacccaaacagtaaccccacactgcaagaggggacccctccacccccagtaccctggaccccctccgcagagtctcggcagagccctttgtgctgctgcttctggaagtagtcccccttcctcccgggatgacctcaggactctgtcggtttcccctctttacccttccccgtccccgtgttctgctgggctctgattctgcccaatgagtatccccataggttctcaaaaacatgaacaagtctgtaaagctcagacatttgtcagcctcaacagcaccacccattcaagcatcctgtggataaagaattcagggaaccatccacacacctgccaaccctgggaagcatccagttctcaaatcgtttttgctatggatttatactaacaagaacattccttgacttccctcctgctggtgttttaaagccacaagtagggaagatatctggcaggcagaaagaagtctgtgatgataaacaatgatgaggatgacctaggcaccctacgctagtgtgagaagcctgcgccccaggaaggatctgtgttagtccctgggatggctccaaggcctgctctaggaaggcagcatgctcagtgggaacacagcaagattcagaatttaaagtagttgcttcatggctctgtgcactcccttttcttcctcgcagcctccctaagatgactccagtgtgaccctgtgcttagtgagcaatagtgattgagctcatgttccctgcaagtgccatttcctctccaggatgggcctctaaagctgaggcctggctcagagcctgtttgccctctgtcttaaacaattgtaaatatcacttaaattataaccatttgcaataaacatccccaaagtt

SEQ ID NO: 4340 - DNA, 835 bp, Homo sapiens
cttgcgtccccgcgtgtgtgcgcctaatctcaggtggtccacccgagaccccttgagcaccaaccctagtcccccgcgcggccccttattcgctccgacaagatgaaagaaacaatcatgaaccaggaaaaactcgccaaactgcaggcacaagtgcgcattggtgggaaaggaactgctcgcagaaagaagaaggtggttcatagaacagccacagcagatgacaaaaaacttcagttctccttaaagaagttaggggtaaacaatatctctggtattgaagaggtgaatatgtttacaaaccaaggaacagtgatccactttaacaaccctaaagttcaggcatctctggcagcgaacactttcaccattacaggccatgctgagacaaagcagctgacagaaatgctacccagcatcttaaaccagcttggtgcggatagtctgactagtttaaggagactggccgaagctctgcccaaacaatctgtggatggaaaagcaccacttgctactggagaggatgatgatgatgaagttccaggatcttgtggagaattttgatgaggcttccaagaatgaggcaaactgaattgagtcaacttctgaagataaaacctgaagaagttactgggagctgctattttatattatgactgctttttaagaaatttttgtttatggatctgataaaatctagatctctaatatttttaagcccaagccccttggacactgcagctcttttcagtttttgcttatacacaattcattctttgcagctaattaagccgaagaagcctgggaatcaagtttgaaacaaagattaataaag

SEQ ID NO: 4341 - DNA, 700 bp, Homo sapiens
gatgaaagaaacaatcatgaatcaggaaaaacttgccaaactgcaggcacaagtgtgcattggtgggaaaggaactgctcgtagaaggaagaaggtggttcatagaacagccacagcagatgataaaaaacttcagttctccttaaagaagttaggggtaaacaatatctttggtattgaagaggtgcatatgtttacaaaccaaggaacagtgatccactttaacaaccctaaagttcaggcatctctggcagcaaacactttcaccattacaggccatgccgagacaaagcagctgacagaaatgctacccaacatcttaaaccagcttggtgtagacagtctgaacagtttaagcagactggctgaagctttgcccaaacaatccatggatggaaaagcaccacttgctactggggaggatgatgatgatgaagttcctgatcttgtggagaattttgatgaggcttccaagaatgaggcaaactgaattgagtcaacttctgaagataaaacttgaagaagttactgggagctgctattttatattatgactactttttaagaatttttgtttatggatctgataaaatctagatctctaatatttttaagcccaagccctttggacactgcagctcttttcaggttttgcttatacacaattcattctttgcagctaataaagccgaagaagcct

SEQ ID NO: 4342 - DNA, 1057 bp, Homo sapiens
acgctgcccagactcactacccgccctctcagtcccgcagccacgaggaggacgctgcccagactcactacccgccggctccctcccccgcgtccctgtggtggtgggcgaagatgacctgttgtgcatcagatgcctttgagacatacaactggagatgtgagataggaaattgaatgtaaagactggaagctcggcagagcagaactctgaacaacgtgcctcaggagtgcaagttgctgatgaagtgtgtcgcattttttatgacatgagagttcgtaaatgctccacaccagaagaaatcaagaaaagaacaaaggctgtcatttttttgtctcagtgcagacaaaaagtgcatcatgtagaaggcaaagagatcttggttggagatgttggtgtaactataagtgagcctttcaagcattttgtgggaatgcttcctgaaaaagattgttgctatgctttgtatgatgcaagctttgaaacaaaagaatccagaagaattgatgttttcttgtgggcatcagaactagcacctttgaaaagtaaaatgatctatacaagctccaaggatgcaatcaaaaagaaatttcaaggcataaaacatgaatggcaaacaaacggaccagaagatctcaatcgggcttgtactgctgaaaagttaggtggatcctttttttttttttttgagatggagtcttgatctgtcgcccaggctggagtgcagtgacaggatctcggctcactgcaacctctgcctcccgggttcaagtgattttcctgcccagcctcctgagtagctgggattatagcgtgcgccaccacacctggctaatttttgtattcttagtagagtcagggtttcaccatattggtcaggctggtctcgaactcctgacctcgtgatttgccctccttggcctcccaaagtgctgggattacaggcgtgagccagcatgcctggccagtggatccttaattgtagcctttgaaggatgccctgtgtagatcatcattcagtgccacaaattgaaagcttccacgtttaatgttatcc

SEQ ID NO: 4343 - DNA, 2696 bp, Homo sapiens
cagagtctgttggagcatctggtcaacgccctgttttctgccctgtacacaaacaagaacagttgaaacttttctgtgaaacatgtgatagattgacatgtagagactgtcagctattggaacacaaagaacataggtatcagtttttggaagaagcttttcaaaatcagaagggtgcaattgagaatctactggcgaaacttcttgagaagaagaattatgttcattttgcagctactcaggtgcagaataggataaaagaagtaaatgagactaacaaacgagtagaacaggaaattaaagtggccattttcacccttatcaatgaaattaataagaaaggaaaatctctcttacaacagctagagaatgttacaaaggaaagacagatgaagttactacagcagcagaatgacatcacaggcctttcccggcaggtgaagcatgttatgaacttcacaaattgggcaattgcaagtggcagcagcacagcactactatacagcaagcgactgattactttccagttgcgtcatattttgaaagcacggtgtgatcctgtccctgctgctaatggagcaatacgtttccattgtgatcccaccttctgggcaaagaatgtagtcaatttaggtaatctagtaatagagagtaaaccagctcctggttatactcctaatgttgtagttgggcaagttcctccagggacaaaccacattagtaaaacccctggacagattaacttagcacagcttcgactccagcacatgcaacaacaagtatatgcacagaaacatcagcagttgcaacagatgaggatgcagcaaccaccagcacctgtaccaactacaacaacaacaacacaacagcatcctagacaagcagcccctcagatgttacaacaacagcctcctcgattgatcagtgtgcaaacaatgcaaagaggcaacatgaactgtggagcttttcaagcccatcagatgagactggctcagaatgctgccagaataccagggatacccaggcacagcggccctcaatattccatgatgcagccacacctccaaagacaacactcaaacccagggcatgctggaccctttcccgtagtatcggtacacaacaccacaatcaacccaacgagccctactacagcaactatggcaaatgcaaaccgaggtcccaccagcccatctgttacagcaatagagctaatcccctcagttaccaatccagaaaaccttccatcgctgccagatattccacccatacaggcaaacgttgttccgatgatgcactcctggtatgagtttggagccagagagaagacccaggaccaaaatgtgttggaagatgctggctcaagtagtttagataatctactaagtagatacatctcaggcagtcacctacccccacagcctacaagcaccatgaatccttctccaggtccctctgccctttctccgggatcatcaggtttatccaattctcacacacctgtgagacccccaagtacttctagtactggcagtcgaggcagctgtgggtcatcaggaagaactgctgagaagacaagtcttagtttcaaatctgatcaggtgaaggtcaagcaagaacctgggactgaagatgaaatatgtagcttttcaggaggtgtaaaacaagaaaaaacagaggatggcaggaggagtgcttgcatgttgagcagtcctgagagtagcttgacaccacctctctcaaccaacctgcatctagaaagtgaattggatgcattggcaagcctggaaaaccatgtgaaaattgaacctgcagatatgaatgaaagctgcaaacagtcagggctcagcagccttgttaatggaaagtccccaattcgaagcctcatgcacaggtcggcaaggattggaggagatggcaacaataaagatgatgacccaaatgaagactggtgtgctgtctgccaaaacggaggagatctcttgtgctgcgaaaaatgtccaaaggtctttcatctaacttgtcatgttccaacactacttagctttccaagtggggactggatatgcacattttgtagagatattggaaagccagaagttgaatatgattgtgataatttgcaacatagtaagaaggggaaaactgcgcaggggttaagccccgtggaccaaaggaaatgtgaacgtcttctgctttacctctattgccatgaattaagtattgaattccaggagcctgttcctgcttcgataccaaactactataaaattataaagaaaccaatggatttatccaccgtgaaaaagaagcttcagaaaaaacattcccaacactaccaaatcccggatgactttgtggccgatgtccgtttgatcttcaagaactgtgaaaggtttaatgaaatgatgaaagttgttcaagtttatgcagacacacaagagattaatttgaaggctgattcagaagtagctcaggcagggaaagcagttgcattgtactttgaagataaactcacagagatctactcagacaggaccttcgcacctttgccagagtttgagcaggaagaggatgatggtgaggtaactgaggactctgatgaagactttatacagccccgcagaaaacgcctaaagtcagatgagagaccagtacatataaagtaaaatgacatggatttaaatcaattgttt

SEQ ID NO: 4344 - DNA, 1461 bp, Homo sapiens
gaggatggcaggaggagtgcttgcatgttgagcagtcctgagagtagcttgacaccacctctctcaaccaacctgcatctagaaagtgaattggatgcattggcaagcctggaaaaccatgtgaaaattgaacctgcagatatgaatgaaagctgcaaacagtcagggctcagcagccttgttaatggaaagtccccaattcgaagcctcatgcacaggtcggcaaggattggaggagatggcaacaataaagatgatgacccaaatgaagactggtgtgctgtctgccaaaacggaggagatctcttgtgctgcgaaaaatgtccaaaggtctttcatctaacttgtcatgttccaacactacttagctttccaaggtaccagtgaaataattgatttttggtgttgattttcataagctaaaaataaataacagaagaatgttcagggcagatggccttctaaccagtgcacagtatttctataaaacagggagcctgttattcttttggtattagcttccagagaaactaacaataaaatatctaagatctaagtagtacattaatgttaaagagtagatttcatctcctggcctttagtttatattcagtataaggaaaatagataaaactctaaattaatagggggctaaggttacaaaacctgcagtctggttctaattctgtagtaagcttgagcaattcactaattatcagggatcagtttttgcatctacaagtggtaggttttggtttagcagagctgtagttcttcccttccatttattattttatgttcatgcaacctcttgtctcttgatttcagagaccataaaatagtagagtcatacttgtttttttcagtcttctccttcctctcttgtcccccaatttctttttggtgaaagtaagtcagtattcttggggtaaacccagcttttttcttgctataaattgaaaaaaaaaaaaaaaaaagatatatcttctcaaattcctgagaagcagtaactttaattgaataatagtgccctctttgaaagtgttaaccttttggattagaaaactagtagatatttaaacagtgccagaatatttttctgaagaattgtaatttcttacctaagtctttggagatagagttatttgctagagatgtaataagggccttctttttctttactcttatttagaaaagaaaagcattggcactttgatcttgaaattaagaattttcttttctttgggtagtaatatttactggaatgtcagaattttgccactgaatgccttctttcaatagcaaatgctttgaaagggttgtaaaatgttggcgtaaattagccaggtgtggtagctcacacctgtaatcccagcactttgggaggctgaggcaggcggagcacttgaggtcaggagtttgagaccagcctggccaacatggcaaaaccccatctctact

SEQ ID NO: 4345 - DNA, 2409 bp, Homo sapiens
ctgacgcaggtgctcaacacgcactatgtggcaccccgccgcctgctgctgacgggcacaccgctgcagaacaagcttcccgagctctgggcgctgctcaacttcctgctgcccaccatcttcaagagctgcagcaccttcgagcagtggtttaacgcaccctttgccatgaccggggaaaaggtggacctgaatgaggaggaaaccattctcatcatccggcgtctccacaaagtgctgcggcccttcttgctccgacgactcaagaaggaagtcgaggcccagttgcccgaaaaggtggagtacgtcatcaagtgcgacatgtctgcgctgcagcgagtgctctaccgccacatgcaggccaagggcgtgctgctgactgatggctccgagaaggacaagaagggcaaaggcggcaccaagaccctgatgaacaccatcatgcagctgcggaagatctgcaaccacccctacatgttccagcacatcgaggagtccttttccgagcacttggggttcactggcggcattgtccaagggctggacctgtaccgagcctcgggtaaatttgagcttcttgatagaattcttcccaaactccgagcaaccaaccacaaagtgctgctgttctgccaaatgacctccctcatgaccatcatggaagattactttgcgtatcgcggctttaaatacctcaggcttgatggaaccacgaaggcggaggaccggggcatgctgctgaaaaccttcaacgagcccggctctgagtacttcatcttcctgctcagcacccgggctggggggctcggcctgaacctccagtcggcagacactgtgatcatttttgacagcgactggaatcctcaccaggacctgcaagcgcaggaccgagcccaccgcatcgggcagcagaacgaggtgcgtgtgctccgcctctgcaccgtcaacagcgtggaggagaagatcctagctgcagccaagtacaagctcaacgtggaccagaaggtgatccaggccggcatgttcgaccagaagtcctccagccatgagcggcgcgccttcctgcaggccatcctggagcacgaggagcaggatgaggaggaagacgaggtgcccgacgacgagaccgtcaaccagatgatcgcccggcacgaggaggagtttgatctgttcatgcgcatggacctggaccgcaggcgcgaggaggcccgcaaccccaagcggaagccgcgcctcatggaggaggacgagctcccctcgtggatcatcaaggacgacgcggaggtggagcggctgacctgtgaggaggaggaggagaagatgttcggccgtggctcccgccaccgcaaggaggtggactacagcgactcactgacggagaagcagtggctcaaggccatcgaggagggcacgctggaggagatcgaagaggaggtccggcagaagaaatcatcacggaagcgcaagcgagacagcgacgccggctcctccaccccgaccaccagcacccgcagccgcgacaaggacgacgagagcaagaagcagaagaagcgcgggcggccgcctgccgagaaactctcccctaacccacccaacctcaccaagaagatgaagaagattgtggatgccgtgatcaagtacaaggacagcagcagtggacgtcagctcagcgaggtcttcatccagctgccctcgcgaaaggagctgcccgagtactacgagctcatccgcaagcccgtggacttcaagaagataaaggagcgcattcgcaaccacaagtaccgcagcctcaacgacctagagaaggacgtcatgctcctgtgccagaacgcacagaccttcaacctggagggctccctgatctatgaagactccatcgtcttgcagtcggtcttcaccagcgtgcggcagaaaatcgagaaggaggatgacagtgaaggcgaggagagtgaggaggaggaagagggcgaggaggaaggctccgaatccgaatctcggtccgtcaaagtgaagatcaagcttggccggaaggagaaggcacaggaccggctgaagggcggccggcggcggccgagccgagggtcccgagccaagccggtcgtgagtgacgatgacagtgaggaggaacaagaggaggaccgctcaggaagtggcagcgaagaagactgagccccgacattccagtctcgaccccgagcccctcgttccagagctgagatggcataggccttagcagtaacgggtagcagcagatgtagtttcagacttggagtaaaactgtataaacaaaagaatcttccatatttatacagcagagaagctgtaggactgtttgtgactggccctgtcctggcatcagtagcatctgtaacagcattaactgtcttaaagagagagagagagaattcc

SEQ ID NO: 4346 - DNA, 2655 bp, Homo sapiens
gagcggcgaaagccgggagggcgagcgagagagcaagcaggcagcaggctgccggcgggcgggcggacggcacagagggagggagcgagcgagcagtgagtaagccagcaagggcggtcgggtcccgaggtcagccgagatttctcaggtccctccggccccctccctggagtccacagcgcctccggtgtccagaggatcggacacggcccggcccggccatggcctcgttgctgaaggtggatcaggaagtgaagctcaaggttgattctttcagggagcggatcacaagtgaggcagaagacttggtggcaaattttttcccaaagaagttattagaacttgatagttttctgaaggaaccaatcttaaacatccatgacctaactcagatccactctgacatgaatctcccagtccctgaccccattcttctcaccaatagccatgatggactggatggtcccacttataagaagcgaaggttggatgagtgtgaagaagccttccaaggaaccaaggtgtttgtgatgcccaatgggatgctgaaaagcaaccagcagctggtggacattattgagaaagtgaaacctgagatccggctgttgattgagaaatgtaacacggtcaaaatgtgggtacagctcctgattcccaggatagaagatggaaacaactttggggtgtccattcaggaggaaacagttgcagagctaagaactgttgagagtgaagctgcatcttatctggaccagatttctagatattatattacaagagccaaattggtttctaaaatagctaaatatccccatgtggaggactatcgccgcaccgtgacagagattgatgagaaagaatatatcagccttcggctcatcatatcagagctgaggaatcaatatgtcactctacatgacatgatcctgaaaaatatcgagaagatcaaacggccccggagcagcaatgcagagactctgtactgaggccagggccagggccaggggactctgtgagtctggctcaagaccgacattgccttggtttgttacatgactatcgtgatggggaaactggctggaaatagtaatcacacctctctgtttttagttagagtctaatgaaactctcatctagttctgtgatgtgtttacctcttttttcaggcctcaggaactcttctatttccttccctaataccccacacccaacctgtcgtaatttctggagaactccaggtttgtgtgtgcaggatgttggcacaaaaatacctgtgttttcattctccccctctctccctcctgtgtcttgcgctttatgttttcttccgtttgataattagttggttaaaagctgagggaaccggaaggaaagtgctaggtgttttttaggaactagggtggcggggggacgaacttctcttcctcacatgaggttactgtttctttcctctgtggggcattggatcctcccacagttgccctggtgatgacttagggcttcccatctgtgtacatcccactttgaatcttgatcgtgacaagaaataccttaggccttcagtcaattccgaagctccttcagttgtttttataatgggcgttttcacatgcacatatgtgtatgcatgtatacgcccatacagacatgcacacacagactcctactccattagctaacataccctccctctccacaacccctgtcacatacctttcaggaggtgacagttgtcttagttgtcatctacccagacaaacgtcctgggcccgtcctccctcctgatactgtagcctcttggtacccagggtgagttggtggagaacagagagatgagaagcagagggcttggggaaagcctgttcctctctgactcagccctttttggcattattgcaagagcttgactcctggttgccttttcccagccagttttcagttggggtgaaggtttctgcaagtgtgaggtccagatgctgctgctcatgttgggctttccttttgggaactatttctctttatttatagtgtcgggcttccggggaaagcaatcattggtgtgtatgtgtatgtgcatgcacacacgtgcatatacacatttgtgtatgtggaaatgtgctgggcaagtcaaaactatagaagagttgcctcctgtctctcgaatcttccagagatatcacttaattgttaacagcttttgtgttaatccccttcagcccctagctcttttattctaccacggctggagagttgatacctgcagtcagcctgccagtgactcttagtgtctgtttctgacttatttttcctgtctctgtcttccaacccccaataatatttccaccggggatgcatcatttttactcccaatattctgtagagagggagtcaggatgctgtcttcccacgaatagtactcagtaacaaaccaattgcattttagttgggcagtgctcccacccaccctccagatcccttccagctaaaacccttcccccttccctccatgtgtttctcagtttcccgtttcgtttgttggactgttccactgcccctcctcctcaccctatcacccatggatcgtaatgtaaaattcttttaccatgtcaagaaattattaaaaatacaggtactttgacctctttctaaagccgc

SEQ ID NO: 4347 - DNA, 2062 bp, Homo sapiens
attacaaaggttgcttaacttctaattatttgatcactgaggaaaatccagaaagctacacaacactgaaggggtgaaataaaagtccagcgatccagcgaaagaaaagagaagtgacagaaacaactttacctggactgaagataaaagcacagacaagagaacaatgccctggacatggctccagagatccacatgacaggcccaatgtgcctcattgagaacactaatggggaactggtggcgaatccagaagctctgaaaatcctgtctgccattacacagcctgtggtggtggtggcaattgtgggcctctaccgcacaggaaaatcctacctgatgaacaagctagctgggaagaataagggcttctctctgggctccacagtgaaatctcacaccaaaggaatctggatgtggtgtgtgcctcaccccaaaaagccagaacacaccttagtcctgcttgacactgagggcctgggagatgtaaagaagggtgacaaccagaatgactcctggatcttcaccctggccgtcctcctgagcagcactctcgtgtacaatagcatgggaaccatcaaccagcaggctatggaccaactgtagtatccttttgtgacccagaacagcaccaaggtcagaggggacacctgtattcataaaccagctgcctgactgtgaatcctgatgaatcaagctcaaaaggagaaaacaaaaaataatgcaagtacagaggagagatcccatctatgtgacagagctgacacatcgaatccgatcaaaatcctcacctgatgagaatgagaatgaggattcagctgactttgtgagcttcttcccagattttgtgtggacactgagagatttctccctggacttggaagcagatggacaacccctcacaccagatgagtacctggagtattccctgaagctaacgcaaggtaccagtcaaaaagataaaaattttaatctgccccgactctgtatccggaagttcttcccaaagaaaaaatgttttgtcttcgatctgcccattcaccgcaggaagcttgcccagcttgagaaactacaagatgaagagctggaccctgaatttgtgcaacaagtagcagacttctgttcctacatctttagcaattccaaaactaaaactctttcaggaggcatcaaggtcaatgggcctcgtctagagagcctagtgctgacctatatcaatgctatcagcagaggggatctgccctgcatggagaacgcagtcctggccttggcccagatagagaactcagccgcagtgcaaaaggctattgcccactatgaccagcagatgggccagaaggtgcagctgcccgcagaaaccctccaggagctgctggacctgcacagggttagtgagagggaggccactgaagtctatatgaagaactctttcaaggatgtggaccatctgtttcaaaagaaattagcggcccagctagacaaaaagcgggatgacttttgtaaacagaatcaagaagcatcatcagatcgttgctcagctttacttcaggtcattttcagtcctctagaagaagaagtgaaggcgggaatttattcgaaaccagggggctattgtctctttattcagaagctacaagacctggagaaaaagtactatgaggaaccaaggaaggggatacaggctgaagagattctgcagacatacttgaaatccaaggagtctgtgaccgatgcaattctacagacagaccagattctcacagaaaaggaaaaggagattgaagtggaatgtgtaaaagctgaatctgcacaggcttcagcaaaaatggtggaggaaatgcaaataaagtatcagcagatgatggaagagaaagagaagagttatcaagaacatgtgaaacaattgactgagaagatggagagggagagggcccagttgctggaagagcaagagaagaccctcactagtaaacttcaggaacaggcccgagtactaaaggagagatgccaaggtgaaagtacccaacttcaaaatgagatacaaaagctacagaagaccctg

SEQ ID NO: 4348 - DNA, 2932 bp, Homo sapiens
cagtttcattaggctctgaagccattacaaaggttgcttaacttctaattatttgatcactgaggaaaatccagaaagctacacaacactgaaggggtgaaataaaagtccagcgatccagcgaaagaaaagagaagtgacagaaacaactttacctggactgaagataaaagcacagacaagagaacaatgccctggacatggctccagagatccacatgacaggcccaatgtgcctcattgagaacactaatggggaactggtggcgaatccagaagctctgaaaatcctgtctgccattacacagcctgtggtggtggtggcaattgtgggcctctaccgcacaggaaaatcctacctgatgaacaagctagctgggaagaataagggcttctctctgggctccacagtgaaatctcacaccaaaggaatctggatgtggtgtgtgcctcaccccaaaaagccagaacacaccttagtcctgcttgacactgagggcctgggagatgtaaagaagggtgacaaccagaatgactcctggatcttcaccctggccgtcctcctgagcagcactctcgtgtacaatagcatgggaaccatcaaccagcaggctatggaccaactgtactatgtgacagagctgacacatcgaatccgatcaaaatcctcacctgatgagaatgagaatgaggattcagctgactttgtgagcttcttcccagattttgtgtggacactgagagatttctccctggacttggaagcagatggacaacccctcacaccagatgagtacctggagtattccctgaagctaacgcaaggtaacaggaagcttgcccagcttgagaaactacaagatgaagagctggaccctgaatttgtgcaacaagtagcagacttctgttcctacatctttagcaattccaaaactaaaactctttcaggaggcatcaaggtcaatgggcctcgtctagagagcctagtgctgacctatatcaatgctatcagcagaggggatctgccctgcatggagaacgcagtcctggccttggcccagatagagaactcagccgcagtgcaaaaggctattgcccactatgaccagcagatgggccagaaggtgcagctgcccgcagaaaccctccaggagctgctggacctgcacagggttagtgagagggaggccactgaagtctatatgaagaactctttcaaggatgtggaccatctgtttcaaaagaaattagcggcccagctagacaaaaagcgggatgacttttgtaaacagaatcaagaagcatcatcagatcgttgctcagctttacttcaggtcattttcagtcctctagaagaagaagtgaaggcgggaatttattcgaaaccagggggctattgtctctttattcagaagctacaagacctggagaaaaagtactatgaggaaccaaggaaggggatacaggctgaagagattctgcagacatacttgaaatccaaggagtctgtgaccgatgcaattctacagacagaccagattctcacagaaaaggaaaaggagattgaagtggaatgtgtaaaagctgaatctgcacaggcttcagcaaaaatggtggaggaaatgcaaataaagtatcagcagatgatggaagagaaagagaagagttatcaagaacatgtgaaacaattgactgagaagatggagagggagagggcccagttgctggaagagcaagagaagaccctcactagtaaacttcaggaacaggcccgagtactaaaggagagatgccaaggtgaaagtacccaacttcaaaatgagatacaaaagctacagaagaccctgaaaaaaaaaaccaagagatatatgtcgcataagctaaagatctaaacaacagagcttttctgtcatcctaacccaaggcataactgaaacaattttagaatttggaacaagtgtcactatatttgataataattagatcttgcatcataacactaaaagtttacaagaacatgcagttcaatgatcaaaatcatgttttttccttaaaaagattgtaaattgtgcaacaaagatgcatttacctctgtaccaacagaggagggatcatgagttgccaccactcagaagtttattcttccagacgaccagtggatactgaggaaagtcttaggtaaaaatcttgggacatatttgggcactggtttggccaagtgtacaatgggtcccaatatcagaaacaaccatcctagcttcctagggaagacagtgtacagttctccattatatcaaggctacaaggtctatgagcaataatgtgatttctggacattgcccatggataattctcactgatggatctcaagctaaagcaaaccatcttatacagagatctagaatcttatattttccataggaaggtaaagaaatcattagcaagagtaggaattgaatcataaacaaattggctaatgaagaaatcttttctttcttgttcaattcatctagattataaccttaatgtgacacctgagacctttagacagttgaccctgaattaaatagtcacatggtaacaattatgcactgtgtaattttagtaatgtataacatgcaatgatgcactttaactgaagatagagactatgttagaaaattgaactaatttaattatttgattgttttaatcctaaagcataagttagtcttttcctgattcttaaaggtcatacttgaaatcctgccaattttccccaaagggaatatggaatttttttgactttcttttgagcaataaaataattgtcttgccattacttagtatatgtagacttcatcccaattgtcaaacatcctaggtaagtggttgacatttcttacagcaattacagattatttttgaactagaaataaactaaactagaaat

SEQ ID NO: 4349 - DNA, 2834 bp, Homo sapiens
gagcggcccgaggaggacgcagcggcgctggagctttcgtcggacgaggcggtggaggttgaggaggttattgaggagtcccgcgcagagcgtatcaagcgcagacactgcggcgcgtggacgacttcaagaaggccttctccaaggagaagatggagaagaccaaggtgcgtacccgcgagaacctggagaagacgcgcctcaagaccaaggaaaacctggagaagacgcggcacaccctggagaagcgcatgaacaagctgggcacgcgcctggtgcccgccgagcggcgcgagaaactgaagacgtcgcgggacaagttgcgcaaatccttcacgcccgaccacgtggtgtacgcgcgctccaagaccgcggtctacaaggtgccacccttcaccttccacgtcaagaagatccgcgagggccaggtggaagtgctcaaggccaccgagatggtggaggtgggcgccgacgacgacgagggcggcggagcgcggggaggccggcgacctgcggcgcgggagcagccccgacgtgcacgcgctgctggagatcaccgaggagtcggacgccgtgctggtggacaagagcgacagcgactgagccgcccccgctgccacccaccccattcctcgctccttccgaacttcctctttcgcattctctctcggctcgagctggctgagatttttctaaattgaaaacacgcccccctccccacacctccaggaactccactcccagtcttagagctgttaggacccgatggggaggcagcccccgcagtggacagcccccgcttggacacagtccgagtggaatgggaagggaatggtcaatccctgtcctggttgtccaagtcgggatctcagaggaaattgcagtgattccacggttaggcccccctgggggggctgccttcccctcagcctctccccacaccacccacccagctgctgtcattccgctcactgagctcttcttcattctcaccctgatccctgggggactcaaagccaaaactgcccaaagaggaaagattgaatcctaaaggggatccttgcccccatgggaggccccctactagaaggacgtgaaagcagcttttgggggaaactgaggcagtggggaagacagagcagaatgagccctcaccctggctgggggtccagcacaggctgtatctgcagagggtcccagaggaacgctggagccaagagaagccctgggaaggaggggtggggaacgacatgcatgtgagggatggcacactgatgtgtttatgcacctgtacacaggagcgcatggccatggctttggaaaggagaatggaaaaatagaagaaggtcggccgggcttggtggcttatgcctgtaaccccagcactttgggaggccgaggtgggcggatcacctgaggtcaggagttcgggaccagcctggcaaacaccccatctctactaagcgaaaacccatctctactaaaattacaaaaattagctgggcatgattgcgcatgcctgtaatcccagctactttggaggctgaggtggggagaattgcttgaacctgggaggtggaggttgcagtgagccaaggtcgcgacactgcactccagcctgggtgacagagtgagactccatctcaacagaaggaaaaaaaaggaaaataggagaaggtggaaatgggtgaagagagaagtcccctcactagctgcatgagaaatctatcttactgtggttctccatgggcagcaggaccatttttcagaatcaagagggaggacagtgtgagaaggcgatgatccaaagaagacagagaggtcagccccacccgatccctcaaatgggctcttggaggcacccccaggggcagcccatttctcaaagtccagaaaattagggtcccagaagggggcagcagcaggctgggagttaggagggagagcagggtgccggccctgccaccaagttgagagctggaggggaggtggggagagaacatcacagagcagccagccctggttcactcctggcagtttcttctcaagctccttccctaggagcatggtggcacgtgcctgtggtctcagctacttgggaggctgaggcgggaggatcgccagagcccaggagtttgaggctgcagtgagctatgagggtgcctctgtgctccatcctaggcaacagagtgagacgctgtttaaaaaggaaaaaatccttccctagagctagtatcctaaagctgcagagctagcccagacctcattggtttccttgtccttggggtgcttttcctgaatctttgggggtgaagggagtgttgctcccagtccagaggcctgattctgttcggactgggttctcaagacacgaccaggttctcaagacacgagtccccttgttcctccccattaaagggggtttgtcagaagcaagaacagcccctctccccagtcacagcctgaagggaggccccgagagcttcctccttccccccacctgctccttaccttctctgccctgctttttagaactgcagttcattgttttaagggattgggggagggagcctggggacacaaaccttttatacaatacaaagctttgctttttttttttttttcttccttttccctttctcggttctcttctctcctctgaatggctgaagacccctctgccgagggaggttggggattgtgggacaaggtcccttggtgctgatggcctgaaggggcctgagctgtgggcagatgcagttttctgtgggcttggggaacctctcacgttgctgtgtcctggtgagcagcccgaccaataaacctgcttttct

SEQ ID NO: 4350 - DNA, 1735 bp, Homo sapiens
ctggtggaccagctggctcctaaagaggagaggggactaaatcatgtatgcttggttctttcttcccagcttctctcagagcccacccacctttgggttcctgttggacatcgatggagtgcttgtgcggggccacagagtgatccctgctgctctgaaagccttccgaaggctggtgaactcccaggggcagctgcgggtgcccgtggtttttgttacaaatgctgggaacatcttacaacacagcaaagcccaggagctgtcagccctgctggggtgcgaggtggatgcagaccaagttatcctctctcacagccccatgaagctcttctccgagtaccatgagaagcggatgctggtgtctggacaggggcccgtgatggaaaatgcccagggactgggcttccgaaatgtcgtcaccgtggatgagctgcggatggcctttcctctgcttgacatggtggacctggagcggcggctaaagaccacgcccctcccgaggaatgacttcccccgcattgaaggggtgctcctcctaggggagccggtccgctgggagaccagcctgcagctgatcatggatgtcctcctcagcaatgggagccctggggctggcctggcaacacccccctacccccacctccccgtcctagccagcaacatggatctcctgtggatggctgaagccaagatgcccaggtttggacatggcacctttctgctgtgcctggaaaccatttaccagaaagtgacgggcaaggagctgagatacgagggcctgatgggcaaacccagcatcctcacttaccagtatgccgaggacctgatcaggcgacaggcggagaggcggggctgggccgcccccatccggaagctctatgctgtgggtgataaccctatgtctgacgtatacggcgccaacctgttccaccagtacctgcagaaggcaacgcatgatggggcgccagaactaggggccgggggcacacggcagcaacagccctcagcaagccagagctgcatctccatcctggtgtgtacaggcgtctacaatcccaggaacccacagtccacggagcctgtccttggaggaggggagcctccattccacgggcaccgagacttatgcttcagtccagggctcatggaggcctcccacgtggtgaatgacgtgaatgaggctgtgcagctggtcttccgcaaggagggctgggctttggagtgagggcagtgcggtggaggtgagggggtgagcctggacctgtgggcgagtcccattggctgggctctggcctgatcactgggctcaggtcagggcttggttcccttgccacccttcttgctgccccatgagtgtggcattactggtcacttggaagaagacagtgactctttttccctgctgggtagcattttgtatggaacggttggaattttctgggcccagttcccacgtgcctttcgtggcagtctaacctcaggccattctcttcccctgtgtgcctcagtgtccttctcatttcagtagggacttctgaaatgggggaggcagtgtggaatactgtggatgtctgtgcagagcctttgccggcactgaaggcatgcagcctgtcggcagagtgtcttaacaccagatgctactttttactgtattgtagtttattgcccggagatgtggggctttttttttaaataaaataatcataataaatgttcatgatgctgactcttgtga

SEQ ID NO: 4351 - DNA, 1304 bp, Homo sapiens
cagcggctgcaggtctccaagttgcggccgctggagcccgagccatgcggaccgcggaccgggaggcgcgcccggggcttccgtccctgctgctgctgctgctggccggggccgggctgtcagccgcctcgcccccagcagcgccgcgcttcaacgtgagcctggactcggtccccgagctgcgctggctgcccgtgctgcggcactacgacttggacttggtgcgcgccgcgatggcgcaagtcatcggggacagagtccccaagtgggtgcacgtgttaatcggaaaagtggtcctggagctggagcgcttcctgccccagcccttcaccggcgagatccgcggcatgtgtgacttcatgaacctcagcctggcggactgccttctggtcaacctggcctacgagtcctccgtgttctgcaccagtattgtggctcaagactccagaggccacatttaccatggtcggaatttggattatccttttgggaatgtcttacgcaagctgacagtggatgtgcaattcttaaagaatgggcagattgcattcacaggaactacttttattggctatgtaggattatggactggccagagcccacacaagtttacagtttctggtgatgaacgagataaaggctggtggtgggagaatgctatcgctgccctgtttcggagacacattcccgtcagctggctgatccgcgctaccctgagtgagtcggaaaacttcgaagcagctgttggcaagttggccaagactccccttattgctgatgtttattacattgttggtggcacgtccccccgggagggggtggtcatcacgaggaacagagatggcccagcagacatttggcctctagatcctttgaatggagcgtggttccgagttgagacaaattacgaccactggaagccagcacccaaggaagatgaccggagaacatctgccatcaaggcccttaatgctacaggacaagcaaacctcagcctggaggcacttttccagtgaaagcaggccaggtgcggtggctcacgcctgtaatcccagccctttgggaggccaaggcgggtggatcacttgaggtcaggagttcaagaccagcctggccaacatggtgaaacctcgtctctactaaaaatacaaaaatcaaccaggcatgacggtgcacgcctgttatcacagctacttgggaagcagcggctggagaattgcttgaacctgggaagtcgaggctgcaagtgagctgagatcatgccatggcagtctagcctgggcaacagagcgagactctgtttc

SEQ ID NO: 4352 - DNA, 1283 bp, Homo sapiens
  misc_feature (395)..(534): n is a, c, g, or t
  misc_feature (993)..(1012): n is a, c, g, or t
ttgcggccgctggagcccgagccatgcggaccgcggaccgggaggcgcgcccggggcttccgtccctgctgctgctgctgctggccggggccgggctgtcagccgcctcgcccccagcagcgccgcgcttcaacgtgagcctggactcggtccccgagctgcgctggctgcccgtgctgcggcactacgacttggacttggtgcgcgccgcgatggcgcaagtcatcggggacagagtccccaagtgggtgcacgtgttaatcggaaaagtggtcctggagctggagcgcttcctgccccagcccttcaccggcgagatccgcggcatgtgtgacttcatgaacctcagcctggcggactgccttctggtcaacctggcctacgagtcctccgtnnnnnnnnnnnnnnnnnnnnnnnnnnnnnnnnnnnnnnnnnnnnnnnnnnnnnnnnnnnnnnnnnnnnnnnnnnnnnnnnnnnnnnnnnnnnnnnnnnnnnnnnnnnnnnnnnnnnnnnnnnnnnnnnnnnnnnnnnnnngaactacttttattggctatgtaggattatggactggccagagcccacacaagtttacagtttctggtgatgaacgagataaaggctggtggtgggagaatgctatcgctgccctgtttcggagacacattcccgtcagctggctgatccgcgctaccctgagtgagtcggaaaacttcgaagcagctgttggcaagttggccaagactccccttattgctgatgtttattacattgttggtggcacgtccccccgggagggggtggtcatcacgaggaacagagatggcccagcagacatttggcctctagatcctttgaatggagcgtggttccgagttgagacaaattacgaccactggaagccagcacccaaggaagatgaccggagaacatctgccatcaaggcccttaatgctacaggacaagcaaacctcagcctggaggcacttttccagnnnnnnnnnnnnnnnnnnnntggctcacgcctgtaatcccagcactttgggaggccgaagcgggtggatcacttgaggtcaggagttcaagaccagcctggccaacatggtgaaacctcgtctctactaaaaatacaaaaatcaaccaggcatgacggtgcacgcctgttatcacagctacttgggaagcagcggctggagaattgcttgaacctgggaagtcgaggctgcaagtgagctgagatcatgccatggcagtctagcctgggcaacagagcgagactctgtttc

SEQ ID NO: 4353 - DNA, 951 bp, Homo sapiens
cctggatcctgctgcgagaaggggcgcgatttcttccggagaggttccctgtcgcgcccaagtctgggaagtgccctttctctcttaggtaccacctcatggagacccccgcggccgccgcccccgctgggagcttattcccctccttcctgctcctggcctgcgggacgctggtggccgccttgctgggcgccgctcaccgcctggggctcttctatcagctgctgcacaaggtggacaaggcaagcgtccggcatggcggagagaacgtggccgctgtgctgagggcccatggtgtgcggttcatcttcacgctggtcggtgggcacatttccccgctgctggtggcctgtgagaaactgggcatccgtgtggtggacacacgccatgaggtcacggccgtctttgctgctgatgctatggcccgcctgtccgggacggtgggcgtggcggcagtgacagcaggccctggcctcaccaacacggtgactgcggtgaagaatgctcagatggctcagtccccaatcctgcttctgggtggggctgccagcactctgctgcagaaccggggtgcgctccaggctgttgatcagctgtcccttttccggccacccggttgtggtcaacatcctcattgggaggacggacttccgcgatggctccattgctgtatagggccttgtgggtcaggacgcttggctgccttcctgcccctggactgtgtccagctggtttggagtctcatcattgcttgccctgggcctatcccatgaggcccagtgactccacaacctccctgaggaggggatggaggggtcaaatctcagagaggctctcttgtgagctcttggaccctcctcttcacggacccaactgtgccgtttgtcccctctcttatggagactgaataaaccacctctggcccatgtaggcccaagtactcagtctcag

SEQ ID NO: 4354 - DNA, 1561 bp, Homo sapiens
caccgcggaccgagcgcggagttctggagtctcggacccgaagccgccacagggcgccccgcctcccgcccgccatgcccgcgccccgcgccccgcgcgctctggcggccgccgcgcccgcgtccgggaaggccaagctgacgcacccggggaaggcgatcctggcaggcggcctggcgggtggcatcgagatctgcatcaccttccccaccgagtacgtgaagacgcagctgcagctggacgagcgctcgcacccgccgcggtaccggggcatcggggactgcgtgcggcagacggttcgcagccatggcgtcctgggcctgtaccgcggccttagctccctgctctacggttccatccccaaggcggccgtcaggtttggaatgttcgagttcctcagcaaccacatgcgggatgcccagggacggctggacagcacgcgtgggctgctgtgcggcctgggcgctggcgtggccgaggccgtggtggtcgtgtgccccatggagaccatcaaggtgaagttcatccacgaccagacctccccaaaccccaagtacagaggattcttccacggggttagggagattgtgcgggaacaagggctgaaggggacgtaccagggcctcacagccactgtcctgaagcagggctcgaaccaggccatccgcttcttcgtcatgacctccctgcgcaactggtaccgaggggacaaccccaacaagcccatgaaccctctgatcactggggtcttcggagctattgcaggcgcagccagtgtctttggaaacactcctctggatgtgattaagacccggatgcagggcctggaggcgcacaaataccggaacacgtgggactgcggcttgcagatcctgaagaaggaggggctcaaggcattctacaagggcactgtcccccgcctgggccgggtctgcctggatgtggccatagtgtttgtcatctatgatgaagtggtgaagctgctcaacaaagtgtggaagacggactaagcctagagaggccgcaaggggaccgccccaggcaccgccagagtgtcctgctacctttgtctcacgattccagtgcagtagtgccaaaaggccccttcccacgtccctcgagctctgtagcctggtctgtgcattgtggctgtcaaatccatgtgtcccccctgtggtctgtgtgtgacaccaccactgtgtcccagtgtctggcccagccatggctggatgtgcatctggcctatgaccctgtgcctgtgtttcatgttctgtgtcacgtgaccctgtgccccgcctcccggggtgcccgtgtggcctgggtcctcggccctgtagccctggcccggtcccagtccggtgccttccaccctgccctggcctaccacagctgcctccgggcctcggcctggcttcaccgcattccaggggctgcagccccctgcttctcccgccattggccttaactggccctcgggccctctctccgccccggacagggtggcacccaccactctcaggaccaccctgccaaggcagaataaaccggatcctgttgcagc

SEQ ID NO: 4355 - DNA, 4217 bp, Homo sapiens
cccagggcccggcaggaggagccttggtggcgagaaaggaaatccaggctcccctttccttaaagccactgcagcagctgggaaggcgcccacagagcgggcgcgccaagcgggacgcgggagtcgcagagagggaccccgggcgcctgctgagctcagctggcagagtttgcaagtggcggagacccttcaggtggcatccctgagtcctgatgcctgactggatggaggcccaccagcttctgttcccatgaggtagaaaggccaagcttggtcttcagctggggaagaggccagaaacaaggcccccagtgaaataacccagatccattggcctgaggagcagagaaagggcaagaagtgaactgcagctgctggtaaccctcagaaaccttctccaagtgctattctcacagttctttaggaacactctgaagtgaagaacaatatgtaggaaaatgggaccaacttatgtgtgttctgagcctcaaaacccccttgttggcccaaagaagctcaccttcagtttgggagggctggtaagctccatcctttctcatggcctcagccaagcattgaacttgccctccccttctggccttggtgatcactttttcaggaagagtgagactgaggacccccaagtgttccatccctaaggaaagcttgggaaaccaagccccttccatcctctcccaagcaccccagccaagccccagagagccagtccggaatgatcccactatggccaagctctggttcaaattccagcggtacttccgccggaaacctgtgcgcttctttaccttcctggcactctacctgactgctgggagccttgtcttccttcactctggctttgtgggccagcccgctgtctcggggaaccaggcgaaccccgctgctgcaggaggcccagctgagggtgctgagctgtccttcttgggtgacatgcatctgggcagaggtttccgggacacaggtgaagcctcaagcattgctcgcaggtacggaccctggttcaagggcaaggatgggaatgagagagccaagcttggcgactacggtggagcctggagccgagccctcaaggggagggttgtccgggagaaggaggaagagcgagccaagtacatcggctgctacctggatgacacccagagtcgggcccttcgaggagtgtccttttttgactacaaaaagatgaccatcttccgttgccaggacaactgtgctgaacggggttacctgtatggcgggctggagttcggcgccgagtgctactgcggccacaagatccaggcgacgaacgtgagcgaggcagagtgcgacatggagtgcaagggcgagcgaggcagcgtgtgcggcggcgccaaccgcctctctgtctaccggctgcagctggcccaggagtcggcccgcaggtatggaagtgcagtgttccggggctgcttccgcaggcccgacaacctttccctggccttacccgtgacagctgccatgctgaacatgtctgtggacaaatgcgtggacttctgcactgagaaggagtacccgctggcagctcttgcaggcaccgcctgccactgtgggtttcccaccacccgattcccgctccatgacagagaggatgagcagctctgtgcccagaagtgcagcgcggaggagtttgagagctgcgggactcctagttacttcattgtgtaccagacacaagtccaagacaaccgttgcatggacagaaggttcctgccaggcaagtccaagcagctcattgctttggccagcttcccaggtgctggcaacacgtgggctcgccacctcattgaattggccacaggcttctacactggcagctactacttcgatggctccctctacaacaaagggtttaaaggtgagcgggaccactggcgcagcggacggaccatctgcatcaagacgcacgaaagcggccagaaagagatcgaggccttcgacgccgccatcctgctcatccgcaacccctacaaagccctcatggctgagttcaaccgcaagtacggcggccacataggctttgctgcgcatgcccactggaagggcaaagagtggccagagttcgtgaggaactatgccccgtggtgggccactcacacactggactggctcaagtttggcaagaaggtgctggtggtgcactttgaggacctgaagcaggacctctttgtccagctgggccggatggtcagcctgctgggcgtggctgtcagggaggaccggctgctctgtgtggagagccagaaggatggcaacttcaagcgctcagggctccggaagctcgagtatgacccctatactgcggacatgcagaagaccatctctgcctacatcaagatggtggatgcagccctcaaagggcggaacctaacgggtgtccccgatgactactacccaagatgatgcgtccacacagggggagggtagactgggagtcctgaccacgcaggccctggggactcaagacccctggttacccccactcatctgtcctctctttggtctggggacaatccccttggctgctctttgccttcaatgagtttcctgcatgacagaggaggctcaagggaagagattgcccaggcactaccactctgctcacatgttccccccttggcaatgtggggcatcttgtttagggggttctagttacatggactcttttctgtctcctgggtccctgcccccaccactctgggttccatttgtgggagggagggctcatccacatcatggagacttgctggatgccccatggcaattgtcaaggctcttgatgcaagagcccagggggctattgtaaaaacttggccccagatgcttgtcccttctgggctgagatttcgcagcccccttctcatctccacccaagaagtgctggcaccgatgtttaactcaggccaccttctgttctaaagaaagattgctgggaagtttctccgtggccttaggtttctgacatcctggatagtgtggggaggtaatggtgctcacagtaggttaattggagacaccatgtggggccattggtgttatgagccccccaggccacactgcttctcagaaatgagctgcttgcctttccacctccagggcatgaaccctgcccctttctatccatgctgtgtccaggaggtgaccttgagatcctgataccaccttcaaggaacctcaggcaccaacagtgagcccacgaggatggtcacatgccatgtgcagaatttgacttaagagagagccccagtgacacatctctccatggtgggctccagtcagtcttacactgcccttctgacccctacaaatgggtcctttgctatccaggtgagacagcaagagtgttcttaatcagatggaaccacacccaaaatggacccccactaccttcccagaccatatatctccccttgatcatagtccaacagggccagcttcccttgggggccctttaaggaatggggtgaatgaaattgtgtcatttctatacaaacactgctctcttgatgctgaaatgccaaaccgaaggatttctgaggacctaaatcacggagcatcaatcttacaaagtgttggtccagagtcccatctcttccccaaccctggataccagtagcttcccacccagtccaaacctgcaccatccatcattatgtagatgaaaaagccataggtcatagcctctttgctattctattggagtagcctccctaggcagtccctctgaagccttggagtgcaggtaaatgctcattcccaagtagcaaagagaccatggagaaggtgcgtgtaaagagatatatttttgtaagaggaatatgattaatacattccgccccttggaacctggccatgcaaagcaagggcacagggattagacctgtggcacacttccccaattccctcatctgtaggatttgggctgccccaggcccacccagggggctctgaatgtattttgtaccgtgtttctttcccccaggagaatttttagtcttctttcatgaagcagtggaggggttggcctcccttctactgggaggttgactctctctgggagactcttggtccaagacctgggtcagttctttgctggtggtcccctctgaccacaagcttctgcctgaagattcctcaggtcaacaccatcattaaatgcgagttttgttgatgattct

SEQ ID NO: 4356 - DNA, 942 bp, Homo sapiens
ccgagagtggtcggggtttcctgcttcaacagtgcttggacggaacccggcgctcgtcctgcaccccggccggccgcccatagccagccctccgtcacctcttcaccatgccctcggactgccccaaggcccccgccgcagctccagcgccgcgtagccaccactgccgctgccgccgcctctccttagtcgccggcatgacgaccgcgtctacctcgcaggtgcgccagaactaccaccaagactcagaggccgccatcaaccgccagatcaacctggagctctacgcctcctccatttacctgtgcgtggcttactactttgacagcgatgatgtggctttgaagaactttgccaaatactttcttcaccaatctcatgaggagagggaacatgctgagaaattgatgaagctgtagaaccaacgaggtggccgaatcttccttcaggatatcaagaaaccagactgtgcggggagaatgcgatgggagagcgggctgaatgcgatggattacatttggaaaaaattgtgcattttgcattacatttggaaaaaaatgtgaatcagtcactactggaactgcacaaactggccactgacaaaaatgacccccatttgtgtgacttcattgagacacattacctgaatgaacaagtgaaggccatcaaagaattgggtgaccacgtgaccaacatgcacgagatgggagcgcccgaatctggcgtggcagaatacctctttgacaagcacaccctgggagacagtgataatgaaagctaagcctcaggctaatttccccatagccatagggtgacttaccttgtcaccaaggcagcgcatgtatgttggggtttcctttaccttttctataagttgttccaagacacccacttaagttctttgatttgtaccattccttcaaataaataaatttggtaccc

SEQ ID NO: 4357 - DNA, 5008 bp, Homo sapiens
ggggtgacaagaaagtcatctgcaacaagttcatccagacgagtgctgtcacttgtctgcaatggccggcagaatacatcattgtctttggactggctgaagggaaggttcgtttagcaaacaccaaaactaataaatcatctaccatctatgggacagagtcttacgtggtgtccctgacaacaaattgctctgggaaaggaattctctctggtcatgcagatggtaccatcgttaggtatttctttgatgatgaaggctctggagagtcacaggggaagttggttaaccacccgtgtccaccctatgccttggcatgggcaaccaatagcatcgtggctgcaggctgtgatcggaaaattgtagcctatggaaaagaaggtcacatgctacaaacttttgattatagccgtgaccctcaggagcgggagttcaccacagctgtatcaagtcctgggggccagtctgttgtgctaggaagttatgacaggcttcgggtgttcaactggatccctcgaagaagcatctgggaagaggcaaagcccaaggagattaccaatttatacaccatcactgccttggcctggaagcgggatggctcacggctctgtgtgggcacactatgtggtggggtggaacagtttgactgctgcctccgaaggagtatttacaagaacaagtttgagttgacgtatgtgggacctagccaggtgattgtgaagaacctgtcatcaggaacccgagtggtgctcaagtcacactatggctatgaggtggaagaggtgaaaatcctaggaaaggaacgttacttggtggctcacacatcagaaacactgctgctgggggacctgaacactaatcggcttagtgagatagcctggcaaggatctggtggcaatgagaagtatttctttgaaaatgagaatgtatgcatgatcttcaatgccggagagctaaccctggtggaatatgggaataatgacaccctgggttctgtacgcactgaattcatgaacccccacctcatcagtgttcgtattaatgagaggtgtcagcgaggaacagaagataataagaaattggcttatcttattgatattaagactattgctatagtggatctgattggtggctacaacattggcaccgtcagccatgagagccgtgtggattggctggaacttaatgagactggacacaagctcctcttcagggaccggaaacttcgtttgcatctgtatgatattgaaagctgctctaagacaatgatcctcaacttctgctcctatatgcagtgggtcccaggaagtgacgtgctggtagctcagaaccgaaacagtctgtgtgtatggtacaacattgaggcacctgagagagtcaccatgttcactattaggggtgatgttataggtctggagcggggcgggggaaagaccgaggtgatggtgatggaaggtgtgactactgttgcctacacattggatgagggcctcatcgagtttggaacagccattgatgatggcaactacatccgggcaacagccttcttagagactctggaaatgaccccagaaacagaggcaatgtggaaaaccttgagtaaactggcactagaggcaaggcaactacacattgcggagaggtgcttttctgctttgggccaagtagcaaaagctcgattcctgcatgagaccaatgagattgcagatcaagtatcccgggaatatggcggagaaggaacagacttttatcaggtccgagcacgtctagccatgctggaaaagaactacaaactggctgaaatgatctttttggaacagaatgctgtggaggaggccatgggcatgtaccaggagctacaccgttgggatgagtgtatcgctgtggctgaagccaaggggcacccagccctggagaagctacgtcgtagttactaccagtggctgatggacacacagcaagaggagcgagcaggtgaactacaggagagccaaggggatgggctagcagccatcagcctctacctcaaagctgggctccctgccaaagctgctcggctggtgctgacccgagaggaactgctagccaacacagagctggtagaacacatcactgcagcccttatcaagggggaactctacgaaagggcaggtgatctctttgagaagattcacaatccacagaaggccctggagtgctaccgtaaaggcaacgcattcatgaaagcggtagagctggctcgattggccttcccagtggaggtggtgaaactagaggaggcatggggggaccacctggtgcagcagaagcagcttgatgcagccattaatcactacatcgaagccaggtgctccattaaggcaattgaggccgccctgggtgcccgccagtggaagaaggcaatttatatattagatctacaggaccggaacactgcatccaaatactatcctctcgtggcccaacactatgcatccctgcaggagtatgagattgctgaggagctctatactaagggagatcggacaaaagatgccatagacatgtacacccaggctggtcgttgggaacaagcccacaagctggcgatgaaatgcatgagaccagaagatgtgtcagtgctatacatcactcaggcccaggaaatggagaagcagggcaagtaccgtgaggctgaaaggctatatgtgacagtacaagagcctgatcttgccatcaccatgtacaaaaagcacaagttgtatgatgacatgatccgcctggtagggaagcaccatccagatctcctcagtgatacacacctacatctgggcaaggagctggaggctgaaggccgactacaggaggctgagtaccactacctcgaggcccaggaatggaaggcaacagtgaacatgtaccgggccagtgggctttgggaagaggcctacaggtggccagaactcaaggaggggctaatgcccacaaacacgtggcctatctgtgggcaaagagcctgggaggagaggctgcagttagactgcttaataagctgggactcctggaagctgctgttgaccacgctgcagacaattgctcctttgaatttgcgtttgaactctctcggctggccctcaagcacaaaacccccgaggttcatctcaaatatgctatgttcctggaggatgagggtaaattcgaagaggctgaagctgaattcatcagagctggtaaacccaaggaggcagtcctcatgtttgtccataaccaggattgggaggcagctcagcgtgtggctgaggctcacgaccctgacagtgtcgccgaggtgcttgtgggacaggcccggggggccttggaggagaaggactttcagaaagcagaagggctgctgctccgggcccagagaccaggcctggccctcaattattataaggaggctggattatggagtgacgctctgcgcatctgcaaggactatgtgcccagccagctggaggctctgcaggaagaatatgagcgggaagctactaagaagggggccaggggtgtggagggatttgtggaacaagctcgacactgggagcaggctggagagtacagccgtgccgtggactgctacctcaaagtgcgagactctggaaacagcggcctggcggagaagtgctggatgaaggcagctgaactctccatcaagtttctgcctccccaacgtaatatggaagtcgttctggctgtaggaccccagctgattggaattggaaagcacagtgcagctgcagagctctatctgaatctggaccttgtcaaggaagcaatcgatgctttcatcgagggtgaggagtggaacaaggcgaagcgtgtagctaaggagttagatcccaggtatgaagactatgtggaccagcattataaagagttcctcaagaatcagggcaaagtggactcgctggtgggtgtggatgtgatagctgctttggacctgtatgtggagcagggccagtgggacaagtgcattgaaacagctaccaagcagaactacaagattctgcacaagtatgtggctttgtatgcaactcacttgatccgggagggtagctctgcccaggcattggccctgtatgtacagcacggagcccctgctaacccacagaacttcaatatctacaaaaggatcttcactgacatggtgagctctcctggaaccaactgtgccgaggcctatcatagctgggctgatcttcgagatgtcctcttcaacctggtgaaaacctggtgaagtccagtgaggcaaactctccagcccatgaggagttcaagacgatgctgctgatcgctcattactatgccacgcgctctgcagcccagagtgtcaaacagctggaaaccgtggctgccaggctttctgtttcactcttgcgtcacacccagctactacctgtagacaaagccttctatgaagcaggcattgctgccaaggcagttggctgggataacatggcattcatcttcctcaatcgctttttggacctgaccgatgcaatcgaggaagggactctagatggccttgaccactctgattttcaggatacagacattccctttgaggtgccactcccagctaagcagcatgtaccggaggctgagagagaagaggttcgagactgggtgcttacagtctccatggaccagcggctggagcaggttctgcctcgggatgagcgtggcgcctacgaggcctccctagtggcagcgagcactggtgttcgagccctgccctgccttattacaggataccccattctgaggaacaaaattgaatttaagcggccagggaaggctgctaacaaggacaactggaataaattccttatggccatcaagacctcccacagcccagtgtgccaggacgtgctgaaattcatcagtcagtggtgtggagggctccccagcaccagcttttcctttcagtagttggtagagctgaggaagagttagggcctctccctcattaaagttttataaataa

SEQ ID NO: 4358 - DNA, 1700 bp, Homo sapiens
tccctggctcgcctcgcgcctgccggcggatccgtggtcatgccaacccagcagccggctgcgccgagtactcgtgcccccaaaccctcccggagtctctctggctcactttgtgccctgttttctgatgcagactcgggatccgggatgaaggcggagcttccccctgggcctggggcagtggggagggaaatgaccaaagaagaaaagctgcagcttcggaaggaaaagaaacagcagaagaagaaacggaaggaagaaaagggggcagaaccagagactggctctgctgtatctgcagcccaatgtcaaggcccaaccagagaactgccagaatcgggcattcagttgggcactcctcgggagaaagttccagctggtcggagtaaggccgaacttcgggctgagcgtcgagccaagcaggaggccgagcgggccctgaaacaggcaagaaaaggggaacaaggaggaccacctcctaaggccagccccagcacagctggagaaaccccctcaggagtgaagcgtctccctgagtaccctcaggttgatgacctacttctgagaaggcttgttaaaaaaccagagcgtcaacaggttcctacacgaaaggattatggatccaaagtcagtctcttctctcacctaccccagtacagcagacaaaactctctgacccagcatcccatcctctgtgatccacccagccatggtgcgactcggcctgcagtactcccagggcctggtcagtggctccaatgcccggtgtattgccctgcttcgtgccttgcagcaggtgattcaggattacacaacaccgcctaatgaagaactctccagggatctagtgaataaactaaaaccctacatgagcttcctgactcagtgccgtcccctgtcagcgagcatgcacaacgccatcaagttccttaacaaggaaatcaccagtgtgggcagttccaagcgggaagaggaggccaagtcagaacttcgagcagccattgatcggtatgtgcaagagaagattgtgctagcagctcaggcaatttcacgctttgcttaccagaagatcagtaatggagatgtgatcctggtatatggatgctcatctctggtatcacgaattcttcaggaggcttggacagagggccggcggtttcgggtggtagtggtggacagccggccatggctggaaggaaggcacacactacgttctctagtccatgctggtgtcccagcctcctacctgctgattcctgcagcctcctatgtgctcccagaggtttccaaggtgctattgggagctcatgcactcttggccaacgggtctgtgatgtcacgggtagggacagcacagttagccctggtggctcgagcccataatgtaccagtgctggtttgctgtgaaacatacaagttctgtgagcgtgtgcagactgatgcctttgtctctaatgagctagatgaccctgatgatctgcaatgtaagcggggagaacatgttgcgctggctaactggcagaaccacgcatccctacggttgttgaatctagtctatgatgtgactcccccagagcttgtggatctggtgatcacggagctggggatgatcccttgcagttctgtacctgttgttctacgagtcaagagcagtgaccagtgacgggggaaacacagggttaataaatgccatactccct

SEQ ID NO: 4359 - DNA, 1786 bp, Homo sapiens
cggaggtgacggagcggcggccccgcccggtgcgctggaggtcgaagcttccaggtagcggcccgcagagcctgacccaggctctggacatcctgagcccaagtcccccacactcagtgcagtgatgagtgcggaagtgaaggtgacagggcagaaccaggagcaatttctgctcctagccaagtcggccaagggggcagcgctggccacactcatccatcaggtgctggaggcccctggtgtctacgtgtttggagaactgctggacatgcccaatgttagagagctggctgagagtgactttgcctctaccttccggctgctcacagtgtttgcttatgggacatacgctgactacttagctgaagcccggaatcttcctccactaacagaggctcagaagaataagcttcgacacctctcagttgtcaccctggctgctaaagtaaagtgtatcccatatgcagtgttgctggaggctcttgccctgcgtaatgtgcggcagctggaagaccttgtgattgaggctgtgtatgctgacgtgcttcgtggctccctggaccagcgcaaccagcggctcgaggttgactacagcatcgggcgggacatccagcgccaggacctcagtgccattgcccgaaccctgcaggaatggtgtgtgggctgtgaggtcgtgctgtcaggcattgaggagcaggtgagccgtgccaaccaacacaaggagcagcagctgggcctgaagcagcagattgagagtgaggttgccaaccttaaaaaaaccattaaagttacgacggcagcagcagccgcagccacatctcaggaccctgagcaacacctgactgagctgagggaaccagctcctggcaccaaccagcgccagcccagcaagaaagcctcaaagggcaaggggctccgagggagcgccaagatttggtccaagtcgaattgaaaggactgtcgtttcctccctggggatgtggggtcccagctgcctgcctgcctcttaggagtcctcagagagccttctgtgcccctggccagctgataatcctaggttcatgacccttcacctcccctaaccccaaacatagatcacaccttctctagggaggaggcaaatgtaggtcatgtttttgttggtactttctgttttttgtgacttcatgtgttccattgctccccgctgccatgctctctcccttgtttccttaagagctcagcatctgtccctgttcattacatgtcattgagtaggtgggtagccctgatgggggtcgctctgtctggagcataacccacaggcgttttttctgccaccccatccctgcatgcctgatccccagttcctataccctacccctgacctattgagcagcctctgaagagccatagggcccccacctttactcacaccctgagaattctgggagccagtctgccatgccaggagtcactggacatgttcatcctagaatcctgtcacactacagtcatttcttttcctctctctggcccttgggtcctgggaatgctgctgcttcaaccccagagcctaagaatggcagccgtttcttaacatgttgagagatgattctttcttggccctggccatctcgggaagcttgatggcaatcctggaagggtttaatctccttttgtgagtttggtggggaagggaagggtatatagattgtattaaaaaaaaaaaggtatatatgcatatatctatatataatatgacgcagaaataaatctatgagaaatctatctacaaactaccctg

SEQ ID NO: 4360 - DNA, 1616 bp, Homo sapiens
ttcagttctagcgtcaacccggtgctctacgtcttcaccgctggagatctgctgccccgggcaggtccccgtttcctcacgcggctcttcgaaggctctggggaggcccgagggggcggccgctctagggaagggaccatggagctccgaactacccctcagctgaaagtggtggggcagggccgcggcaatggagacccggggggtgggatggagaaggacggtccggaatgggacctttgacagcagaccctacaacctgctgcccttccctgtccctttccaccccccacccaccctccagaggtcctcccgacggccatgaacactacatcttctgcagcacccccctcactaggtgtagagttcatctctctgctggctatcatcctgctgtcagtggcgctggctgtggggcttcccggcaacagctttgtggtgtggagtatcctgaaaaggatgcagaagcgctctgtcactgccctgatggtgctgaacctggccctggccgacctggccgtattgctcactgctccctttttccttcacttcctggcccaaggcacctggagttttggactggctggttgccgcctgtgtcactatgtctgcggagtcagcatgtacgccagcgtcctgcttatcacggccatgagtctagaccgctcactggcggtggcccgcccctttgtgtcccagaagctacgcaccaaggcgatggcccggcgggtgctggcaggcatctgggtgttgtcctttctgctggccacacccgtcctcgcgtaccgcacagtagtgccctggaaaacgaacatgagcctgtgcttcccgcggtaccccagcgaagggcaccgggccttccatctaatcttcgaggctgtcacgggcttcctgctgcccttcctggctgtggtggccagctactcggacatagggcgtcggctacaggcccggcgcttccgccgcagccgccgcaccggccgcctggtggtgctcatcatcctgaccttcgccgccttctggctgccctaccacgtggtgaacctggctgaggcgggccgcgcgctggccggccaggccgccgggttagggctcgtggggaagcggctgagcctggcccgcaacgtgctcatcgcactcgccttcctgagcagcagcgtgaaccccgtgctgtacgcgtgcgccggcggcggcctgctgcgctcggcgggcgtgggcttcgtcgccaagctgctggagggcacgggctccgaggcgtccagcacgcgccgcgggggcagcctgggccagaccgctaggagcggccccgccgctctggagcccggcccttccgagagcctcactgcctccagccctctcaagttaaacgaactgaactaggcctggtggaaggaggcgcactttcctcctggcagaatgctagctctgagccagttcagtacctggaggaggagcaggggcgtggagggcgtggagggcgtgggagcgtgggaggcgggagtggagtggaagaagagggagaggtggagcaaagtgagggccgagtgagagcgtgctccagcctggctcccacaggcagctttaaccattaaaactgaagtctgaaatttggtcaa

SEQ ID NO: 4361 - DNA, 1511 bp, Homo sapiens
cacatttcatccttttacatggttcccatctaccctcacaacacatgtcatcaccaaagacacacatacaagctccaatggcttttgccaggcaattcttcctccaggaccccatctggcccctccctcatccctccccttggactttgcccttcttactggccaggcaggggggccagagtccaggcttgactcattcccaccttgtcctgggctgagatcccaggtttgtaacagaaaacaccactaaagccccagcacaggagagaaccacccagcccagaagttccagggaaggaactctccggtccaccatggagtacctctcagctctgaaccccagtgacttactcaggtcagtatctaatataagctcggagtttggacggagggtctggacctcagctccaccaccccagcgacctttccgtgtctgtgatcacaagcggaccatccggaaaggcctgacagctgccacccgccaggagctgctagccaaagcattggagaccctactgctgaatggagtgctaaccctggtgctagaggaggatggaactgcagtggacagtgaggacttcttccagctgctggaggatgacacgtgcctgatggtgttgcagtctggtcagagctggagccctacaaggagtggagtgctgtcatatggcctgggacgggagaggcccaagcacagcaaggacatcgcccgattcacctttgacgtgtacaagcaaaaccctcgagacctctttggcagcctgaatgtcaaagccacattctacgggctctactctatgagttgtgactttcaaggacttggcccaaagaaagtactcagggagctccttcgttggacctccacactgctgcaaggcctgggccatatgttgctgggaatttcctccacccttcgtcatgcagtggagggggctgagcagtggcagcagaagggccgcctccattcctactaaggggctctgagcttctgcccccagaatcattccaaccgacccactgcaaagactatgacagcatcaaatttcaggacctgcagacagtacaggctagataacccacccaatttccccactgtcctctgatcccctcgtgacagaacctttcagcataacgcctcacatcccaagtctatacccttacctgaagaatgctgttctttcctagccacctttctggcctcccacttgccctgaaaggccaagatcaagatgtcccccaggcatcttgatcccagcctgactgctgctacatctaatcccctaccaatgcctcctgtccctaaactccccagcatactgatgacagccctctctgactttaccttgagatctgtcttcatacccttcccctcaaactaacaaaaacatttccaataaaaatatcaaatatttaccactaagacttctgactccaatttaaaccaggaaagggatggggtggataccccattttgccctcccccatcaacacccagtcccagatccaaagcc

SEQ ID NO: 4362 - DNA, 1912 bp, Homo sapiens
gtggcgccgctctagccagcgcctgggctctgtggcgggcgccgcagctccgcgtcccccgcgcctcctcccagcgcagacttcaagggctaccactggacccttcccctgtcttgaaccctgagccggcaccatgcacggacgcctgaaggtgaagacgtcagaagagcaggcggaggccaaaaggctagagcgagagcagaagctgaagctataccagtcagccacccaggccgtattccagaagcgccaggctggtgagctggatgagtccgtgctggaactgacaagccagattctgggagccaaccctgattttgccaccctctggaactgccgacgagaggtgctccagcagctggagactcagaagtctcctgaagagttggctgctctggtgaaggcagaactgggcttcctggagagctgcctgcgggtgaaccccaagtcttatggtacctggcaccaccgatgctggctgctaggccgcctgcctgagcccaactggacccgagagctggagctctgtgcccgtttcctggaggtggatgagcggaactttcactgctgggactatcggcggtttgtggccacacaggcagccgtgccccctgcagaagagctagccttcactgacagcctcatcacccgaaacttctccaactactcttcctggcattaccgctcctgtctcttgccccagctgcacccccagccggattctggaccacaggggcgcctccctgaggatgtgctgctcaaagagctggagctggtgcagaatgccttcttcactgaccccaatgaccagagtgcctggttttatcaccgttggctcctaggccgagctgacccccaggatgcactgcgctgcctgcatgtgagccgggacgaggcctgtctgactgtctccttctctcggcccctcttagtgggctccaggatggagatcttgctgctcatggttgatgattctcccctgattgtggagtggaggaccccagatggcaggaaccggcccagccatgtctggctctgtgacctgcctgctgcctccctcaacgaccagttgccccaacatacatttcgcgtcatttggacagcaggcgatgtccagaaagaatgcgtgcttttaaaaggccgccaggagggctggtgccgggactccacgacagacgagcagctattcaggtgtgagctgtcagtggagaagtccacagtgctgcagtctgagctggaatcctgtaaggagctgcaggagctggagcctgagaataaatggtgcctgcttaccatcatcctgctgatgcgggcactggaccccctgctgtatgagaaggagaccctgcagtacttccagaccctcaaggccgtggaccccatgcgggcaacgtatctggatgacctgcgcagcaagttcttgctggagaatagcgtgctcaagatggagtatgccgaggtgcgtgtgctgcacctggctcacaaggatctgacagtgctctgccatctggaacagctgctcttggtcacccatcttgacttgtcacacaatcgcctccgaaccctgccacctgcactggctgccctgcgctgccttgaggtgctgcaggccagtgataatgccatagagtccctggacggcgtcaccaacctaccccggctgcaggagctgctactgtgcaacaaccgcctccagcagcctgcagtgctccagcctcttgcctcctgccccaggctggtcctcctcaacctgcagggtaacccgctgtgccaagcggtgggcatcttggagcaactggctgaactgctgccttcagttagcagcgtcctcacctaagaggccctgccccctacccttgccctttaacttattgggactgaataaagaatggagaggccctctcaggctacc

SEQ ID NO: 4363 - DNA, 2566 bp, Homo sapiens
accctcgggctcgagacagcggcgacgtttaaagctgagcgacccagtgccactggagacggtcagcttctccactcaggctcctccagcccgagccagaagaccccctcccccagaattctgggggccgatggaagggagccgagtcagatcgcgaggtacccagagccgacagaccggagcgacagggagttgccagaagccccgcccctaggagtgatcggaaagcctcacccatccgggtgaggaacccggagggaccgcctccgggcggagcccgccgaccatggctacgcccctggtggcgggtcccgcagctctacgcttcgccgccgcggctagctggcaggttgtgcgcggacgctgcgtggaacattttccgcgagtactggagtttctgcgatctctgcgcgctgttgcccctggcttggttcgctaccggcaccacgaacgcctttgtatgggcctaaaggccaaggtggtggagctgatcctgcagggccggccttgggcccaagtcctgaaagccctgaatcaccactttccagaatctggacctatagtgcgggatcccaaggctacaaagcaggatctgaggaagattttggaggcacaggaaactttttaccagcaggtgaagcagctgtcagaggctcctgtggatttggcctcgaagctgcaggtgagactggtttgaaggctattatgtggctattttctctaacccatttttttttttttttgaggaatcttgctctgtcgcccaggctggagtgcagtggcacaatctcggctcactgcaacctctgcctcccgggttcaagcgattctcctgcctcagcctcccgagtagctgggattacaaatgcccagctaatttttgtattttagtagagatggggtttcaccatgttggccaggctggtctcgaactcctgacctcaagtgatccgcccacctcggcctcccaaatggccaggattacaggcgtgagccaccgtgcctggccactaacccacttttgacctaatctcccctgctgtaggaacttgaacaagagtatggggaaccctttctggctgccatggaaaagctgctttttgagtacttgtgtcagctggagaaagcactgcctacaccgcaggcacagcaggtttcgctggggcaaaacatgtaagggcagagtgtggggtggctgtttcaaggattgtggtcttcatacctctgtccctgcccacagcttcaggatgtgctgagttggatgcagcctggagtctctatcacctcttctcttgcctggagacaatatggtgtggacatggggtggctgcttccagagtgctctgttactgactcagtgaacctggctgagcccatggaacagaatcctcctcagcaacaaagactagcactccacaatcccctgccaaaagccaagcctggcacacatcttcctcagggaccatcttcaaggacgcacccagaacctctagctggccgacacttcaatctggcccctctaggccgacgaagagttcagtcccaatgggcctccactaggggaggccataaggagcgccccacagtcatgctgtttccctttaggaatctcggctcaccaacccaggtcatatctaagcctgagagcaaggaagaacatgcgatatacacagcagacctagccatgggcacaagagcagcctccactgggaagtctaagagtccatgccagaccctggggggaagggctctgaaggagaacccagttgacttgcctgccacagagcaaaaggagtgagtggaacagagttgcttcttactaggagcacattctttgcctgccttcccttcatcctatcctctttgcttgctctcacctcaggaattgcttggattgctacatggaccccctgagactatcattattacctcctagggccaggaagccaggtaggtagtctgagtcaggattggatcaacagcctcctctcttggggactctcaagagcctgtgttcatctagaagtagtagtttgattctggtttccctcctacagtgtgtcctccgtctctgtgcagctccgtcattaccataggggacttggttttagactctgatgaggaagaaaatggccagggggaaggaaaggtgagtgggaaggagcagaaagctgggaaaggggatgggtagaacaagactgagaaatccacatgcttcagaattcagagggttcagggaatggtttcggatagtaggctctccctgctcccttctctacaggaatctctggaaaactatcagaagacaaagtttgacaccttgatacccactctctgtgaatacctacccccttctggccacggtgccatacctgtttcttcctgtgactgtagagacagttctagacctttgtgatagaactaaaatgctctctgtactctagtctcctgcctcctcagctctgcaagtagtttagtaggaatgaagtggaagtccaggcttggattgcctaactacactgctaaaaatatttgtaatccttaataattaaactttggatttgtt

SEQ ID NO: 4364 - DNA, 1160 bp, Homo sapiens
ctctctgctcctcctgttcgacagtcagccgcatcttcttttgcgtcgccagccgagccacatcgctcagacaccatggggaaggtgaaggtcggagtcaacggatttggtcgtattgggcgcctggtcaccagggctgcttttaactctggtaaagtggatattgttgccatcaatgaccccttcattgacctcaactacatggtttacatgttccaatatgattccacccatggcaaattccatggcaccgtcaaggctgagaacgggaagcttgtcatcaatggaaatcccatcaccatcttccaggagcgagatccctccaaaatcaagtggggcgatgctggcgctgagtacgtcgtggagtccactggcgtcttcaccaccatggagaaggctggggctcatttgcaggggggagccaaaagggtcatcatctctgccccctctgctgatgcccccatgttcgtcatgggtgtgaaccatgagaagtatgacaacagcctcaagatcatcagcaatgcctcctgcaccaccaactgcttagcacccctggccaaggtcatccatgacaactttggtatcgtggaaggactcatgaccacagtccatgccatcactgccacccagaagactgtggatggcccctccgggaaactgtggcgtgatggccgcggggctctccagaacatcatccctgcctctactggcgctgccaaggctgtgggcaaggtcatccctgagctgaacgggaagctcactggcatggccttccgtgtccccactgccaacgtgtcagtggtggacctgacctgccgtctagaaaaacctgccaaatatgatgacatcaagaaggtggtgaagcaggcgtcggagggccccctcaagggcatcctgggctacactgagcaccaggtggtctcctctgacttcaacagcgacacccactcctccacctttgacgctggggctggcattgccctcaacgaccactttgtcaagctcatttcctggtatgacaacgaatttggccacactcagtcccccaccacactgaatctcccctcctcacagttgccatgtagaccccttgaagaggggaggggcctagggagccgcaccttgtcatgtaccatcaataaagtaccctgtgctcaacc

SEQ ID NO: 4365 - DNA, 628 bp, Homo sapiens
gagggggacacaggaggtccagctgtctggaagactcgcctgcgctgtgcactcaacaagagttctgaatttaaggaggttcctgagaggggccgcatggatgttgctgagccctacaaggtgtatcagttgctgccaccaggaatcgtctctggccagccagggactcagaaagtaccatcaaagcgacagcacagttctgtgtcctctgagaggaaggaggaagaggatgccatgcagaactgcacactcagtccctctgtgctccaggactccctcaataatgaggaggagggggccagtgggggagcagtccattcagacattgggagcagcagcagcagcagcagccctgagccacaggaagttacagacacaactgaggccccctttcaaggggatcagaggtccctggagtttctgcttcctccagagccagacttggtcaggtactttcagggcctgggccccccaccgaagttccaggtaacactgaatttctgggaagagagccatggctccagccatactccacagaatcttatcacagtgaaatggagcaggcctttgcccgatacttgctggagcagactccagagcagcaggcagccattctgtccctggtgta

SEQ ID NO: 4366 - DNA, 3151 bp, Homo sapiens
tttccggctacgggtccccaagcggagcgggaggccggaccggggagccgagcggcggcgtcggcggcgtcggcggcggcggcgacggcggcgggggcggtaatggcggagctggtgcaggggcagagcgctcctgtggggatgaaggccgagggcttcgtggatgccctgcaccgggtccggcagattgctgctaaaattgattcaattcctcacttgaataattccacacctctagtggacccctcagtatatggatacggagtacaaaaacggcccttggatgatggagtaggtaaccagttaggggccttggtacatcaaaggacggtaataacggaagaattcaaagtgcctgacaaaatggttggatttattatcggcaggggaggtgagcagatttcacggattcaagcagaatctggttgcaaaattcagattgcttcagagagttctgggattccagagaggccctgtgtacttaccggaaccccagaaagtattgaacaagccaaacggctcctgggacagattgtggaccgctgtcgaaatggacctggctttcataatgacatagacagcaacagcacaatccaggagattctcattcccgcatctaaagtgggtctggtcatcggcagaggaggggaaacaatcaagcagttgcaggagcggacaggggtgaagatggtcatgatccaggatggcccattgcccacgggagcagacaagcctcttcgtatcactggagatgcatttaaagtacagcaagcaagagaaatggtactagagattatccgagaaaaagaccaagctgactttcggggtgtacgcggcgatttcaactctcgaatgggaggaggcagtatagaggtatctgtgcctaggtttgctgtggggattgtaataggaagaaacggggaaatgatcaaaaagatccagaatgatgctggtgtgaggattcagtttaaaccagatgatgggattagtccagaaagagctgcccaggtcatgggccctccggatcggtgtcagcatgcagcgcatatcatcagcgagctgattcttacagcccaggaaagagacggctttggaggcctggcagcagccagaggaagaggtcgtggccgtggcgactggagcgtgggagcccctggtggcgtccaggagataacatacacggtgccagccgataagtgtggcctcgtcataggcaaagggggtgagaacatcaaaagcatcaaccagcagtcaggggcgcacgtggagcttcagaggaacccccctcccaacagcgaccccaacctgcggagattcaccatcaggggggttccccagcagatcgaggtggccaggcagctcatagatgagaaagttggcgggaccaatctcggagcacctggagccttcggacagagtccattcagccagccacctgccccacctcatcaaaatacctttcctccaaggagctccgggtgcttcccaaacatggctgccaaggtgaatgggaacccccacagcacccctgtgagtggtcctccggcctttctgacccagggctggggcagcacctaccaggcgtggcagcagcccacacagcaggtcccaagccagcagagccagccgcagagcagccagcccaactacagcaaggcctgggaagactattacaaaaaacagagtcacgccgccagcgctgctcctcaggccagctccccaccggactacacaatggcctgggcagaatattacagacagcaggtcgctttctacggacagacgttagggcaggcgcaggcccacagccaggagcagtaggacagcgtcctcgtggccaactctcccctcaaaatcattgtcaaagaaaacctatttgtaacagaggtttttacatttgcaaaccttttgatgaagaactgttgttttgttctgtgaaacactatatttagattaacggaatttttctaaaaatcaggaaaattagttactaaaaattgctgatcatttttgtttcattatttttgttatttcaaatgtataagctctgggattctttttggagcaatacctacaaagtcaggcaccagaatgtgcctcagagctgtgacatttcaacatgatggttttggtttggtttggttttgtgtcctttttatttgcagttttttctgttgcaacagaaagtggcttggaagtcttaggtggtatgtaacaaattctttttaaaaattttaaagcagtatttaagtattcttaaatgtgtaaattcatttaatgttttacttctaatttcttgtatcttggctgtctggttttattgcatttttaaaaaaactgaactattatgtattgtaatgaatgatgtgaattctgaactgagacagataattgtattgctgtccaacaggggttgggaggggcattttgtagggtttgtataatttctagagttcgaaaggggtaatataaaaatgtgctcgtgtgtttagcctacgtttttctcatgcctccattaccagttgcaattgtgtatctaagacctccaagcttgtttttaaaacaaaacaaaaaacctttctctattatctcagaaatataaatactgttatttttaatattaagaaattcaatataacttttaacacacactgtggaacattaaaccgtataaaaatgtagttataactatttttaattccaaggtgttgtttgcttttttcttttaaatattttcttaatattttgtcagattaactagatgaataaataaatctagtattaaccgcattatgaattaaataattttgatttaatgaaagggataatatgatttccagtgtttactgtagtgtatcttgtacagataacatgtatttttaaaggaaaaaaaacggaattgaagctattttttcttgcatttctaattgacctgagggacattccgtttgaaatgtactgaagttacagtttctggttttttctccttatttttcttataatgcttgaaatgtctaactattaaaaaagacaattggaaaatgttatgcatggggtttttaagaaaacaaagtgttctttttatttgactgacaattcattttacactctatataataaaatctccacaaggcatcttgtgggcaaagtc

SEQ ID NO: 4367 - DNA, 3079 bp, Homo sapiens
ccagcctccatcctctgtgggtgcctccagcggggtcaactacagctccttcggtggagtgtccatgccacccatgcctgtggcctctgtagcaccttctgcttctatgccaggcagccacctcccgcccctgtacctggatggccatgtgtttgcaagtcagccccggctggttcctcaaacgatacctcagcagcagagttaccaacaggccgccgctgcccagcagatcccgatctcccttcacacatctctgcaggcacaagctcagcttggactgaggggtgggcttcctgtgtcccagtcccaggagatcttcagctccttgcagcccttcagatctcaggtgtacatgcaccccagcctgtcaccgcccagcaccatgatcctctctgggggcacagccttgaagcctccatactcggcgttcccaggcatgcagcccttggagatggtgaagccgcagtctggctcaccctaccagcccatgagcgggaaccaagccctggtctacgagggccagctcagccaggctgctggcctgggtgcctcccagatgttggactcccagctcccacagcagctgaccatgccactgcctcggtacggctccgggcagcagccactgatcctgccccagtctattcagctgccacctgggcagagcctctccgttggggccccccgaaggattcctccgcccgggtcccagccgccagtcctgaacaccagcagagagccctctcagatggagatgaaaggcttccactttgccgacagtaaacagaatgtcccttcaggaggccccgtgccatcgccacagacctacaggcctagctctgctagccccagtgggaagccctctggatcagcagttaacatgggctctgtgcagggacactacgtgcaacaggcaaaacaacgagtggatgagaaacccagcctgggagccgtgaagctgcaggaggccccctcggctgcctcccagatgaagcgaaccggagcgatcaagcctcgggctgtcaaagtggaggagagtaaggcctgacagtgcctggctgccacctcgcctctccctactgaggacggtgccgccatgcggcctcgacacagccgacactcgggagcctcaccagatccaccgtccaaatgcgtggcccagactgagagacctccctcctctccactcccgaaagctccgttgtcaaccagcttgcacccgtggatatatggcattgacccgcttgctttgatacgaaacaaaaaagcagacgactccttcatcccatctgctcctaccgtgactgtggagtgacgcctcctgtgcagtgcagatttgccctccctgcctcctccctgtcctgccgcgcagccagggcgccttctcagtcactgcagtaccttaagaggtgactcttaagaatgcatcccctcctgattcctcagctggttcacccttgaggttatttgcaaaaagaaaaggaggttcttgagggcaccgattgcgagcattctggtgcctggctccccgcctgggaagcgatggggtgctcagagcagcaggcaggttgggggagggggggggtcatagttgggttccagctcctggcttgatgagcccagggcgcttacaggcagcccatgaagttgatgacagttttagcatgagaatcacacagggtccctgtcctgggctcctctaaagccagtggatgtgctgggcaccagagacaaatcatggagatggctgctggtggctcccaggttggcccagatggggtgagctgacataccacaggcccatcccaggccccgtgggctctgcttctggggctccataccctgccctgcaggggtgctgtgtttttcacacatttctttccctgaagccttctgtaacctgtcattttccttccttcctcttccggagcctgctgctttctctggacctgtctccacctcccacacagctcatcgtgaacaccacttggtgatggagggagtggacccgtgtgtggtccccaagtgaggccactgggagtttgtccttttcctcctttgcttcactcccagcagcagacccaggttgtcaggacaggagggcctgagctaagcagtaggcatcagtctcgtttgtcttcagacggcgggggcaggtccagggtgaggctgggtggagggctgaccaaggtccaaagggcctgcgcagcctccgggagggcagcttctccagccagaggcttgtgtgagccatcgtgtgctgggcttgtttttaagtaagaaacaaggaaatcactccagattctgtcattccaaggaaagggaaggggacagttcaggtttctcagctgttcttaggggtcactgagcgtctacctcctcctccagaggaggctggctcagaacacctagaggagggggccggggatgcaccccccaccagaggctgccttcagcgtctcacgggtgcaggacagcgctcaggcttgggctctaagctctgtgtctagtgtagaacatggggaaggagcatcttaggaactgctgaagtaacttcttactgctctcacaattctaaggaagcgggagaacggcctcctaccaacagcgcccaccccagagctgcctgggaaagggcagttttactgaaaggtgctttactgttcacctgcatctttcagcagctcccctcctgccctcacctggtcttttccctctttatcccaagcctttatgcttgagtcccttccccaggggctgcccacccgacagttccaggcattccctacctgagcttcttgtctgcttttccttctcccactgcaagcggctgcttgtggggcctgggatgagccctctctgtccccaccggccctccttgccaagccattcctgggtgagttcaggcctgcgggagccacacattcatctccacctggacacttgagccgcatggccagacccctcccacctgatgcggtggtgcgtgtgatttgtcaaaagaaagccttctggatgctgttaagatgtacccttcaggtgaacctggtatcagacccacagtacttgctgtttgaga

SEQ ID NO: 4368 - DNA, 2446 bp, Homo sapiens
ggcaagatggctcccctgcatgtctccggctgatcgctgccgctccgccaatacaatagagccagccactaccagcagcctggccctcttcctccttctccagagagaccaatccagccgaactcggggtttgccgtgaggagaaggaggaagtgaccatggacacaagtgaaaacagacctgaaaatgatgttccagaacctcccatgcctattgcagaccaagtcagcaatgatgaccgcccggagggcagtgttgaagatgaggagaagaaagagagctcgctgcccaaatcattcaagaggaagatctccgttgtctcagctaccaagggggtgccagctggaaacagtgacacagaggggggccagcctggtcggaaacgacgctggggagccagcacagccaccacacagaagaaaccttccatcagtatcaccactgaatcactaaagagcctcatccccgacatcaaacccctggcggggcaggaggctgttgtggatcttcatgctgatgactctcgcatctctgaggatgagacagagcgtaatggcgatgatgggacccatgacaaggggctgaaaatatgccggacagtcactcaggtagtacctgcagagggccaggagaatgggcagagggaagaagaggaagaagagaaggaacctgaagcagaacctcctgtacctccccaggtgtcagtagaggtggccttgcccccacctgcagagcatgaagtaaagaaagtgactttaggagataccttaactcgacgttccattagccagcagaagtccggagtttccattaccattgatgacccagtccgaactgcccaggtgccctccccaccccggggcaagattagcaacattgtccatatctccaatttggtccgtcctttcactttaggccagctaaaggagttgttggggcgcacaggaaccttggtggaagaggccttctggattgacaagatcaaatctcattgctttgtaacgtactcaacagtagaggaagctgttgccacccgcacagctctgcacggggtcaaatggccccagtccaatcccaaattcctttgtgctgactatgccgagcaagatgagctggattatcaccgaggcctcttggtggaccgtccctctgaaactaagacagaggagcagggaataccacggcccctgcaccccccacccccacccccggtccagccaccacagcacccccgggcagagcagcgggagcaggaacgggcagtgcgggaacagtgggcagaacgggaacgggaaatggagcggcgggagcggactcgatcagagcgtgaatgggatcgggacaaagttcgagaagggccccgttcccgatcaaggtcccgtgaccgccgccgcaaggaacgtgcgaagtctaaagaaaagaagagtgagaagaaagagaaagcccaggaggaaccacctgccaagctgctggatgaccttttccgaaagaccaaggcagctccctgcatctattggctcccactgactgacagccagatcgttcagaaagaggcagagcgggccgaacgggccaaggagcgggagaagcggcgaaaggagcaagaagaagaagagcaaaaggagcgggagaaggaagccgagcgggaacggaaccgacagctggagcgagagaaacgtcgggagcacagtcgggagagggacagggagagagagagagaaagggagcgggacaggggggaccgagatcgggatagggaaagggaccgagaacgaggcagggaaagggatcgcagggacaccaagcgccacagcagaagccggagtcggagcacacctgtgcgggaccggggtgggcgccgctagctgggaaaacactagagctgcaggtaccagccactcggccccagggggttatggccacagagggataggcacagtctccaccaccctggagccaagggtctttcacatcacctatccctacatacataccaaatggaaaagtggccatccttttccccccaaacacacccccttaacctatctcttgggacttagcccgaccctccctctcatttcccattaagtctgagaggcaagagctaggttaggcaaggaggtggttggccagagatggggaacagccaggtgccccagtcctctgatttttcctccatcctgcttaccacctccctgggtacttacagccttctcttgggaacagccggggccaggactgggtcacctatgagctgaatcagcatctcctcctgagtcccagggcccctgcagttcccagtctcttctgtcctgcagcccttgcctctttcccacaggttccactttatatccaccttttccttttgttcaatttttatttttattttttttattattaaatgatgtggtctatggaaaaaaaaataaaaatctgacttagtttt

SEQ ID NO: 4369 - DNA, 2349 bp, Homo sapiens
ctgggcggcctgaggagcgcggaccccggcgctcggctcccggcgccatgtgagggggctcgggggccgcggggggccgggcgctccccgccggaggtgtgaacccacatccctgcccccagggccacctgcaggacgccgacacctacccctcagcagacgccggagagaaatgagtagcaacaaagagcagcggtcagcagtgttcgtgatcctctttgccctcatcaccatcctcatcctctacagctccaacagtgccaatgaggtcttccattacggctccctgcggggccgtagccgccgacctgtcaacctcaagaagtggagcatcactgacggctatgtccccattctcggcaacaagacactgccctctcggtgccaccagtgtgtgattgtcagcagctccagccacctgctgggcaccaagctgggccctgagatcgagcgggctgagtgtacaatccgcatgaatgatgcacccaccactggctactcagctgatgtgggcaacaagaccacctaccgcgtcgtggcccattccagtgtgttccgcgtgctgaggaggccccaggagtttgtcaaccggacccctgaaaccgtgttcatcttctgggggcccccgagcaagatgcagaagccccagggcagcctcgtgcgtgtgatccagcgagcgggcctggtgttccccaacatggaagcatatgccgtctctcccggccgcatgcggcaatttgacgacctcttccggggtgagacgggcaaggacagggagaagtctcattcgtggttgagcacaggctggtttaccatggtgatcgcggtggagttgtgtgaccacgtgcatgtctatggcatggtcccccccaactactgcagccagcggccccgcctccagcgcatgccctaccactactacgagcccaaggggccggacgaatgtgtcacctacatccagaatgagcacagtcgcaagggcaaccaccaccgcttcatcaccgagaaaagggtcttctcatcgtgggcccagctgtatggcatcaccttctcccacccctcctggacctaggccacccagcctgtgggacctcaggagggtcagaggagaagcagcctccgcccagccgctaggccagggaccatcttctggccaatcaaggcttgctggagtgtctcccagccaatcagggccttgaggaggatgtatcctccagccaatcagggcctggggaatctgttggcgaatcagggatttgggagtctatgcggttaatcaggggtgtctttcttgtgcagtcagggtctgcgcacagtcaatcagggtagagggggtatttctgagtcaatctgaggctaaggacatgtcctttcccatgaggccttggttcagagccccaggaatggaccccccaatcactccccactctcctgggataatggggtcctgtcccaaggagctgggaacttggtgttgccccctcaatttccagcaccagaaagagagattgtgtgggggtagaagctgtctggaggcccggccagagaatttgtggggttgtggaggttgtgggggcggtggggaggtcccagaggtgggaggccggcatccaggtcttggctctgccctgagaccttggacaaacccttccccctctctgggcacccttctgcccacaccagtttccagtgcggagtctgagaccctttccacctcccctacaagtgccctcgggtctgtcctccccgtctggaccctcccagccactatcccttgctggaaggctcagctctttggggggtctggggtgacctccccacctcctggaaaactttagggtatttttgcgcaaactccttcagggttgggggactctgaaggaaacgggacaaaaccttaagctgttttcttagcccctcagccagctgccattagcttggctcttaaagggccaggcctccttttctgccctctagcagggaggttttccaactgttggaggcgcctttggggctgcccctttgtctggagtcactgggggcttccgagggtctccctcgaccctctgtcgtcctgggatggctgtcgggagctgtatcacctgggttctgtcccctggctctgtatcaggcactttattaaagctgggcctcagtggggtgtgtttgtctcctgctcttctggagcctggaaggaaagggcttcaggaggaggctgtgaggctggagggaccagatggaggaggccagcagctagccattgcacactggggtgatgggtgggggcggtgactgccccagacttggttttgtaatgatttgtacaggaataaacacacctacgctccg

SEQ ID NO: 4370 - DNA, 2409 bp, Homo sapiens
ggttctggaagacggcagagctgccgccattttgcgggaagaggaggctctgtacctgcagtgctgcttttcttgcctagactctaggaactatccgagctccactccccacaacatactcaaaggaacggagagaaccgggacccccctgcggggacccggaactgatctgacaggatggcatctgatgactttgacatagtgattgaggccatgctggaagctccctataaaaaagaagaggatgagcaacaaaggaaagaagttaaaaaggattatcctagcaataccaccagcagcaccagcaacagtggcaatgagaccagtggaagcagcaccatcggggagacaagcaatcgtagtcgagatcgggatcggtatagacggagaaatagtcggagccgaagtccaggtcggcagtgtcgtcaccgtagccgtagctgggatcgtcgacatggtagtgagtcgcgaagtcgggaccatcgtcgtgaggatcgtgtgcattacaggagtcctccacttgccactggttataggtatggacacagtaagagtcctcatttcagagagaagagcccagtcagggagccagttgataatctgagtcctgaggagcgtgatgcccgcacagttttctgtatgcagttagctgcccgaattcggcctcgagatctggaggactttttctctgctgtaggcaaggttcgcgatgtacgtatcatctcagatcggaactcacgtcgttctaagggcattgcctacgtggaattctgtgaaatccagtctgtgccactggccattgggctgactgggcagcggttgctgggagtgcctatcattgtacaggcttcacaggcagagaaaaaccgactggcagccatggccaacaacctgcaaaagggcaatggtggaccaatgcgcctctatgtgggttccctgcacttcaatatcactgaagacatgctccggggcatctttgagccctttggtaaaattgataatattgtcctgatgaaggactcagatacaggccgctctaaaggttatggtttcatcacgttctctgattctgagtgtgcccggcgggccctggaacagttgaatgggtttgagcttgctggtcgacctatgagggttggccatgtgactgagcgactggatggtggcacagacatcacttttcctgatggggaccaggagctggatctgggatcagcaggtggacgttttcagctcatggcaaaactggcagaaggcgctggaatccaactgccaagcactgctgctgctgctgctgccgccgccgcccaggctgctgccttgcaactgaatggagcagttcccttgggggccctgaatccagcagctctgactgctctgagtccagccctgaaccttgcctcccagtgtttccagctctccagcctctttaccccccagaccatgtaaatcagtggcacagtatactgcctccttgtgcctctggatcctgccacttcacatctactcttccatggccccatttctccattttgtggaccaagccatcctgagggcatggacattgtctctgaggaaattggggccacccttaagataccaagaaaagctcctgcccatggtcccactggaaatggactctgctgagcaaagccaccagttgaagagaacagaatccacacctgcattgaatacctgtttctccatgtgtatcgtctctgagattaccttcttgccctttccaacaccttagtgattcctcaatttctcccccattgggaaggccatagggcatactgaaggaactgacctctctccttttcctgtacctttaacctttagtctgtcaaggaaaacccttaggacctctgaatcaagaggactgagtttgtgggtgaaccttgaaggtgctctttctgctacaagggccctgggagatagcatggacgtgcattgagaagccagcctcagaccttagcttgaagcagcttgaggccagacctactgtagcctcagcatcttgctaggaggcatggaagtgatctatcctgccaggaggcctcagagtgatctgtcctgccaggaggtgtgagagtgatctgtcctgtgaggcatttaggggctttcaggaatttagtaaaaggtggagtatgcctttccagtatcttccatcttcctttgtatacttgtccttcctcccatttcctccctttggcccgaggtaggaggatggagggaggctgctactctaccacttcctgtgtgcctctactgtggcctcaaccctggcaattatagctactcccatcccttacctgggcatgtgtgagcccttctcactggattttatacccttgtgtctgtgtacataaatatatatacatatatatatacataaaaactttgtac

SEQ ID NO: 4371 - DNA, 925 bp, Homo sapiens
  misc_feature (349)..(381): n is a, c, g, or t
agacccagtcaggacacagcatggacatgagggtccccgctcagctcctggggctcctgctgctctggttcccaggttccagatgcgacatccagatgacccagtctccatcttctgtgtctgcatctgtaggagacagagtcaccatcacttgtcgggcgagtcagggtattagcagctggttagcctggtatcagcagaaaccagggaaagcccctaagctcctgatctatgctgcatccagtttgcaaagtggggtcccatcaaggttcagcggcagtggatctgggacagatttcactctcactatcagcagcctgcagcctgaagattttgcaacttactattnnnnnnnnnnnnnnnnnnnnnnnnnnnnnnnnngccaggggaccaagctggagatcaaacgaactgtggctgcaccatctgtcttcatcttcccgccatctgatgagcagttgaaatctggaactgcctctgttgtgtgcctgctgaataacttctatcccagagaggccaaagtacagtggaaggtggataacgccctccaatcgggtaactcccaggagagtgtcacagagcaggacagcaaggacagcacctacagcctcagcagcaccctgacgctgagcaaagcagactacgagaaacacaaagtctacgcctgcgaagtcacccatcagggcctgagctcgcccgtcacaaagagcttcaacaggggagagtgttagagggagaagtgcccccacctgctcctcagttccagcctgaccccctcccatcctttggcctctgaccctttttccacaggggacctacccctattgcggtcctccagctcatctttcacctcacccccctcctcctccttggctttaattatgctaatgttggaggagaatgaataaataaagtgaatctttgc

SEQ ID NO: 4372 - DNA, 1946 bp, Homo sapiens
aggccaccatggcggagctgcaggaggtgcagatcacagaggagaagccactgttgccaggacagacgcctgaggcggccaaggaggctgagttagctgcccgaatcctcctggaccagggacagactcactctgtggagacaccatacggctctgtcactttcactgtctatggcacccccaaacccaaacgcccagcgatccttacctaccacgatgtgggactcaactataaatcttgcttccagccactgtttcagttcgaggacatgcaggaaatcattcagaactttgtgcgggttcatgtggatgcccctggaatggaagagggagcccctgtgttccctttgggatatcagtacccatctctggaccagcttgcagacatgatcccttgcgtcctgcagtacctaaatttctctacaataattggagttggtgttggagctggagcctacatcctggcgagatatgctcttaaccacccggacactgttgaaggtcttgtcctcatcaacattgatcccaatgccaagggttggatggattgggcagcccacaagctaacaggcctcacctcttccattccggagatgatccttggacatcttttcagccaggaagagctctctggaaattctgagttgatacaaaagtacagaaatatcattacacatgcacccaacctggataacattgaattgtactggaacagctacaacaaccgccgagacctgaactttgagcgtggaggtgatatcaccctcaggtgtcctgtgatgctggtggtaggagaccaagcacctcatgaagatgcagtggtggaatgtaactcaaaactggaccccacccagacctcgttcctcaagatggctgactccggaggtcagccccagctgactcagccaggcaagctgaccgaggccttcaagtacttcctgcaaggcatgggctacatggcctcatcctgcatgactcgcctgtcccggtctcgtacagcctctctgaccagtgcagcatccgttgatggcaaccggtcccgctctcgcaccctgtcccagagcagcgagtctggaactctttcttcggggcccccggggcacaccatggaggtctcctgttgaatggcccttgttgccctagagtgggacccagccctcacctcccccagagctaacctgggaggtgctgaaggggcattgggccaccgtaagcaagggaaaaagggcagatcatgcggggagatgaccttgatctttgattgctaccctaaccttgacctttaacccgtgattccccccagctcctggaagagatgtcctaatatctcttagggacccagacccctaaattctcctcctcccccattttgatgttaaggtggagagggcatatgcatcctctgtcctgatctaggtgtctatagctgaggggtaagaggttgttgtagttgtcctggtgcctccatcagactctccctacttgtcccatatttgcaaggggaggggatttggggctggggctccattcaccaaagctgaggtggcttctcattaaccctttaggactctgaagggtatggacctacgtgaatgtgtgtcagggggagacttgctggtgggttagtggtcctcaggatgtgatagaaacatccagtgtaaaaaggaagttggaatgggagttggcgggcagtgaacgagtgtggggaaggattggtgctggggcaacaggaaggggcctggggccgtttggctgcactaactttggtagctcagtgtgcatctagagtgggactggggagggagctaagcttgggctgggctgcttggggcttggcatagggtggaaagggctaccctggggctctgaccacactgtagtatgtgtggagggtgccctcccgtctcccacaacttctgctataacaataaactgtagaggaatct

SEQ ID NO: 4373 - DNA, 1695 bp, Homo sapiens
ccgtgctctgcctcctgtgttccagggactttgaacatgtcggggatcgccctcagcagactcgcccaggagaggaaagcatggaggaaagaccacccatttggtttcgtggctgtcccaacaaaaaatcccgatggcacgatgaacctcatgaactgggagtgcgccattccaggaaagaaagggactccgtgggaaggaggcttgtttaaactacggatgcttttcaaagatgattatccatcttcgccaccaaaatgtaaattcgaaccaccattatttcacccgaatgtgtacccttcggggacagtgtgcctgtccatcttagaggaggacaaggactggaggccagccatcacaatcaaacagatcctattaggaatacaggaacttctaaatgaaccaaatatccaagacccagctcaagcagaggcctacacgatttactggttagtagcagccctggccccgctggtggcagctcctccccgtcccagccaaggccgcctggcaggacgggagtggaggacacaggctcaccctacggacagccagggtccacgcctctgtggggaaggtcggggggcataaaccctgtgggcagcaggcaccgttgcacaccgtctgcggtgggcatggatggcgccggagccgtgtcccggggagggagcaggccaggtgacgggctgtcttgggccactgccccagtgagttgtggccagctaggaggggaaggaccctgggcgtgggtgccagaggaggccatgctgagaggcctctccaccggctcagcctcccatggaccccagcctcccgcgccgcccttgctgcttgtccccatcccctctacaacttggttccttctgtgggggggcccagcccagcagggctcagtgacgtgatgctgtcacacggaccctgggcttccaccctgtccctgtgaggtgctgctgtggctagaagggtccccgtgggcctggggtcctgtctgcaccgaggagggcctggtgtgagttaggatgcagacgacagccaaacagtgctggggaaagcagggaggaccctgccctgagcagaggccatgcgcccgcctgtcctgttccctctgcagctgttctgggcaggtccataagaaggtgggttggggcctccgaccccccactgctccgcctgcagcgttgagaaacccagccccatctcaccacgggtccccacacctctgagggggtctcagggcccccaatggccagggacccagaaggctcacctgcagccaccccacacatccctgccactgtgggcatcagaggccctctccctccagggtgcatctcctggtcaggaggggggaggctgaggggtcccggttgccttaggcccggcctgcacaggtcgtgaggaaaagcacctggtttcggccgggcgcagtggctcacgcttgtaatcccagcactttgggaggccgaggtgggtgaatcatgcggtcaggagttcgagaccagcctggccaacatggcgaaaccctcgtccctactaaaaatacaaaaaattagttgggcgtagtggtgggtgcctctaatcccagctacctgggaggctgagacaggagaatcacttgaacccgggaggcggaagttgcagtgagccgagatcctgccactgctctccagcctggcgacggaggaatgctgtctc

SEQ ID NO: 4374 - DNA, 1092 bp, Homo sapiens
gacaaagggaagcgccgccgccgccgccccgctcggtcctccacctgtccgctacgctcgccggggctgcggccgcccgagggactttgaacatgtcggggatcgccctcagcagactcgcccaggagaggaaagcatggaggaaagaccacccatttggtttcgtggctgtcccaacaaaaaatcccgatggcacgatgaacctcatgaactgggagtgcgccattccaggaaagaaagggactccgtgggaaggaggcttgtttaaactacggatgcttttcaaagatgattatccatcttcgccaccaaaatgtaaattcgaaccaccattatttcacccgaatgtgtacccttcggggacagtgtgcctgtccatcttagaggaggacaaggactggaggccagccatcacaatcaaacagatcctattaggaatacaggaacttctaaatgaaccaaatatccaagacccagctcaagcagaggcctacacgatttactgccaaaacagagtggagtacgagaaaagggtccgagcacaagccaagaagtttgcgccctcataagcagcgaccttgtggcatcgtcaaaaggaagggattggtttggcaagaacttgtttacaacatttttgcaaatctaaagttgctccatacaatgactagtcacctgggggggttgggcgggcgccatcttccattgccgccgcgggtgtgcggtctcgattcgctgaattgcccgtttccatacagggtctcttccttcggtcttttgtatttttgattgttatgtaaaactcgcttttattttaatattgatgtcagtatttcaactgctgtaaaattataaacttttatacttgggtaagtcccccaggggcgagttcctcgctctgggatgcaggcatgcttctcaccgtgcagagctgcacttggcctcagctggctgtatggaaatgcaccctccctcctgccgctcctctctagaaccttctagaacctgggctgtgctgcttttgagcctcagaccccaggtcagcatctcggttctgcgccacttcctttgtgtttatatggcgttttgtctgtg

SEQ ID NO: 4375 - DNA, 3619 bp, Homo sapiens
aggtccctacagtgttcaaggtcacagggtcaaaatatatcagccagagggggaagaagggtggctctatggtgttgtgagccatcaggactccatcactcgtaatgtctgagaaggaggccatgatgatggtggagccacaccagaaagtggcatggaagcgagctgtgcgtggtgtacgggagatgtgtgatgtgtgtgaaacaactctcttcaacatccactgggtttgtcgcaaatgtggatttggggtctgccttgactgttaccggctcaggaaaagccggccacgcagtgagacagaagagatgggtgatgaagaagttttctcctggttgaagtgtgcaaagggacagtcccacgaaccagagaatctcatgcccacacaaattattcctggcacagctctttacaatattggagacatggtacatgctgcccggggcaagtggggaattaaagcaaactgcccttgtatcagtcgacagaacaaatctgtattgagacctgccgtcaccaatgggatgtcacagcttcctagcataaaccctagtgcctcttctggaaacgaaactaccttctctggcggaggaggaccggcaccagtaacaactccagagccggaccatgttcccaaagccgacagcactgacatcagatctgaagagcctctgaaaacagacagttcggcatcaaatagcaatagtgaactgaaagccatcaggcctccttgccctgacacggccccaccctcctccgccctgcactggttggcagatttagcaactcagaaggctaaagaagaaacaaaagaagcagggtccctgaggtcggtgctcaataaagagtctcattcaccctttgggctggactcgttcaactccactgcaaaggtctctccgctgactccaaagctttttaacagtctgttgctgggtcccactgcctccaacaacaaaaccgaagggtctagccttcgagacctccttcactccgggccgggaaaacttcctcaaacccccttggacacaggcataccctttcccccggtcttctctacatcctcagcaggagtgaagagcaaggccagcctacccaactttcttgaccacatcattgcctcagtggtagaaaataagaaaacctcagatgcttcaaagcgggcctgcaacttgactgatacccagaaggaagtgaaggagatggtgatggggttaaatgtgctagatccccatacttctcactcctggctttgtgatgggaggcttctgtgtctccatgaccccagcaacaaaaacaattggaagatcttccgggagtgttggaagcaaggtcagccagtgctggtttcgggggtacataaaaagctcaagtctgagctctggaagccagaagcctttagccaggaatttggagaccaggatgtagacttggtgaactgcaggaactgtgctataatttccgatgtgaaagttcgggatttctgggatggtttcgagatcatatgcaaacgactacggtcagaagatgggcagccaatggtgctcaaactcaaggactggcctcctggggaagattttcgagacatgatgccaaccaggtttgaagatctgatggagaaccttcctctgccagaatataccaaacgagatggcaggctcaatctggcctctaggctacctagctactttgtaaggcctgatctgggccccaagatgtacaacgcctatgggttgataacagcagaagatagaagagttggtacaacaaatcttcacttagatgtgtctgatgctgttaatgtgatggtgtatgttgggattcccatcggggagggtgctcatgatgaagaggtactcaagacaattgacgagggagatgccgatgaggtgacgaagcagaggattcatgatggaaaagagaagccaggtgctttatggcacatctatgcagccaaggatgcagagaagatccgggagctgctccgaaaggttggagaagaacaaggccaagagaacccccctgatcatgacccaattcatgaccaaagttggtacctggaccagaccctccgtaagcgactctatgaggagtatggcgtgcaaggctgggctattgtgcagttcctaggtgatgctgttttcatacctgctggagccccacaccaggttcacaatctatacagttgcataaaagtagcagaagactttgtatctccagaacatgtaaagcactgtttccgcctgactcaggaattcaggcatctctctaacactcatacaaatcatgaggataaactgcaggtgaagaacatcatttaccatgcagtgaaagatgcggttggcaccctcaaggctcatgaatccaaactggcaaggtcctaggcatggagaaactccaagctcctctgtgaagcaggtctttcactcacaacacttaacagggaacggcagggctctttgctggagcagaggcccttcacccagagccagtgtggtcagtattccaaactctccagccactctcttctacgctgcctcaacactgaaggttgacacaggaaagtcgtactgttcacacacacagtttgagactccaagccaagagtgccacatccctatcctgtggccttttggaaatccaaattgcctgaacatggcggggctttcctgcacattctcctgatttgagattcacgggcacacctttcttttcttttcctcttgtgcctagttaagtgggaatgtgtttggagataggggaaatcacataactggtacaagtatggggtaattgcttaaacatgcctggtggaagtctgatagcgtctctgcacgtgacctctgacaaagcccatcccaggagacggggtgaagctattccccacactctcctgtgaacactggagtcttgcaagacccagggagaacccactgcttttcccaggaggctccaggattaggaaatgtgtgtatttagtgaaaaataggtttgtagtgaaatagttactatttcatgaaagtagatatttttagaatttttgaaataccacagttgttttcctggattataaggaaaggcacattacatttagtcttcctttcgatataaaactctttgaagaaatatgatttttagaaatcagctacccattatagcacaaaatcagccaaagcagaatttttaaaaattggcttttttaggattctttttctccccctcccatcttagtcttaccttgagggaacagtcatatgagaaggaactttgtcacatctaagctgtggtgtgttccccatgtgtgtgtacaacactggtgactccaggaaccattttcacctattaccagtgttccctggggactcctcttaatgtttccaaatgggaaggacagttgatttccaacatgaggttttttgttttttatccagaaatattttcagcaaaactttccaactgagtggagtctgattaaggatttatttgaaaatggtgggattcattggcccataggtacattggaaaatgtatatctctccagctgtactgtagtgccctgcaggctgtttatatgttcacagttacttttttttttttttaaataaaagtcatttaatgt

SEQ ID NO: 4376 - DNA, 6061 bp, Homo sapiens
gtgaccaaaagctacaagagatattcagccgaggtccctacagtgttcaaggtcacagggtcaaaatatatcagccagagggggaagaagggtggctctatggtgttgtgagccatcaggactccatcactcgtcttatggaggtgtctgtaactgaggtggtgaaatcaagtcggtagatcccagactaatccatgtgatgctgatggataattcaacgcctcaaagcgaggggggtacgttaaaagcagtaaaatcttccaaaggaaagaagaagagagaaagcatagaggggaaagatggccggaggaggaaaagtgcttcggactctgggtgtgaccctgcatcaaagaaattaaaaggagacaggggtgaagtagacagtaatgggagcgatggaggtgaggcaagccgagggccctggaaaggagggaatgccagtggagagccagggctggatcagagagccaagcagccaccgtctacatttgtcccccagataaaccgcaacattcgctttgccacttacaccaaagaaaacggcaggactctggtggtgcaggatgagcctgtaggtggggacacacctgcatctttcactccatattctacagccacaggtcagacacctttggccccagaggtgggtggagccgaaaacaaagaggcaggaaaaacactggaacaagttggccagggcatagtggcttccgcagctgtggtcactaccgccagctccaccccaaacacagtgaggatctcagacactggccttgcagcagggactgtgccagaaaaacagaaaggcagccggtcgcaggcctcgggagagaattcaagaaattctattctggcctcttctggatttggagcacctctccctagttcatcgcaacctttgacttttggaagtggaaggagccagtccaatggtgttctagccacagagaacaaacctttgggcttctcttttggctgtagctctgcacaagaggcacagaaagacactgatctctccaaaaacttgttttttcaatgcatgtcccaaactttacctaccagtaactacttcactactgtttcagagagtttggctgatgattcttctagtcgggactcattcaaacaaagccttgagagcctgagctcaggcctgtgtaaaggcagatccgttcttggaacagacactaagccaggctctaaggctggcagctctgtggaccggaaagtgcctgcagagtccatgcccaccctcactccagccttcccacggagcctcctaaatgcccgtaccccagagaatcatgaaaatctatttttacagccccccaaattgtcccgagaagagccttctaatcctttcctggcatttgtggagaaagttgaacacagccctttcagtagttttgcatctcaggcatcaggtagctcctcttctgctaccactgtcacctccaaggtggcacccagctggcccgagtctcactcctctgcagattcggcatctttagcaaagaagaaacccctcttcattacaactgactcctccaagctagtatctggtgttctgggctcagctcttaccagtgggggcccaagcctctctgccatggggaatggccgctccagctcgcccaccagcagcctcactcagcccattgagatgccaactctctcctctagccccacagaggagaggccaactgtggggcctgggcagcaggacaatcccctcctcaaaacctttagtaacgtctttggcaggcactcaggcggctttctgtcctccccggcagatttttcacaggagaacaaagctccttttgaagctgtgaaaaggttctcactggatgaacgaagcttggcttgcagacaagactcggactccagcaccaacagtgacctgtcagatttgagtgactctgaggagcagctgcaggctaagacaggcctgaagggaattccagagcacctgatggggaagctgggccccaatggggagcgcagtgctgagctgttgctgggcaaaagcaaagggaagcaggcccccaagggccggcctcggactgcccccctgaaagttggccagtcagtgctgaaagatgtaagcaaagtgaagaagctgaagcaatctggagagcccttcctgcaggatgggtcatgcatcaatgtggcacctcatctgcacaagtgtcgtgaatgccgcctggagcggtaccggaagtttaaggaacaggagcaagatgattctactgtagcctgccgtttctttcacttccggaggttgatcttcactcgaaaaggggtactccgtgtggaggggtttttaagcccccagcaaagtgaccctgatgccatgaacctgtggattccctcttcctccctagcagaagggatagatctagagacctcaaaatacatcctggccaatgttggggaccagttctgccagctcgtaatgtctgagaaggaggccatgatgatggtggagccacaccagaaagtggcatggaagcgagctgtgcgtggtgtacgggagatgtgtgatgtgtgtgaaacaactctcttcaacatccactgggtttgtcgcaaatgtggatttggggtctgccttgactgttaccggctcaggaaaagccggccacgcagtgagacagaagagatgggtgatgaagaagttttctcctggttgaagtgtgcaaagggacagtcccacgaaccagagaatctcatgcccacacaaattattcctggcacagctctttacaatattggagacatggtacatgctgcccggggcaagtggggaattaaagcaaactgcccttgtatcagtcgacagaacaaatctgtattgagacctgccgtcaccaatgggatgtcacagcttcctagcataaaccctagtgcctcttctggaaacgaaactaccttctctggcggaggaggaccggcaccagtaacaactccagagccggaccatgttcccaaagccgacagcactgacatcagatctgaagagcctctgaaaacagacagttcggcatcaaatagcaatagtgaactgaaagccatcaggcctccttgccctgacacggccccaccctcctccgccctgcactggttggcagatttagcaactcagaaggctaaagaagaaacaaaagaagcagggtccctgaggtcggtgctcaataaagagtctcattcaccctttgggctggactcgttcaactccactgcaaaggtctctccgctgactccaaagctttttaacagtctgttgctgggtcccactgcctccaacaacaaaaccgaagggtctagccttcgagacctccttcactccgggccgggaaaacttcctcaaacccccttggacacaggcataccctttcccccggtcttctctacatcctcagcaggagtgaagagcaaggccagcctacccaactttcttgaccacatcattgcctcagtggtagaaaataagaaaacctcagatgcttcaaagcgggcctgcaacttgactgatacccagaaggaagtgaaggagatggtgatggggttaaatgtgctagatccccatacttctcactcctggctttgtgatgggaggcttctgtgtctccatgaccccagcaacaaaaacaattggaagatcttccgggagtgttggaagcaaggtcagccagtgctggtttcgggggtacataaaaagctcaagtctgagctctggaagccagaagcctttagccaggaatttggagaccaggatgtagacttggtgaactgcaggaactgtgctataatttccgatgtgaaagttcgggatttctgggatggtttcgagatcatatgcaaacgactacggtcagaagatgggcagccaatggtgctcaaactcaaggactggcctcctggggaagattttcgagacatgatgccaaccaggtttgaagatctgatggagaaccttcctctgccagaatataccaaacgagatggcaggctcaatctggcctctaggctacctagctactttgtaaggcctgatctgggccccaagatgtacaacgcctatgggttgataacagcagaagatagaagagttggtacaacaaatcttcacttagatgtgtctgatgctgttaatgtgatggtgtatgttgggattcccatcggggagggtgctcatgatgaagaggtactcaagacaattgacgagggagatgccgatgaggtgacgaagcagaggattcatgatggaaaagagaagccaggtgctttatggcacatctatgcagccaaggatgcagagaagatccgggagctgctccgaaaggttggagaagaacaaggccaagagaacccccctgatcatgacccaattcatgaccaaagttggtacctggaccagaccctccgtaagcgactctatgaggagtatggcgtgcaaggctgggctattgtgcagttcctaggtgatgctgttttcatacctgctggagccccacaccaggttcacaatctatacagttgcataaaagtagcagaagactttgtatctccagaacatgtaaagcactgtttccgcctgactcaggaattcaggcatctctctaacactcatacaaatcatgaggataaactgcaggtgaagaacatcatttaccatgcagtgaaagatgcggttggcaccctcaaggctcatgaatccaaactggcaaggtcctaggcatggagaaactccaagctcctctgtgaagcaggtctttcactcacaacacttaacagggaacggcagggctctttgctggagcagaggcccttcacccagagccagtgtggtcagtattccaaactctccagccactctcttctacgctgcctcaacactgaaggttgacacaggaaagtcgtactgttcacacacacagtttgagactccaagccaagagtgccacatccctatcctgtggccttttggaaatccaaattgcctgaacatggcggggctttcctgcacattctcctgatttgagattcacgggcacacctttcttttcttttcctcttgtgcctagttaagtgggaatgtgtttggagataggggaaatcacataactggtacaagtatggggtaattgcttaaacatgcctggtggaagtctgatagcgtctctgcacgtgacctctgacaaagcccatcccaggagacggggtgaagctattccccacactctcctgtgaacactggagtcttgcaagacccagggagaacccactgcttttcccaggaggctccaggattaggaaatgtgtgtatttagtgaaaaataggtttgtagtgaaatagttactatttcatgaaagtagatatttttagaatttttgaaataccacagttgttttcctggattataaggaaaggcacattacatttagtcttcctttcgatataaaactctttgaagaaatatgatttttagaaatcagctacccattatagcacaaaatcagccaaagcagaatttttaaaaattggcttttttaggattctttttctccccctcccatcttagtcttaccttgagggaacagtcatatgagaaggaactttgtcacatctaagctgtggtgtgttccccatgtgtgtgtacaacactggtgactccaggaaccattttcacctattaccagtgttccctggggactcctcttaatgtttccaaatgggaaggacagttgatttccaacatgaggttttttgttttttatccagaaatattttcagcaaaactttccaactgagtggagtctgattaaggatttatttgaaaatggtgggattcattggcccataggtacattggaaaatgtatatctctccagctgtactgtagtgccctgcaggctgtttatatgttcacagttacttttttttttttttaaataaaagtcatttaatgtagaatacttttaatttcactttctgtattttaattttgttgaagggctgattgggatttccatgttcttattaaaaatctaacaaatc

SEQ ID NO: 4377 - DNA, 860 bp, Homo sapiens
atggaagattcgatggacatggacatgagccccctgaggccccagaactatcttttcggttgtgaactaaaggccgacaaagattatcactttaaggtggataatgatgaaaatgagcaccagttatctttaagaacggtcagtttaggggctggtgcaaaggatgagttgcacattgttgaagcagaggcaatgaattacgaaggcagtccaattaaagtaacactggcaactttgaaaatgtctgtacagccaacggtttcccttgggggctttgaaataacaccaccagtggtcttaaggttgaagtgtggttcagggccagtgcatattagtggacagcacttagtagctgtggaggaagatgcagagtcagaagatgaagaggaggaggatgtgaaactcttaagtatatctggaaagcggtctgcccctggaggtggtagcaaggttccacagaaaaaagtaaaacttgctgctgatgaagatgatgacgatgatgatgaagaggatgatgatgaagatgatgatgatgatgattttgatgatgaggaagctgaagaaaaagcgccagtgaagaaatctatacgagatactccagccaaaaatgcacaaaagtcaaatcagaatggaaaagactcaaaaccatcatcaacaccaagatcaaaaggacaagaatccttcaagaaacaggaaaaaactcctaaaacaccaaaaggacctagttctgtagaagacattaaagcaaaaatgcaagcaagtatagaaaaagcgcattgaacagtcctgggcactacatgtaaattaagcccaaagatggggagaaaggaaaaggagagacaaatatagtccatactgag

SEQ ID NO: 4378 - DNA, 2183 bp, Homo sapiens
ggctcggggtccacccgcgggctgcggtgcgagcaggtggccccgttcccctcctcccgcgcccgcccccgcctctgtgattgggtggaagatggtgctggccggatgtaaatcctaatgacagtctccaaattcgcttccatctgtaccatgagtgccaatgcttcggcattagagaaggagattggtccagaacagtttccagtgaatgagcactattttggattagtcagttttgggaatacctgctactgcaattcagttcttcaagcactttatttttgtcgtccatttcgggaaacagttcttgcatagaagagtcaacctaggaaaaaggagagccttcttacatgcttagcagatctcttccatagcatagccactcagaagaaaaagttggagtaatacctcccaagaagttcatcacaagattacagaaagaagatgagctttttgacaactacatgcaacaagatcccccatgaattcttaaattacctactaaatacaattgctgatattttacaagaagagagaaagcaagaaaaacaaaatggccgcttacctaatggtaatattaataatgaaaataataacagcaccccagacccaatgcgggttcatgagatttttcagggaacattaactaatgaaaccagatgtcttacttgtgaaactatgagcagcaaagatgaagattttttagacctgtctgttgacgtggaacaaaatacatcaattactcactgcttaagggctttcagcaacacagaaaccctatgcagtgagtacaagtattactgtgaagagtgtcgcagcaaacaggaagcacacaaacggaggaaagtttaaaaactgcccatgattctagctccacacctgaagagatttaaatataaggatcaacttcatcgatttacaaaactctcttaccaggtagtttttcctttaaaacttagtctatttaacacttcaggtgatgccaccaatccagacagaatgtacagccttgttgctgttgtggttcactgtggaagtggtcccagtcgaggccattgtattgtaatagttaagagtcatgatttttggttgttgtttgatgacgacattgtagaaaaaatagatgcacaagctattgaagaagtctacgggctgacatcagatatctcaaagaactctgagtctggttacatccttttctatcagtctcgggattgagggggaaccgtgatgaagagatactttctgccgcatttcttctctggttattttggaaaggatcaagcactgatttttcaagaaaagagaaaatgcaggaagctctgggggcagtagcacactttgcacacgataaagcaaagacgatggattgacaagcccttccgatcacagtagttgatttatttgctcaggtatcatgctgtctgtacagttccattcaacaaggaggtgaaatcagagataccagttcctcttgtaaaacagccttccagtattaacatgcattttctctttattaattgcaccaataatgccatgaattccttgggggtgcagtagaaagaatcggaatctgtgctgtactgataaggagatgatgttgaacacactgcataaatttgcctggttcagtatgtatagaagcatattcagtggtcttttcaagagtaaaccagaaacacttttgggcccaacacttgcagttgccttcctgatgtaaaaactaacatgctagataatccagtgtcaggaagacaaagatgttttggttctctgaagaagcttataataatacatgtagggagcaattggtcaaaagtggctttttgtttccccaaggggaaagactggctttgtaatcataattttttccttatttattttacttaaaactggtagagtctaagtattgtatgaagtgcccatgattctgtcagtaaatttgagcatatttttattagttaatgtcagtttaagtagtccttttgtttgtttctatttttaaggtgaattttaaattatatctgaaatcagtaagataccttgagaaaaactgcaatgagaggaggtaaatatcctttttcaggaggaactgatatctctggccaaatatttgtccttttattatggtttctaaatcagttattttcttcagctttaatttcataaaattaaaaaactat

SEQ ID NO: 4379 - DNA, 2089 bp, Homo sapiens
taaccatgttgattcatgtaatttcagtccatttagtttcgctgctgtggtaacattcctttgtatgaaaaactattctttgttgatgatacgtatcttttctctctaattcctttggattaaatgttagtgttaatggttttggtttagcagactaatggattatgttaattctcttaatttccatgtgtcttaaggcatgttgtgttttttttttgcacagtatagctctcatatggcccagtgagtggcaaatgatacaaaagctctttgttgtggatcatgtaattaaaatcacgagaattgaagtgggagatgtaaacccttcagaaacacagtatatttctgagcccagtgatgaaggattcggctccggaactgaatgtgagtagttctgaaacagaggaggacaaggaagaagctaaaccagatggagaaaaagatccagattttaatcaaagcaatggtggaacaaagcggcaaaagatatcccatcaaaattatatagcctatcaaaagcaagttattcgccgaagtatgcgacatagaaaagttcgtggtgagaaagcacttctcgtttctgctaatcagacgttaaaagaattgaaaattcagatcatgcatgcattttcagttgctccttttgaccagaatttgtcaattgatggaaagattttaagtgatgactgtgccaccctaggcacccttggcgtcattcctgaatctgtcattttattgaaggctgatgaaccaattgcagattatgctgcaatggatgatgtcatgcaaggtaaagatgaatttgttttaggaatctgctgattaggttttagacggaggtgggattttagatattgaagctttagtgtacagtgcttttactttgaaccttgaaaaaagcttccacatattgttacagtagaatacattatcttaaaagatcatagaaaggagggaaagatatctacaaaaacttggaaagctaacctgaggaaactgaaataaatgtgagctctgcctgtggaggaggtcaacaagaagcaaaactaagtcagattgcagtgccccagacaggcacacacaaattagaggcctaggtacctctgaaggtgggaatgaattgtgagcctaaaaagaagataacatgatacttgtttggaaaactgtataagaagcagttagacaactctctacctttcacatccttgtcacttccccatctccacctggacctcagatgggcacccagaattatgtgtttccacacttggaaaaattaaactagaaaggtgggaacgaagcctataccaaataggagaccatctcttagccctttgctcaaattcgggcagcccattacttaccctcccccaggtgggaagggatttctctccagggaaactagtcaagaaaataaccagtggatgtaaaaagtctggttctgtatgatcaagtgagatttctcccagggatgcaaggatgttcaacatatgcaaaccaatacatcacatcagcagaatgaaggacaaaaatcatatgatcatcttaatagacaaagaaaaagcatttgataaaattcaacatcccttcgtggtaaaaactctcaaaaaaccaagtacagaaggaacatacctcaatataataaaggccatatgtgagacccacagctgacatcatacctaatggcgaaaagcttaaagcctttcctctaagaactggaatagacaaggacggccattttcaccactcttattcaacatagtattggaagtcctagcaagagcaattaggcaagataaataagtaaaaagcatgcaaaattggaaaagaggaagtcaaatggtccctctttgcagatgacatgctttttttttagagtctttgttgcccagactggagtgcagtggcaccatctcagctcactgcagccaccactcctgggttcaagcaattcttgtgcctcagactcctgagtagctgggactacaggcatgtgccatgacacccagctaatttttgtatttttactagagatgaggatttcccatattggccaggctggtcccgaactcctggccccctgtgatct

SEQ ID NO: 4380 - DNA, 2367 bp, Homo sapiens
caatggagcatgacttgtagtcaacaaacatgggtgtcctgatcaaagctctgctgtgctattcggcaagactctatgtggatgcctcttgtagaatgtggttaataataccagccgatctcatagggcactgtgcagactcagcattatggtgcacagctccttgaactcataggagtggcacttaactggagctttgtgtcgtactcatcaaacatcttcccccagacaatgattcttctgattctgctaactctggacagagtttgcattgtcttttgagaaaaatgaatgtatcacttagtcaaaaaactgtaaaaatacataggctctttccgatgcttgctttctcagagccctatgagtttgtctctctggaatggctgcaaaagtggttggatgaatcaacacctaccaaacctattgataatcacgcttgcctgtgttcccatgacaagcttcacccggataaaatatcaattatgaagaggatatctgaatatgcagctgacattttctatagtagatatggaggaggtccaagactaactgtgaaagccctgtgtaaggaatgtgtagtagaacgttgtcgcatattgcgtctgaagaaccaactaaatgaagattataaaactgttaataatctgctgaaagcagcagtaaagggcgatggattttgggtggggaagtcctccttgcggagttggcgccagctagctcttgaacagctggatgagcaagatggtgatgcagaacaaagcaacggaaagatgaacggtagcaccttaaataaagatgaatcaaaggaagaaagaaaagaagaggaggaattaaattttaatgaagatattctgtgtccacatggtgagttatgcatatctgaaaatgaaagaaggcttgtttctaaagaggcttggagcaaactgcagcagtactttccaaaggctcctgagtttccaagttacaaagagtgctgttcacagtgcaagattttagaaagagaaggggaagaaaatgaagccttacataagatgattgcaaacgagcaaaagacttctctcccaaatttgttccaggataaaaacagaccgtgtctcagtaactggccagaggatacggatgtcctctacatcgtgtctcagttctttgtagaagagtggcggaaatttgttagaaagcctacaagatgcagccctgtgtcatcagttgggaacagtgctcttttgtgtccccacgggggcctcatgtttacatttgcttccatgaccaaagaagattctaaacttatagctctcatatggcccagtgagtggcaaatgatacaaaagctctttgttgtggatcatgtaattaaaatcacgagaattgaagtgggagatgtaaacccttcagaaacacagtatatttctgagcccaaactctgtccagaatgcagagaaggcttattgtgtcagcagcagagggacctgcgtgaatacactcaagccaccatctatgtccataaagttgtggataataaaaaggtgatgaaggattcggctccggaactgaatgtgagtagttctgaaacagaggaggacaaggaagaagctaaaccagatggagaaaaagatccagattttaatcaaatcatgcatgcattttcagttgctccttttgaccagaatttgtcaattgatggaaagattttaagtgatgactgtgccaccctaggcacccttggcgtcattcctgaatctgtcattttattgaaggctgatgaaccaattgcagattatgctgcaatggatgatgtcatgcaagtttgtatgccagaagaagggtttaaaggtactggtcttcttggacattaatctttgaatacttgctgactgctaagaaatgaccagaggggaagaggagtttgacatgttagggcattaaagcaaaggtggatttaagaattaaaccattacatgccccttccaaaaggcagaaatccattcaaacgtgactgtcccaaatgccttatgtcaaataaagcagattgcactgatggacatcagacttgaaggaaatgtttccaattttatatttaaggggggtggtgggtgggagggggcaagtaaagacggaacaagtttagtagcagtaatagtaaatcatgtttacatatgagatttatagtcgtgggaggggaataaagttctgttatatttccttgctcgagtttcataccagatgcgttggtccataaaggattgtatcaagtagatgggacaacattctgctctgaacgaaaagtaattttagagacataacctgcttaccaatgcctgtctttgattcatattctactttcaataaagcatgaaagtgaagaacttg

SEQ ID NO: 4381 - DNA, 1863 bp, Homo sapiens
agtttgcagagcagtggcgtgcggagcggcggcggaccacctccaggggctaagtgatggatcttgtactccgtgttgcagattactatttttttacaccatacgtgtatccagccacatggccagaagatgacatcttccgacaagctattagtcttctgattgtaacaaatgttggtgcttacatcctttatttcttctgtgcaacactgagctattattttgtcttcgatcatgcattaatgaaacatccacaatttttaaagaatcaagtccgtcgagagattaagtttactgtccaggcattgccatggataagtattcttactgttgcactgttcttgctggagataagaggttacagcaaattacatgatgacctaggagagtttccatatggattgtttgaacttgtcgttagtataatatctttcctctttttcactgacatgttcatctactggattcacagaggccttcatcatagactggtatataagcgcctacataaacctcaccatatttggaagattcctactccatttgcaagtcatgcttttcaccctattgatggctttcttcagagtctaccttaccatatatacccttttatctttccattacacaaggtggtttatttaagtctgtacatcttggttaatatctggacaatttccattcatgacggtgattttcgtgtaagaatgaaaaattattcaatggagagtttacaaagactgaatagattattgcccagttattcttaagtaaggacaaagaaggaaatatcatcgtatttcttttttttaataaggaaaaaataatatccatacagtcaagatacatagtaaatggtatcatttggaaatcagcatcgtgggcactgctgaggaatgatcctagtggtaggtcagaagaagatgctgtgaacaccaggactttaatcttatgcttaaaatgccagatgttgttcgggggacaacttgtatctttctagcagcagatctgtagtttgtatagcctcaacaacaattttaaataagatggagaataaattattgaggggactaggctatatgcatttgccttcatccacccatgtttattaagaatcattgtgcttaataataccaagactaagcaccataaccaagaaatactaatgtaaagattgtttcttgtttcaggaatggttaattcttcaacgttggtatgataatgataacttgttttgacttgaataaagtactacatcagtgtggaaaaaaattctgatacattagcagctatgtaaatgacctaattgatagcaggtgtaataagactatcgtcttcctacacataggaggctcattctctggacacactatcacctattacattttactgattaacaaataaattggaatttaaaaatatcgatatcaccatgatttaatccagatctgggattatgtagctaaacattgtgatgattattatttaaaaccattatttaataagagtaaaaatatgtgaatctggatatatttaaaaaaagaaatttgatgcccagataatatattaggcactactgattttttagttaaattgatgcactacacttttgatgtttgaagttacaaacctgtaatttttttgtaaaggaaataattgccaaatacctaggcccattgctgacgattagttctaaaatcttattcctcctcttctcccctcacttttccctacttcctctgcaaaaagatttaacaaatacattcataaggaaatgtgtgttgtaacaaatatattgcaaaaacatagtttgtaaaggcattctataagctatttatgtaaaatcaataaaagttgatcataatt

SEQ ID NO: 4382 - DNA, 5267 bp, Homo sapiens
ctggccgcggcgtggggacagcgaggcgcactggggcctcccagcgcggggccggccgcgccgtccagcccgaggtctacggctttgcgctccgagcccagaggaagatgcctgccggcaccgagctcgggctgcggggctgaacgcctgtcttccaggcgcagcggcagcactgccctcggccggtgtcggtagcggcactcggcgtgccccgggcggacgaagagcgcaggctgggtacaccttgcccgaatcggcggagttcgcagctagcgcgggcgggccggccggcccggatgggcgcggggtttgcggcccccgccgggtgctccggagcggcccgggcaccgggggcacgctgagtgccggagccgcggccgcagagagaacttggggcgggggccatgccccggtgcggagtctagagccgagcggagcgccccgcgggcccgcccgcgtctgcggccgttcgggtcctcacagtccccgcgcccggagttcgcagcgcgctccagacaagatggcgcggccggtccggggagggctcggggccccgcgccgctcgccttgccttctccttctctggctgcttttgcttcggctggagccggtgaccgccgcggccggcccgcgggcgccctgcgcggccgcctgcacttgcgctggggactcgctggactgcggtgggcgcgggctggctgcgttgcccggggacctgccctcctggacgcggagcctaaacctgagttacaacaaactctctgagattgaccctgctggttttgaggacttgccgaacctacaggaagtgtacctcaataataatgagttgacagcggtaccatccctgggcgctgcttcatcacatgtcgtctctctctttctgcagcacaacaagattcgcagcgtggaggggagccagctgaaggcctacctttccttagaagtgttagatctgagtttgaacaacatcacggaagtgcggaacacctgctttccacacggaccgcctataaaggagctcaacctggcaggcaatcggattggcaccctggagttgggagcatttgatggtctgtcacggtcgctgctaactcttcgcctgagcaaaaacaggatcacccagcttcctgtaagagcattcaagctacccaggctgacacaactggacctcaatcggaacaggattcggctgatagagggcctcaccttccaggggctcaacagcttggaggtgctgaagcttcagcgaaacaacatcagcaaactgacagatggggccttctggggactgtccaagatgcatgtgctgcacctggagtacaacagcctggtagaagtgaacagcggctcgctctacggcctcacggccctgcatcagctccacctcagcaacaattccatcgctcgcattcaccgcaagggctggagcttctgccagaagctgcatgagttggtcctgtccttcaacaacctgacacggctggacgaggagagcctggccgagctgagcagcctgagtgtcctgcgtctcagccacaattccatcagccacattgcggagggtgccttcaagggactcaggagcctgcgagtcttggatctggaccataacgagatttcgggcacaatagaggacacgagcggcgccttctcagggctcgacagcctcagcaagctgactctgtttggaaacaagatcaagtctgtggctaagagagcattctcggggctggaaggcctggagcacctgaaccttggagggaatgcgatcagatctgtccagtttgatgcctttgtgaagatgaagaatcttaaagagctccatatcagcagcgacagcttcctgtgtgactgccagctgaagtggctgcccccgtggctaattggcaggatgctgcaggcctttgtgacagccacctgtgcccacccagaatcactgaagggtcagagcattttctctgtgccaccagagagtttcgtgtgcgatgacttcctgaagccacagatcatcacccagccagaaaccaccatggctatggtgggcaaggacatccggtttacatgctcagcagccagcagcagcagctcccccatgacctttgcctggaagaaagacaatgaagtcctgaccaatgcagacatggagaactttgtccacgtccacgcgcaggacggggaagtgatggagtacaccaccatcctgcacctccgtcaggtcactttcgggcacgagggccgctaccaatgtgtcatcaccaaccactttggctccacctattcacataaggccaggctcaccgtgaatgtgttgccatcattcaccaaaacgccccacgacataaccatccggaccaccaccatggcccgcctcgaatgtgctgccacaggtcacccaaaccctcagattgcctggcagaaggatggaggcacggatttccccgctgcccgtgagcgacgcatgcatgtcatgccggatgacgacgtgtttttcatcactgatgtgaaaatagatgacgcaggggtttacagctgtactgctcagaactcagccggttctatttcagctaatgccaccctgactgtcctagagaccccatccttggtggtccccttggaagaccgtgtggtatctgtgggagaaacagtggccctccaatgcaaagccacggggaaccctccgccccgcatcacctggttcaagggggaccgcccgctgagcctcactgagcggcaccacttgacccctgacaaccagctcctggtggttcagaacgtggtggcagaggatgcgggccgatatacctgtgagatgtccaacaccctgggcacggagcgagctcacagccagctgagcgtcctgcccgcagcaggctgcaggaaggatgggaccacggtaggcatcttcaccattgctgtcgtgagcagcatcgtcctgacgtcactggtctgggtgtgcatcatctaccagaccaggaagaagagtgaagagtacagtgtcaccaacacagatgaaaccgtcgtgccaccagatgttccaagctacctctcttctcaggggaccctttctgaccgacaagaaaccgtggtcaggaccgagggtggccctcaggccaatgggcacattgagagcaatggtgtgtgtccaagagatgcaagccactttccagagcccgacactcacagcgttgcctgcaggcagccaaagctctgtgctgggtctgcgtatcacaaagagccgtggaaagcgatggagaaagctgaagggacacctgggccacataagatggaacacggtggccgggtcgtatgcagtgactgcaacaccgaagtggactgttactccaggggacaagccttccacccccagcctgtgtccagagacagcgcacagccaagtgcgccaaatggcccggagccgggtgggagtgaccaagagcattctccacatcaccagtgcagcaggactgccgctgggtcctgccccgagtgccaagggtcgctctaccccagtaaccacgatagaatgctgacggctgtgaagaaaaagccaatggcatctctagatgggaaaggggattcttcctggactttagcaaggttgtatcacccggactccacagagctacagcctgcatcttcattaacttcaggcagtccagagcgcgcggaagcccagtacttgcttgtttccaatggccacctccccaaagcatgtgacgccagtcccgagtccacgccactgacaggacagctccccgggaaacagagggtgccactgctgttggcaccaaaaagctaggttttgtctacctcagttcttgtcataccaatctctacgggaaagagaggtaggagaggctgcgaggaagcttgggttcaagcgtcactcatctgtacatagttgtaactcccatgtggagtatcagtcgctcacaggacttggatctgaagcacagtaaacgcaagaggggatttgtgtacaaaaggcaaaaaaagtatttgatatcattgtacataagagttttcagagatttcatatatatcttttacagaggctattttaatctttagtgcatggttaacagaaaaaaattatacaattttgacaatattatttttcgtatcaggttgctgtttaattttggagggggtggggaaatagttctggtgccttaacgcatggctggaatttatagaggctacaaccacatttgttcacaggagtttttggtgcggggtgggaaggatggaaggccttggatttatattgcacttcatagacccctaggctgctgtgcggtgggactccacatgcgccggaaggagcttcaggtgagcactgctcatgtgtggatgcccctgcaacaggcttccctgtctgtagagccaggggtgcaagtgccatccacacttgcagtgaatggcttttccttttaggtttaagtcctgtctgtctgtaaggcgtagaatctgtccgtctgtaaggcgtagaatgagggttgttaatccatcacaagcaaaaggtcagaacagttaaacactgcctttcctcctcctcttattttatgataaaagcaaatgtggccttctcagtatcattcgattgctatttgagacttttaaattaaggtaaaggctgctggtgttggtacctgtggatttttctatactgatgttttcgttttgccaatataatgagtattacattggccttgggggacagaaaggaggaagttctgacttttcagggctaccttatttctactaaggacccagagcaggcctgtccatgccattccttcgcacagatgaaactgagctgggactggaaaggacagcccttgacctgggttctgggtataatttgcacttttgagactggtagctaaccatcttatgagtgccaatgtgtcatttagtaaaacttaaatagaaacaaggtccttcaaatgttcctttggccaaaagctgaagggagttactgagaaaatagttaacaattactgtcaggtgtcatcactgttcaaaaggtaagcacatttagaattttgttcttgacagttaactgactaatcttacttccacaaaatatgtgaatttgctgcttctgagaggcaatgtgaaagagggagtattacttttatgtacaaagttatttatttatagaaattttggtacagtgtacattgaaaaccatgtaaaatattgaagtgtctaacaaatggcattgaagtgtctttaataaaggttcatttataaatgtc

SEQ ID NO: 4383 - DNA, 3287 bp, Homo sapiens
ctggtgactgtggccggctgggagtaggcggcagtgagtttccctgggagggcagcgcgcttggcgcttctcccctccccccgatctgcctccagtctcggacttggttgttgcgcgctccggctccggctgagctgggagagttggaggaggtggcggcgggcagaggtgatgtctgggagcccttccttgacagcccgggccgagaagagtccctgcaggaagcatcacccaggctggcagatcatggtagcagcagcccccgaaggccctatcaggacatggagtatgaaagacgtggtggtcgtggtgacaggactggccgctatggagccactgaccgctcgcaggatgatggtggggagaaccgcagccgagaccacgactaccgggacatggactaccgttcatatcctcgcgagtatggcagccaggagggcaagcatgactatgacgactcatctgaggagcagagtgcggaggattcctacgaggcctccccgggctccgagactcagcgtaggcggcggcggcggcacaggcacagccccaccggcccgccaggcttcccccgagacggcgactatcgggaccaggactatcggaccgagcaaggggaggaggaggaggaggaggaggatgaggaggaggaggagaaggccagtaacatcgtcatgctgaggatgctgccacaggcagccactgaggatgacatccgtggccagctgcagtcgcacggcgtgcaagcacgggaggttcggctgatgcggaacaaatcttcaggtcagagccggggcttcgccttcgtcgagtttagtcacttgcaggacgctacacgatggatggaagccaatcagcactccctcaacatcctgggccagaaggtgtcgatgcactacagtgaccccaagcccaagatcaatgaggactggctgtgcaataagtgtggcgtccagaacttcaaacgccgagagaagtgcttcaaatgtggcgtgcccaagtcagaggcagagcagaagctgcccctcggcacgaggctggatcagcagacactgccactgggtggccgggagctgagccagggcctgcttcccctgccgcagccctaccaggcccagggagtcctggcctcccaagccctgtcacagggctcggagccaagctcagagaacgccaatgacaccatcattttgcgcaacctgaacccacacagcaccatggattccatcctgggggccctggcaccctacgcggtgctgtcctcctccaacgtgcgcgtcataaaggacaagcagacccaactgaaccgcggctttgccttcatccagctctccaccatcgtggaggcagcccagctgctgcagatcctgcaggccctgcacccaccactcactatcgacggcaagaccatcaatgttgagtttgccaagggttctaagagggacatggcctccaatgaaggcagtcgcatcagtgctgcctctgtggccagcactgccattgctgcggcccagtgggccatctcacaggcctcccaaggtggggagggtacctgggccacctccgaggagccgccggtcgactacagctactaccaacaggatgagggctatggcaacagccagggcacagagtcttccctctatgcccatggctacctcaagggcaccaagggccctggcatcactggaaccaaaggggatcccactggagcaggtcccgaggcctccctagagcctggggccgactctgtgtcgatgcaggctttctctcgcgcccagcctggtgctgctcctggcatctaccaacaatcagccgaggcgagcagtagccagggcactgctgccaacagccagtcgtataccatcatgtcacccgctgtgctcaaatctgagctccagagccctacccatcctagttctgctctcccaccggctaccagccccactgcccaggaatcctacagccagtaccctgttcccgacgtctctacctaccagtacgatgagacctccggctactactatgacccccagaccggcctctactatgaccccaactcccagtattactacaatgctcagagccagcagtacctgtactgggatggggagaggcggacctatgttcccgccctggagcagtcggccgacggacataaggagacaggggcaccctcgaaggagggcaaagagaagaaggagaagcacaagaccaagacagctcaacagattgccaaggacatggaacgctgggcccgcagtctcaacaaacaaaaagaaaacttcaaaaatagcttccagcctatcagctccctgcgagatgacgagaggcgggagtcagccactgcagatgctggctatgccatcctcgagaagaagggagcactagccgagagacagcacaccagcatggatctcccgaaattggccagtgacgaccgcccaagccctccgcgaggactggtggcagcctacagcggggagagtgacagtgaggaggagcaggagcgtgggggccctgagcgggaggagaagctcaccgactggcagaagctggcctgtctgctctgccgacgccagttccccagcaaagaggcgctcatccggcaccagcagctctcagggctccacaagcaaaaccttgagattcaccggcgagcccacttgtcagaaaacgagctagaagcactagagaagaatgacatggagcaaatgaagtaccgggaccgtgcagctgaacgcagagaaaagtatggcatccccgagccgccagagcccaagaggaggaagtacggcggcatatccacagcctctgtagacttcgagcagcctactcgggacgggctgggcagtgacaacattggcagtcggatgctgcaggccatgggctggaaagagggcagcggcctgggccgcaagaagcagggcattgtaacgcctatcgaggcccaaacacgggtgcggggctccggcctgggtgcacggggcagctcctacggggtcacctcaaccgagtcctacaaggagacactgcacaagacaatggtgacccgcttcaacgaggcccagtgagcagcttcaagagcaacttctccacatgttgggtgtccatcctggggcagggaaggacagagtgttggatggctgggacggggccttgctcttgtcggccagcccactccccagccagagagggcttgaccaaatcaaattgaggtggtgacttttgttggaaaattgggctgggatcacgtcctgttttgtaataaaagctgaaaagtctgc

SEQ ID NO: 4384 - DNA, 1474 bp, Homo sapiens
tcccttctcgtcgtcgccattttgagctggtgactgtggccggctgggagtaggcggcagtgagtttccctgggagggcagcgcgcttggcgcttctcccctccccccgatctgcctccagtctcggacttggttgttgcgcgctccggctccggctgagctgggagagttggaggaggtggcggcgggcagaggtgatgtctgggagcccttccttgacagcccgggccgagaagagtccctgcaggaagcatcacccaggctggcagatcatggtagcagcagcgggggtggctgggaagtgaaacggagccagcggctgaggaggggccccagcagcccccgaaggccctatcaggacatggagtatgaaagacgtggtggtcgtggtgacaggactggccgctatggagccactgaccgctcgcaggatgatggtggggagaaccgcagccgagaccacgactaccgggacatggactaccgttcatatcctcgcgagtatggcagccaggagggcaagcatgactatgacgactcatctgaggagcagagtgcggaggattcctacgaggcctccccgggctccgagactcagcgtaggcggcggcggcggcacaggcacagccccaccggcccgccaggcttcccccgagacggcgactatcgggaccaggactatcggaccgagcaaggggaggaggaggaggaggaggaggatgaggaggaggaggagaaggccagtaacatcgtcatgctgaggatgctgccacaggcagccactgaggatgacatccgtggccagctgcagtcgcacggcgtgcaagcacgggaggttcggctgatgcggaacaaatcttcagcactccctcaacatcctgggccagaaggtgtcgatgcactacagtgaccccaagcccaagatcaatgaggactggctgtgcaataagtgtggcgtccagagcccaagaggaggaagtacggcggcatatccacagcctctgtagacttcgagcagcctactcgggacgggctgggcagtgacaacattggcagtcggatgctgcaggccatgggctggaaagagggcagcggcctgggccgcaagaagcagggcattgtaacgcctatcgaggcccaaacacgggtgcggggctccggcctgggtgcacggggcagctcctacggggtcacctcaaccgagtcctacaaggagacactgcacaagacaatggtgacccgcttcaacgaggcccagtgagcagcttcaagagcaacttctccacatgttgggtgtccatcctggggcagggaaggacagagtgttggatggctgggacggggccttgctcttgtcggccagcccactccccagccagagagggcttgaccaaatcaaattgaggtggtgacttttgttggaaaattgggctgggatcacgtcctgttttgtaataaaagctgaaaagtctgc

SEQ ID NO: 4385 - DNA, 3384 bp, Homo sapiens
ggtggtcggagcgccgactcccttctcgtcgtcgccattttgagctggtgactgtggccggctgggagtaggcggcagtgagtttccctgggagggcagcgcgcttggcgcttctcccctccccccgatctgcctccagtctcggacttggttgttgcgcgctccggctccggctgagctgggagagttggaggaggtggcggcgggcagaggtgatgtctgggagcccttccttgacagcccgggccgagaagagtccctgcaggaagcatcacccaggctggcagatcatggtagcagcagcgggggtggctgggaagtgaaacggagccagcggctgaggaggggccccagcagcccccgaaggccctatcaggacatggagtatgaaagacgtggtggtcgtggtgacaggactggccgctatggagccactgaccgctcgcaggatgatggtggggagaaccgcagccgagaccacgactaccgggacatggactaccgttcatatcctcgcgagtatggcagccaggagggcaagcatgactatgacgactcatctgaggagcagagtgcggaggattcctacgaggcctccccgggctccgagactcagcgtaggcggcggcggcggcacaggcacagccccaccggcccgccaggcttcccccgagacggcgactatcgggaccaggactatcggaccgagcaaggggaggaggaggaggaggaggaggatgaggaggaggaggagaaggccagtaacatcgtcatgctgaggatgctgccacaggcagccactgaggatgacatccgtggccagctgcagtcgcacggcgtgcaagcacgggaggttcggctgatgcggaacaaatcttcaggtcagagccggggcttcgccttcgtcgagtttagtcacttgcaggacgctacacgatggatggaagccaatcagcactccctcaacatcctgggccagaaggtgtcgatgcactacagtgaccccaagcccaagatcaatgaggactggctgtgcaataagtgtggcgtccagaacttcaaacgccgagagaagtgcttcaaatgtggcgtgcccaagtcagaggcagagcagaagctgcccctcggcacgaggctggatcagcagacactgccactgggtggccgggagctgagccagggcctgcttcccctgccgcagccctaccaggcccagggagtcctggcctcccaagccctgtcacagggctcggagccaagctcagagaacgccaatgacaccatcattttgcgcaacctgaacccacacagcaccatggattccatcctgggggccctggcaccctacgcggtgctgtcctcctccaacgtgcgcgtcataaaggacaagcagacccaactgaaccgcggctttgccttcatccagctctccaccatcgtggaggcagcccagctgctgcagatcctgcaggccctgcacccaccactcactatcgacggcaagaccatcaatgttgagtttgccaagggttctaagagggacatggcctccaatgaaggcagtcgcatcagtgctgcctctgtggccagcactgccattgctgcggcccagtgggccatctcacaggcctcccaaggtggggagggtacctgggccacctccgaggagccgccggtcgactacagctactaccaacaggatgagggctatggcaacagccagggcacagagtcttccctctatgcccatggctacctcaagggcaccaagggccctggcatcactggaaccaaaggggatcccactggagcaggtcccgaggcctccctagagcctggggccgactctgtgtcgatgcaggctttctctcgcgcccagcctggtgctgctcctggcatctaccaacaatcagccgaggcgagcagtagccagggcactgctgccaacagccagtcgtataccatcatgtcacccgctgtgctcaaatctgagctccagagccctacccatcctagttctgctctcccaccggctaccagccccactgcccaggaatcctacagccagtaccctgttcccgacgtctctacctaccagtacgatgagacctccggctactactatgacccccagaccggcctctactatgaccccaactcccagtattactacaatgctcagagccagcagtacctgtactgggatggggagaggcggacctatgttcccgccctggagcagtcggccgacggacataaggagacaggggcaccctcgaaggagggcaaagagaagaaggagaagcacaagaccaagacagctcaacagattgccaaggacatggaacgctgggcccgcagtctcaacaaacaaaaagaaaacttcaaaaatagcttccagcctatcagctccctgcgagatgacgagaggcgggagtcagccactgcagatgctggctatgccatcctcgagaagaagggagcactagccgagagacagcacaccagcatggatctcccgaaattggccagtgacgaccgcccaagccctccgcgaggactggtggcagcctacagcggggagagtgacagtgaggaggagcaggagcgtgggggccctgagcgggaggagaagctcaccgactggcagaagctggcctgtctgctctgccgacgccagttccccagcaaagaggcgctcatccggcaccagcagctctcagggctccacaagcaaaaccttgagattcaccggcgagcccacttgtcagaaaacgagctagaagcactagagaagaatgacatggagcaaatgaagtaccgggaccgtgcagctgaacgcagagaaaagtatggcatccccgagccgccagagcccaagaggaggaagtacggcggcatatccacagcctctgtagacttcgagcagcctactcgggacgggctgggcagtgacaacattggcagtcggatgctgcaggccatgggctggaaagagggcagcggcctgggccgcaagaagcagggcattgtaacgcctatcgaggcccaaacacgggtgcggggctccggcctgggtgcacggggcagctcctacggggtcacctcaaccgagtcctacaaggagacactgcacaagacaatggtgacccgcttcaacgaggcccagtgagcagcttcaagagcaacttctccacatgttgggtgtccatcctggggcagggaaggacagagtgttggatggctgggacggggccttgctcttgtcggccagcccactccccagccagagagggcttgaccaaatcaaattgaggtggtgacttttgttggaaaattgggctgggatcacgtcctgttttgtaataaaagctgaaaagtctg

SEQ ID NO: 4386 - DNA, 3347 bp, Homo sapiens
gcgcaggcgcggcggccgatgcgagtgtgtatgtgcgggcgagaagatggcggcggcgggggaagcagcgtgagcagccggaggatcgcggagtcccaatgaaacgggcagccatggccctccacagcccgcagtatatttttggagattttagccctgatgaattcaatcaattctttgtgactcctcgatcttcagttgagcttcctccatacagtggaacagttctgtgtggcacacaggctgtggataaactacctgatggacaagaatatcagagaattgagtttggtgtcgatgaagtcattgaacccagtgacactttgccgagaacccccagctacagtatttcaagcacactgaaccctcaggcccctgaatttattctcggttgtacagcttccaaaataacccctgatggtatcactaaagaagcaagctatggctccatcgactgccagtacccaggctctgccctcgctttggatggaagttctaatgtggaggcggaagttttggaaaatgatggtgtctcaggtggtcttggacaaagggagcgtaaaaagaagaaaaagcggccacctggatattacagctatttgaaagatggtggcgatgatagtatctccacagaagccctggtcaatggccatgccaattcagcagtcccgaacagtgtcagtgcagaggatgcagaatttatgggtgacatgcccccgtcagttacgcccaggacttgtaacagcccccagaactccacagactctgtcagtgacattgtgcctgacagtcctttccccggagcactcggcagtgacaccaggactgcagggcagccagaggggggccccggggctgattttggtcagtcctgcttccctgcagaggctggcagagacaccctgtcaaggacagctggggctcagccctgcgttggtaccgatactactgaaaaccttggagttgctaatggacaaatacttgaatcctcgggtgagggcacagctaccaacggggtggagttgcacaccacggaaagcatagacttggacccaaccaaacccgagagtgcatcacctcctgctgacggcacgggctctgcatcaggcacccttcctgtcagccagcccaagtcctgggccagcctctttcatgattctaagccctcttcctcctcgccggtggcctatgtggaaactaagtattcccctcccgccatatctcccctggtttctgaaaagcaggttgaagtcaaagaagggcttgttccggtttcagaggatcctgtagccataaagattgcagagttgctggagaatgtaaccctaatccataaaccagtgtcgttgcaaccccgtgggctgatcaataaagggaactggtgctacattaatgctacactgcaggcattggttgcttgcccgccgatgtaccacctgatgaagttcattcctctgtattccaaagtgcaaaggccttgtacgtcaacacccatgatagacagctttgttcggctaatgaatgagttcactaatatgccagtacctccaaaaccccgacaagctcttggagataaaatcgtgagggatattcgccctggagctgcctttgagcccacatatatttacagactcctgacagttaacaagtcaagcctgtctgaaaagggtcgacaagaagatgctgaggaatacttaggcttcattctaaatggacttcatgaggaaatgttgaacctaaagaagcttctctcaccaagtaatgaaaaacttacgatttccaacggccccaaaaaccactcggtcaatgaagaagagcaggaagaacaaggtgaaggaagcgaggatgaatgggaacaagtgggcccccggaacaagacttccgtcacccgccaggcggattttgttcagactccaatcaccggcatttttggtggacacatcaggtctgtggtttaccagcagagttcaaaagaatctgccactttgcagccatttttcacgttgcagttggatatccagtcagacaagatacgcacagtccaggatgcactggagagcttggtggcaagagaatctgtccaaggttataccacaaaaaccaaacaagaggttgagataagtcgaagagtgactctggaaaaactccctcctgtcctcgtgctgcacctgaaacgattcgtttatgagaagactggtgggtgccagaagcttatcaaaaatattgaatatcctgtggacttggaaattagtaaagaactgctttctccaggggttaaaaataagaattttaaatgccaccgaacctatcggctgtttgcagtggtctaccatcacggcaacagtgcgacgggcggccattacactacagacgtcttccagatcggtctgaatggctggctgcgcatcgatgaccagacagtcaaggtgatcaaccagtaccaggtggtgaaaccaactgctgaacgcacagcctacctcctgtattaccgccgagtggacctgctgtaaaccctgtgtgcgctgtgtgtgcgcccagtgcccgcttcgtaggacaccacctcacactcacttcccgcctctctttagtggctctttagagagaaactctttctccctttgcaaaaatgggctagaatgaaaaggagatgccttggggttcgtgcacaacacagcttctgttgactctaacttccaaatcaaaatcatttggttgaaacagactgttgcttgattttagaaaatacacaaaaacccatatttctgaaataatgctgattcctgagataagaaagtggatttgatccccagtctcattgcttagtagaataaatcctgcaccagcaacaacacttgtaaatttgtgaaaatgaattttatctttccttaaaaaagaaattttttaatccatcacacttttcttccctaccctttagtttttgataaatgataaaaatgagccagttatcaaagaagaactagttcttacttcaaaagaaaaataaacataaaaaataagttgctggttcctaacaggaaaaattttaataattgtactgagagaaactgcttacgtacacattgcagatcaaatatttggagttaaaatgttagtctacatagatgggtgattgtaactttattgccattaaaagatttcaaattgcattcatgcttctgtgtacacataatgaaaaatgggcaaataatgaagatctctccttcagtctgctctgtttaattctgctgtctgctcttctctaatgctgcgtccctaattgtacacagtttagtgatatctaggagtataaagttgtcgcccatcaataaaaatcacaaagttggttt

SEQ ID NO: 4387 - DNA, 1962 bp, Homo sapiens
actcgtggctgtggtggcttcggcagcggcttcagcagatcggcggcatcagcggtagcaccagcactagcagcatgttgagccgggcagtgtgcggcaccagcaggcagctggctccggttttggggtatctgggctccaggcagaagcacagcctccccgacctgccctacgactacggcgccctggaacctcacatcaacgcgcagatcatgcagctgcaccacagcaagcaccacgcggcctacgtgaacaacctgaacgtcaccgaggagaagtaccaggaggcgttggccaagggtaggttccaggctgagcggcgggaggcagtccccggcagaggcgaccccagggagccaggccccatacggacgggcctctccgtggaggagaactcgcttcgtatttgtaccggttccgagttttccaggcacgatagtctctcttttaaacacatggtctacctcattgtagaaggagtgcctcgatgggtttgaacacacttctgtcatctcagggaacttggggtcctgcgaaggagcttgccttactgttgtgagccacattccgttacacatattgccagcactggtgaattgtagggcctgaaaagaaagctctactgtgtcactcgttttttttgcaaattgaaattgttcttgttgtataatgtgctttggggaaatgtttggtctctcaggtaggtgtgccagccgtttgcaggagggctgagagcgcctgtccactggtggccagacatcatcgggtccgcaggtgtctctgagtgtcagggtcacctcctgatagaagtgggagtggtgtcttactgccaggtcacactgaaggtgggagacaggaggacactactccgtgctaggaaccatggtccttgtcatcttcctgagagcaaacggggtcgggactccagcctaggacttggagactccctgcatccccagctaccctgcaggtgaaacttcactgagcccacttgacttcaggtgggagaggaggaggcacaccgttgtggtgtgcgttaccaaaaaagcagtaacctaactgtggaacagttcaggatctttagacttgatacttttcttgatttcccttaggggtcaaagttcacaaggaaaatagccctttagtgggaaactgaaacaggcttgtttttatttactatttactcatatttgtaatgcaattaaaatatatgttgttaactttttttttttttctcaagagctcggttgataaaaccaggggtatgtggactttttgagtctgtgccttttgggggtgtgtatgggaatgttatgttttaacgttttttacaaaatagtattgtctttttaatttattcgttagtggtttgcacaaggaagataatcgatagtcatgttttttagactctctgtattgcttggtaagctacgtagtaaaaaatgtttacttttccttaaatgttttgaatttcggggttatgaaatttgttgagtaatttttagacagtcacatcttgttgactggaggcatctagtggaaaaatgcagtatttcagcctgattgtgtttgaagtaaatgattaaaagaggaggaagttaccacattctggaagatttacttgagacagacgaaccttgaattacgggaaaaggccccgtgatttaggaaataacaaatttgggaaacatgtaatggggagagactggggaataccccagttgtgaaagtacttcctgtaaggcaacatctgacaccaggaacctttctcttcagtattttaaaaacaacttaatttcagtcctttacttgtggaatcagagccttacttatgtaatacaacccactggaaaaaagctttttattgtattgtactatattgtttataagtgattgagtacctgcagagctttcttttacttaaacatattttaaaaattattaaaaagattttcatgtttg

SEQ ID NO: 4388 - DNA, 828 bp, Homo sapiens
gctgtggtggcttcggcagcggcttcagcagatcggcggcatcagcggtagcaccagcactagcagcatgttgagccgggcagtgtgcggcaccagcaggcagctggctccggttttggggtatctgggctccaggcagaagcacagcctccccgacctgccctacgactacggcgccctggaacctcacatcaacgcgcagatcatgcagctgcaccacagcaagcaccacgcggcctacgtgaacaacctgaacgtcaccgaggagaagtaccaggaggcgttggccaagggagatgttacagcccagatagctcttcagcctgcactgaagttcaatggtggtggtcatatcaatcatagcattttctggacaaacctcagccctaacggtggtggagaacccaaaggggagttgctggaagccatcaaacgtgactttggttcctttgacaagtttaaggagaagctgacggctgcatctgttggtgtccaaggctcaggttggggttggcttggtttcaataaggaacggggacacttacaaattgctgcttgtccaaatcaggatccactgcaaggaacaacaggccttattccactgctggggattgatgtgtgggagcacgcttactaccttcagtataaaaatgtcaggcctgattatctaaaagctatttggaatgtaatcaactgggagaatgtaactgaaagatacatggcttgcaaaaagtaaaccacgatcgttatgctgatcataccctaatgatcccagcaagataatgtcctgtcttctaagatgtgcatcaagcctggtacatactgaaa

SEQ ID NO: 4389 - DNA, 2000 bp, Homo sapiens
acttttgggtcgggccctccgggaagatggcggccgtgcaggcggccgaggtgaaagtggatggcagcgagccgaaactgagcaagaagtggtggtaatcattagttccagggtgctctgccatgttgacgcaagctgctgtaaggcttgttagggggtccctgcgcaaaacctcctgggcagagtggggtcacagggaactgcgactgggtcaacttgctcctttcacagcgcctcacaaggacaagtcattttctgatcaaagaagtgagctgaagagacgcctgaaagctgagaagaaagtagcagagaaggaggccaaacagaaagagctcagtgagaaacagctaagccaagccactgctgctgccaccaaccacaccactgataatggtgtgggtcctgaggaagagagcgtggacccaaatcaatactacaaaatccgcagtcaagcaattcatcagctgaaggtcaatggggaagacccatacccacacaagttccatgtagacatctcactcactgacttcatccaaaaatatagtcacctgcagcctggggatcacctgactgacatcaccttaaaggtggcaggtaggatccatgccaaaagagcttctgggggaaagctcatcttctatgatcttcgaggagagggggtgaagttgcaagtcatggccaattccagaaattataaatcagaagaagaatttattcatattaataacaaactgcgtcggggagacataattggagttcaggggaatcctggtaaaaccaagaagggtgagctgagcatcattccgtatgagatcacactgctgtctccctgtttgcatatgttacctcatcttcactttggcctcaaagacaaggaaacaaggtatcgccagagatacttggacttgatcctgaatgactttgtgaggcagaaatttatcatccgctctaagatcatcacatatataagaagtttcttagatgagctgggattcctagagattgaaactcccatgatgaacatcatcccagggggagccgtggccaagcctttcatcacttatcacaacgagctggacatgaacttatatatgagaattgctccagaactctatcataagatgcttgtggttggtggcatcgaccgggtttatgaaattggacgccagttccggaatgaggggattgatttgacgcacaatcctgagttcaccacctgtgagttctacatggcctatgcagactatcacgatctcatggaaatcacggagaagatggtttcagggatggtgaagcatattacaggcagttacaaggtcacctaccacccagatggcccagagggccaagcctacgatgttgacttcaccccacccttccggcgaatcaacatggtagaagagcttgagaaagccctggggatgaagctgccagaaacgaacctctttgaaactgaagaaactcgcaaaattcttgatgatatctgtgtggcaaaagctgttgaatgccctccacctcggaccacagccaggctccttgacaagcttgttggggagttcctggaagtgacttgcatcaatcctacattcatctgtgatcacccacagataatgagccctttggctaaatggcaccgctctaaagagggtctgactgagcgctttgagctgtttgtcatgaagaaagagatatgcaatgcgtatactgagctgaatgatcccatgcggcagcggcagctttttgaagaacaggccaaggccaaggctgcaggtgatgatgaggccatgttcatagatgaaaacttctgtactgccctggaatatgggctgccccccacagctggctggggcatgggcattgatcgagtcgccatgtttctcacggactccaacaacatcaaggaagtacttctgtttcctgccatgaaacccgaagacaagaaggagaatgtagcaaccactgatacactggaaagcacaacagttggcacttctgtctag

SEQ ID NO: 4390 - DNA, 2643 bp, Homo sapiens
aagttaagctgaagaccgaagcaagagctggttcaggtggcagccacagcagcctcagggacctcagcaactatggcctcctgcccagactctgataatagctgggtgcttgctggctccgagagcctgccagtggagacactgggcccggcatccaggatggacccagaatctgagagagccctgcaggcccctcacagcccctccaagacagatgggaaagaattagctgggaccatggatggagaagggacgctcttccagactgaaagccctcagtctggcagcattctaacagaggagactgaggtcaagggcaccctggaaggtgatgtttgtggtgtggagcctcctggcccaggagacacagtagtccagggagacctgcaggagaccaccgtggtgacaggcctgggaccagacacacaggacctggaaggccagagccctccacagagcctgccttcaacccccaaagcagcttggatcagggaggagggccgctgctccagcagtgacgatgacaccgacgtggacatggagggtctgcggagacggcggggccgggaggccggcccacctcagcccatggtgcccctggctgtggagaaccaggctgggggtgagggtgcaggcggggagctgggcatctccctcaacatgtgcctccttggggccctggttctgcttggcctgggggtcctcctcttctcaggtggcctctcagagtctgagactgggcccatggaggaagtggagcggcaggtcctcccagaccccgaggtgctggaagctgtgggggacaggcaggatgggctaagggaacagctgcaggccccagtgcctcctgacagtgtccccagcctgcaaaacatgggtcttctgctggacaagctggccaaggagaaccaggacatccggctgctgcaggcccagctgcaggcccaaaaggaagagcttcagagcctgatgcaccagcccaaagggctagaggaggagaatgcccagctccggggggctctgcagcagggcgaagccttccagcgggctctggagtcagagctgcagcagctgcgggcccggctccaggggctggaggccgactgtgtccggggcccagatggggtgtgcctcagtgggggtagaggcccacagggtgacaaggccatcagggagcaaggccccagggagcaggagccagaactcagcttcctgaagcagaaggaacagctggaggctgaggcacaggcattaaggcaagagttagagaggcagcgacggctgctggggtctgtacagcaggatctggagaggagcttgcaggatgccagccgcggggacccagctcatgctggcttggctgagctgggccacagattggcccagaaactgcagggcctggagaactggggccaggaccctggggtctctgccaatgcctcaaaggcctggcaccagaagtcccacttccagaattctagggagtggagtggaaaggaaaagtggtgggatgggcagagagaccggaaggctgagcactggaaacataagaaggaagaatctggccgggaaaggaagaagaactggggaggtcaggaggacagggagccagcaggaaggtggaaggagggcaggccaagggtggaggagtcggggagcaagaaggagggcaagcgacagggcccgaaggaacccccaaggaaaagtggtaccttccactcctctggagaaaagcagaagcaacctcggtggagggaagggaccaaggagctacccctctcacctgctttctttggtgaggatggcatcttccgtcatgaccgcctccgcttccgggattttgtggatgccctggaggacagcttggaggaggtggctgtgcaacagacaggtgatgatgatgaagtagatgactttgaggacttcatcttcagccacttctttggagacaaagcactgaagaagaggtcagggaagaaggacaagcactcacagagcccaagagctgcggggcccagggaggggcacagccatagccaccaccaccaccaccggggctgacaccctgccccacagggaatggccttggcctggcccagcccaagatcccagcgttatctaactcctggagggtggactctgtcctggcttgtttggtgtcctcagatatctttcacacagtagagcaaaatcaccagccctgcactgatgtcactttatgtagaaaaaggccttagctggacctgcgttgccgtctatgcaaatgcatgcaaatactccaggccctgggatgtgggcttgtgttttgtcactgtgaagggggagatgggagaggagcctgttttggggtggggtctggggaaggcaatctgattctgaagctaaagagctttcatcctcttgagtgtatgtccccatagtgggccccttgacccacatgctgaccggtgccttgggatttgactagagttgctggctcgaggcccagcacgaggacttaccctggggttttgttaggtttggaagcagctgtccctagggggtgaagtcccccccctttttttttttacccctgcttctcccacggcttcacctccctatgtgaactgtagactcagatcccaataaagtgctgttgcagct

SEQ ID NO: 4391 - DNA, 968 bp, Homo sapiens
gcgggagctatggggcccagggattgtgtttgaagtagtgcttctaccaacatgtcccatggttccagcgctggttttgaccgccacattaccattttttcacccgagggtcggctctaccaagtagaatatgcttttaaggctattaaccagggtggccttacatcagtagctgtcagaggttaagactgtgtagtaattgtcccacagaagaaagtacctgacaaattattggattccagcacagtgactcccttattcaagataactgaaaacattggttgtgttatgaccggaatgacagctgacagcagatcccaggtacagagggcacgctatgaggcagctaactggaaatacaagtatggctatgaaattcctgtggacatgctgtgtaaaagaattgccgatatttctcaggtctacacacggaatgctgaaatgaggcctcttggttgttgtatgattttaattggtatagatgaagagcaaggccctcaggtatgtaagtgtgatcctgcaggttactattgtgggtgtaaagccactgcagtgggagttaaacaaactgagtcaaccagcttcctagaaaaaaaagtgaagaagaaatttgactggacatttgaacagactttggaaactgcaattacatgcctgtctactgttctatcaattgatttcaaaccttcagaaatagaagttggagtagtgacagttgaaaatcctaaattcaggattcttacagaagcagagattgatgctcatcttgttgctctagcagagagagactaaacattgttgttagtttaccagatccgtgatgccacttacctgtgtgtttggtaacaacaaacaaatatcatggaggtccctggattgaaaaaagagcctctcccactcctcctaccaccgaagtggttaggactctatataaataaaaacaaggcttttggaaaaaaaaaaaaaaa

SEQ ID NO: 4392 - DNA, 1286 bp, Homo sapiens
ggaaattaagaaaagcagcccatttggaagtacatagggaaggagatggttctagtaccacagataacacacaagagggagcagttcagaaccacggtacaagcacctctcacagcgttggcactgtcttcagagatctctggcatgctgctttctttttatcaggatcaaagaaagcaaagaattcaattgataaatcaactgaaactgacaatggctatgtatcccttgatgggaagaagactgttaaaagcggtgaagatggaatacaaaaccatgaacctcagtgtgaaactattcgaccagaagagacagcctggaacacaggaacactgaggaatggtcctagcaaagatacccaaaggacaataacaaatgtctctgatgaagtctccagtgaggaaggtcctgaaacaggatactcattacgtcgtcatgtggacaggacttctgaaggtgttcttcggaatagaaagtcacaccattataagaaacattaccctaatgaggacgcccctaaatcgggtactagttgcagctctcgctgttcaagttccagacaggattctgagagtgcaaggccagaatctgaaacagaagatgtgttatgggaagacttgttacattgtgcagaatgccattcatcttgtaccagtgagacagatgtggaaaatcatcagattaatccatgtgtgaaaaaagaatatagagatgacccttttcatcagagtcatttgccctggctccatagttcccacccaggattagaaaaaataagtgctatagtatgggaaggtaatgattgtaagaaagcagacatgtctgtacttgaaatcagtggaatgataatgaacagagtgaacagccatataccaggaataggataccagatttttggaaatgcagtctctctcatactgggtttaactccatttgttttccgactttctcaagctacagacttggaacaactcacagcacattctgcttcagaactttatgtgattgcatttggttctaatgaagatgtcatagttctttctatggttataataagttttgtggttcgcgtgtctcttgtgtggattttcttttttttgctctgtgtagcagaaagaacttataaacaggtgggtataatgtagacttccgaataagaatattttatcgttttcataatattaaaagtattcctgaagtactttattatttcattatatcatttttacctaattattttttattttgcttttatagtacctaaccaaataaaatcttaacaattc

SEQ ID NO: 4393 - DNA, 4389 bp, Homo sapiens
attggagcatatgatcaacaaatatgggaaaaatctgttgaacagagagaaatcaaggggctaaggaataaaccaaagaaaacagcacatgtgaaaccagacctcatagatgttgatcttgtaagagggtctgcatttgcaaaggcaaagcctgaaagtccttggacttctctgaccagaaagggaattgttcgagttgtatttttcccctttttcttccggtggtggttacaagtaacatcaaaggtcatctttttctggcttcttgtcctttatcttcttcaagttgctgcaatagtattattctgctccacttctagcccacacagcatacctctgacagaggtgattgggccgatatggctgatgctgctcctgggaactgtgcattgccagattgtttccacaagaacacccaaacctcctctaagtacagggggtaaaagaagaaggaaattaagaaaagcagcccatttggaagtacatagggaaggagatggttctagtaccacagataacacacaagagggagcagttcagaaccacggtacaagcacctctcacagcgttggcactgtcttcagagatctctggcatgctgctttctttttatcaggatcaaagaaagcaaagaattcaattgataaatcaactgaaactgacaatggctatgtatcccttgatgggaagaagactgttaaaagcggtgaagatggaatacaaaaccatgaacctcagtgtgaaactattcgaccagaagagacagcctggaacacaggaacactgaggaatggtcctagcaaagatacccaaaggacaataacaaatgtctctgatgaagtctccagtgaggaaggtcctgaaacaggatactcattacgtcgtcatgtggacaggacttctgaaggtgttcttcggaatagaaagtcacaccattataagaaacattaccctaatgaggacgcccctaaatcgggtactagttgcagctctcgctgttcaagttccagacaggattctgagagtgcaaggccagaatctgaaacagaagatgtgttatgggaagacttgttacattgtgcagaatgccattcatcttgtaccagtgagacagatgtggaaaatcatcagattaatccatgtgtgaaaaaagaatatagagatgacccttttcatcagagtcatttgccctggctccatagttcccacccaggattagaaaaaataagtgctatagtatgggaaggtaatgattgtaagaaagcagacatgtctgtacttgaaatcagtggaatgataatgaacagagtgaacagccatataccaggaataggataccagatttttggaaatgcagtctctctcatactgggtttaactccatttgttttccgactttctcaagctacagacttggaacaactcacagcacattctgcttcagaactttatgtgattgcatttggttctaatgaagatgtcatagttctttctatggttataataagttttgtggttcgcgtgtctcttgtgtggattttcttttttttgctctgtgtagcagaaagaacttataaacagcgattactttttgcaaaactctttggacatttaacatctgcaaggagggctcgaaaatctgaggttcctcatttccggttgaagaaagtacagaatataaaaatgtggctatctctccgttcctatcttaagcgtcgaggtcctcagcgatcagttgatgtaatagtttcatctgctttcttattgactatctcagttgtatttatctgttgtgcccagataaacctctacttgaaaatggagaaaaaacctaacaaaaaggaggaactgacactagtgaataatgttttaaaactggctactaaactgctaaaggagttggacagtccttttagattatatgggcttacaatgaatccgctgctttataacatcacccaggttgttatcctgtcagctgtttctggtgttatcagtgacttgcttggatttaatttaaagctatggaagattaagtcatgacaattcaaagaaaagaagatgtagcctcttttccagaataagagtactgactaagctgcctgaaagcttgtcactgattctttgcttcaggagtctcagctagggagttgaagtgtttacatcagactgtcttgtgcaattcttatatttattttactggttcacttttttttacatttattttagtctttatatttttatttttaagcattgatgtacttagttgttgaaagggtgatgaaactgatatccagatacttgagatcctggtaattggtcataaataattggcaaaataacaaattgtgaaaatagaagccattgctcagcaccgtttctccatcaatgccgtgaacttgccttacttgaggaaaaattctttaactttggaatattgcattgaactcagctatacacataaaacattttctttggtaaatcaagatccagtcagggtttctcttgaattattttggaacaatgccaggatccaaactgattaagttacagtttaagcacccttcagtattaatatatacggtattatataacaggtcaacaagtgctctttgatgataaaacttgtaatagagcaataattgtaaatggttaccatactgtaagatattttgataaaaattaactagtaatacttgtatttatttgaaacactgggctgtttgcacagctccaactgtgcatgctcaaaatgtgcactttttaaaattgttacttttaatgcgtatctttatatgggatctgttatagtatactagggcatgatatggtatccttttgagtgaggtatatactcatctcacaagtgaagtgcctactgatattactaaagtacattatgtttactcaagtaaataattttctccccatggtacactctagtgtaggctattcataccacactgaaatgaacaactgaagaataaggctaagaaccaataaaatatttctctaattgctagttgtaaaactgtatccaaattttcagaaaagacagcttcagcttgcaaattctatcctctaaacttatctggtgcattctccccaccccacccccattatataagggctattttagatgcttttaacctccccaacaaataatttgccaagtgtccaatgagaacttatcatgttggtgtgttaggtaaatcgggcaaatatgatagtgtcttacattgggccttgattttaagttgttatatttgtacaatcgagtattttagaaattacatgaaacatgaaacagtttttgcaattttttttaaactgggcatctggtttctaaaaatttatttgaaacaatctagaattttcttggtgcaaagtgtatcatgtggaatatcctcatatttttaccatattttaagaactttaagacgattaattgtaaataatttatttgattggtgcagttctaatccctaaatcataatcttaaaatcaggaatgtgtggagaacagagccatgtcatatcactttgctcttaccattccttttgatcagcctcaattcagcctcattgtgtagtatgttttttctttctatgaaaaacaacagaaagcatttcattttatttgcctatgttcaaatatgtttaataatgaccaaagtgcattctgagttttttcaaggaatgtaatactggagctttaagaacatacttagtttctcatgtgaaaacttaggctttgtctgatgtttttccttcctctattgtctaatgttgaggttgtttttaggaattatgttttataaactttttcaatataaggtacatgcctatacagaacttaacattttgcacagaatatatcaaatatattttgagaaaaaaagtacggcatgagttctgttaggaataaaagatgaaactattgtatctcacaaaaaatcttatttcagaatggaaatatttttgagaaaagtagctgagtatactggtttaagaaaatgcttgttttagattgaggttaacttagagttgggagttgatttattaagtacagtatacctctcaacagtttataaataatatgttgaattatgtcagtgtgggcagcagtagaatactaaaaggaaaatgtcatgttaagcaatttcagaacattaactgaactattttcaaagcagaaaaattgacattgctgcctttaagaataccatgaatgtaagaaattgaaagaaattgtaaaatatcacataatatagaaatggcagttcaaagagaattgtggcagatgttgtgtgtgaactgttgtttctttgccacatgtgttgtatttgaaagttttacagtaagtttaaaataaaacattctgtgactg

SEQ ID NO: 4394 - DNA, 2129 bp, Homo sapiens
atttttagtagagacggggtttcgtcatgttgggtagactggtctcgatctcttgacctcatgatccgctggcctcagcctcccaaagtgctgggattataggcgtgagccaccgcacccggcctcacccttccattctttgggcatcctctgcccaaactcctttgcaaccatcagacccaggcaaccgtgtggccagcttcctggacctggtcctgggcaaggacattcagcatggaggtcaggatgaatgtggtcatgccccctgtatcctcctcccccagcagcccccagagatggttcccacagtcaccgagctcctcaatggtcacagtagcgctgggctcagagagggcgccttccccatcggtccggtagctgcagctgtagttgccaggctgatggactggaaaggtggcctccacatcctcctgggcctcaggcacctccagaaactcatggtcgccctcccgcctcagcagaaaagtcacaccccgcagcacacctcggcacactgctgttgttttcaggccgggggtgatccaggacactggcgccatcgagagccagggagcaggcaaggactctgtgggtggggtggagttgaagagtgcttctgcataacaggagacgtgggaagcccagcagaacctgggccccacactcataagactgtgaaggagacagggatggagggcattgctgggaaaaggcaggcaggcaccagtggaaacaaggcatacggcaagagaaaaagagtgtgtgggagctgtacggcatgccgggcctgctggggacacaaccatgtattccttacaacacagacatcatccccatttgacagatgggaagattggggcttggggctcagagacatcgggtgacttggaggaagggagaccccccagtcaacaacctacccactgcctcctggcccccaattcatgccccggctcacttggccctgtcagctccaggagcttgctcagctgggtccatcctgtggacaagcccgagcggcagcggtagcggccctgggtgtcacccgtcagcaggaactggtgcttgatggcagggacccagaccccaggaggcctcaccccacagcaagagaaagaccacgagcatggacatgatggtcgcgctcactccggtgcagtgagtgtctgggtgatggatcctagaacctgttctagaaggagacgctgagttctccccactctacctggagctgctgaggtcaagtggagagtgccggggctgaagcccagcgagcccctccctgtcacaccacactgcacatgtgacaccaaaggcatttattgagcatctactgtgtgccagatgcaaagaagacagtgggataactgggcaaggagcattccaggcagagggaacagccagtgcaaacatgggagatgcgggtgcagtgagaaggagcagaggagaccaggagttgaggcgactgcagagcgattgcagagctcatagacgtgatgaagaccagctgggcactgcagcggctctggcttctgctgtgagggacggggagctgtggagactccctctgtttggtcccatttccatattgctgagcacctgctgcatgctctctgtcctgctcagagccagtacctggatggaggctgtgtgttctgggtggactgggggagaatgcattctttgcagaagagacaaccaggtgctgaggcctgaagtcataaccagacctggggcactcagacaaggactggtggccaggccagaggagcagagctcagggtgtgcacagaactcagaagtcagaccactgaacagtgacagaacctttcagcccattggcaatgaggctgcccaggcagccagaggcctggtcaaatctgaggtctgcagagatggagctgtcattctgtgtttcctttggcagtcccaacaccagcctcgttgcaccctcctcttagcttccctgggttctccagccctaagggtggtagcagcttcctgcaagtatccagctctgagattctgcaacatccacttttgctctctgagccttgcaaaacctgcacaatcagtccctaacttatatcccctctgtttgaaatacctagtgtggtttctatttcctg

SEQ ID NO: 4395 - DNA, 885 bp, Homo sapiens
gctggaccgtggatcccgggcgggcgtgcgggcggcagcgtacgaggccttctactcgcccgggtgtccggtgcctcgcttctccctgggaccctgtcgtcaacatcgaggcctgccagtgagcttctaccatcatggacctattgttcgggcgccggaagacgccagaggagctactgcggcagaaccagagggccctgaaccgtgccatgcgggagctggaccgcgagcgacagaaactagagacccaggagaagaaaatcattgcagacattaagaagatggccaagcaaggccagatggatgctgttcgcatcatggcaaaagacttggtgcgcacccggcgctatgtgcgcaagtttgtattgatgcgggccaacatccaggctgtgtccctcaagatccagacactcaagtccaacaactcgatggcacaagccatgaagggtgtcaccaaggccatgggcaccatgaacagacagctgaagttgccccagatccagaagatcatgatggagtttgagcggcaggcagagatcatggatatgaaggaggagatgatgaatgatgccattgatgatgccatgggtgatgaggaagatgaagaggagagtgatgctgtggtgtcccaggttctggatgagctgggacttagcctaacagatgagctgtcgaacctcccctcaactgggggctcgcttagtgtggctgctggtgggaaaaaagcagaggccgcagcctcagccctagctgatgctgatgcagacctggaggaacggcttaagaacctgcggagggactgagtgcccctgccactccgagataaccagtggatgcccaggatcttttaccacaacccctctgtaataaaagagatttgacact

SEQ ID NO: 4396 - DNA, 884 bp, Homo sapiens
gaaatggtgtagtcaatgaagaaagtagcagggatggatgtggaactgacagttgaagaaataaacttcccatctgttgcatataagaatgtaattggagctagaagagcctcctggagaataatcagcagtattgaacagaaagaagaaaacaaggaaggagaagacaagctaaaaatgatttgggaatatcagcaaatgattgagactgagctaaagttactctgttgtgacattctggatgtactggacaaaaacctcattccagcagctaacactggcgagtccaaagttttctattataaaatgaaaggggactaccacaggtatctggcagaatttgccacaggaaatgacaggaaggaggctgtggagaacagcctagtggcttataaagctgctagtgatattgcaatgacagaacttccaccaatgcatcctactcgcttaggtcttgctctcaaatttttctgtattctactacgaaattcttaattcccctgaccatgcctgcaggttggcaaaagcagcttttgatgatacaattgcagaactggatacgctgagtgaagaaagctataaggacactatggacttcaggcatgcagggtgatggtgaagaacagaataaagaagcgctgcaggaggtggaagatgaaaatcagtgagacataaaagccaacaagaaaaaccatctccgaccaccctgctcttccctatcccaccccttggcaactccccattgtcactgagaaccaccaaatctgacttttacatttggcgtcagaatttaggttcctgccctgttttttgtttgtttgtttgtttgtttgtttgtttgttttttaaacagttttcaaaagttcttaaaggcaagagtgaat

SEQ ID NO: 4397 - DNA, 2127 bp, Homo sapiens
atccatcttgaattaatctttgtataaggtgtaaggaagggatccagttttggctttctacatatggctagccagctttccaccaccatttattaaatagggaatcctttccccattgcttgtttttgtcaggtttgtcaaagatcagatagttgtagatatgtggcattatttctgagggctctgttctgttccattgatctatatctctgttttggtaccagtaccatgatgttttggttactgtagccttgtagtatagtttgaagtcaggtagcgtgatgcctccagttttgttcttttggcttagggatgacttggcaatgagggctctcttttggttccatatgaactttaaagtagttttttccaattctgtgaagaaagtcattggtagcttgatggggatggcattgaatctgtaaattaccttgggcagtatggccattttcacgagattgattcttcctacccatgagcatggaatgttcttccatttctttgtatcctcttttatttcgttgagcagtggtttgtaattctccttgaagaggtccttcacatcccttgtaagttggattcctaggtattttattctctttgaagcaattgtgaatgggagttcactcatgatttggctctctgtttgtctgttattagtgtataagaatgcttgtgatttttgcacattgattttgtatcctgagactctgctgaagttgcttatcaggttaaggagattttgggctgagacgatggggttttctagatatacaatcatgtcatctgcaaacagggacaatttgacttcctcttttcctaattgaataccctttatttccttctcctgcttgattgccctggccagaacttccaacactatgttgaataggagtggtgatttttgcaatctactcatctgacaaagggctaatatccagaatctacaatgaactcaaacaaatttacaagaaaaaaacaacccaatcaacaagtgggctaaggatatgaaaagacccttctcaaaagaagacattgatgcagccaacaaacacatgaaaaaatgctcatcatcactggccatcagagaaatgcaaatcaaaaccacaatgagataccatttcacaccagttagaatggcgatcattaaaaagtcagggaacaacaggtgctggagaggatgtggagaaataggaacacttttacactgttggtgggactgtaaactcattcaaccattgtggaagtcagtgtggcgattcctcagggatctagaactagaaataccatttgacccagccatcccattactgggtatatacccaaaggattataaatcatgctgctataaagacacatgcacacatatgtttattgcagcactattcacaatagcaaagacttggaaccaacccaaatgtccaacaatgatagactggattaagaaaatgtggcacatatacaccatggaatactatggagccataaaaaggatgagttcatgtcctttgtaggaacatgggtgaagctggaaaccatcattctcagcaaactatcgcaaggacaaaaaccaaacaccacatgttctcactcataggtgggaaatgaacaatgagaacacatggacaaaggaaggggaacatcacccaccagggcctgttgtggggtgcggggagaggggagggatagcattaggagatatacctaatgtaaatgatgagttaatgggtgcagcacaccaacatggcacatgtatacatacgtaacaaacctgcacattgtgcacatgtaccctaaaacttaaattaaaaaaaaaaagttcaaaaaaaaacaaacaaactcctgagtacagtttttgtgctgagctctcaaagagattacagaatgaacaaatcaagattcttctataagactgaagtgctggttaccaactttcctggttaacattcagcaaaagcattttctctctaagtcctggaactaggatcaggatattttcttttgtaaaattcacttgttactttcagaccaaagttgtgttttacataaatcatgcgatcttggcactcctgattgcttggttgaaaaaatatttctgaataaaaaatattttaaatttgccatttt

SEQ ID NO: 4398 - DNA, 1631 bp, Homo sapiens
ttatcattctcctctttctgagaattaaggacttgccttgtgttttaatccccttcctggccccactccatgcacacggagccggggccgtcgtggctgctgagtggtctgtgcatggcttggctgtgttggtgctggcacagctgcgggtgatctcgtgctagggccctcaggctggcacctctgggcagtcttgtgaaggccgcactggtcatcgtcttcccccaagtggccgttgctcggccaaccagtaactactaaaagcctccccacccaggccctgggctgcgtctgttcagcctggagcaggctcaccctgcacctggggtctggagtgtgctgggggccgggctgtggggtgtgggtcgccaggctcgtggctgctctctggagacgggtcacacgcgttggcagacccctctccgggcctgtgggctgaatgctggcaggggtgctgggctccgtccgtccactgctgatgcgagctgggtgggcttcccttgccttcacccactcaggttggagtagggatggagtcgctgctcctgaggggttctcgggggccaggacgggacttttaattccctcttgagacatcttcggggcctgagtgtgcagggtctgagcccactctgtgatgagtatggggagcatgtggagccccagggcagctcagcgtgtggctcaaggccttctcctgtaggtttttaaatttatttgttcccttgccagaaatgagtatgacacccccaactggccacagttcctgccttaaaatgaccgaggttaaaatgagaaacacagagcttcccttggaggtcacggtacattccagtccaggagagacggagccggtgtctgacttgagtctgtggagggcagcagtgcacccgcccaatctgtgcattcccttctgagcttgatttagcccctctgtttcagtcagtcatgctcattgagaacagacagcaagtgtatgaagcgggtggaggctgattcagcccctgtattgaaaagtcggtcgtgctcattgagaacagacgggaagcgtacgaagcgggtggaaaatcccgcagtccagccattcccttcaaaacatgcctcccagccactcaggaggctgaggcaggaggatcacttgagcccaggaggtcaaggttgcagtgagccatggagtccattgcactccatccttggtgacagagtgagacatcgtttccaaaaaaattctacagaaatgctctatttacaaatttacataatttcctttggaaatagatttaaaaattttttaaggatgaggtaggtaggcaggaaaacggggttctttttggataaaaaaattcacatggccgggtgtcatggctcatgcctgtaatcccagcactttgggaggccgaggcaggcggatcacgaggtcaggagattgagaccatcctggctaacacggtgaaactccgtctctactaaaaatacaaaaaattagccaggcatggtggcgggcgcctgtagtcccagctactcgggaggctgaggcaggagaatggcgtgaacccgggaggtggagcttgcagtgagccaagatcgtgccactgcactccagcctgggcgacagagtgagactccgcctc

SEQ ID NO: 4399 - DNA, 1968 bp, Homo sapiens
gagctcgcggcagtacggggagcgcccgcccgccccgccctggacccaaccaagcgtcccgcggaggggtgcggccacttgggggcaggagaaagcggagtacgccacccctctagggacccaggaagcgaggcgagcctcaggtggacgcggtggtgtggaccacggcgatcagggcctttccccctgctgtggagacggaggtgcgaggggacgccggcggctccccaccttctggccgagtggccttctccgcctccggctggactccctcggggcgctccctccagagccgagtcgggctggccgggggcggctgtttggcctgagtgtcgtcttactaaagcggaacgccggaggggaggccactccgagagaaggcggtccccggcggaggtggcttcgtgaatcctgcagccccctgcccgcccgccactcgagacgccgcgcctcgtgggtttcacgctggatggagggggcgccgccgaggatgcccagcctccccctctaattctacctctccagttcctcaggtagacacagcctctgtctgctgtggttttagtgcccatggcccctcagaaattatttttgtcccctcccgatagtggctttgggggatggagggcgagagatgcaaagggccagtggaagattttttatagcacaaggaatcaagccaggagatggaggtttcattgccacctcggggtctggggagggggcgagccacacctctccggtcagtctgcgcccaccaggacctgctgctgggaaccgcacacgaaaggagagacacccagcacctggcccctagacccgcagggcgtcaacctcctgggcttctgcctttctaggtttcctctgactttgctgacccaatgacccctggccacgggtggcaaaaacgccctcactgagcccttcgctaaaggagtgccggggtttatgtgtctggcttttaaaatgggatgaggagacaaggaaacaggacctgagaaaggacactatccaaaatctgatgctctcagaagtcaactttaaaactgccctgctccgcggtggctcacgcctgtaatcccagcactttgggaggccgaggcgggcggatcacgaggtcaggagatcgagaccatcccggctaaaacggtgaaaccccgtctctactaaaaatacaaaaaattagccgggcgtagtggcgggcgcctgtagtcccagctacttgggaggctgaggcaggagaatggcgtgaacccgggaggcggagcttgcagtgagccgagatcccgccactgcactccagcctgggcgacagagcgagactccgtctcaaaaaaaaaaaaaaaaaaaaaactgccctgctcttttcatccaaagatgaatatatgaagccagctgttactggttgaaagtgtgcctcttgtttgcatggcaaaggaattcagttttgtgtttatttacagctgaagctctcttgaaataattgtctcagtcacagcttttacattttggggaaccatgccattagaactgaatattaggaactgtgatcttttgtcttttcacaattgacaatacattcagaacttatttctgataaaactgggcagtttctaaggatactgtacttatgatttaaagtcataactccatgatgcaaaagagaacaagaaatatgtttcaatgactgccttttaaattagcggtactccagcactttgggaggccgaggtgacaggatcgtttgaggccgggagttcaagacagcctgggcatcatagccagaccttgtttctactaaaaataaaaaataaataaattttccgggcatggtggcccatgcctgtagccccagctactcaggaggctgaggtgggaggatggcttgggcctaggaggttgaggccacagtgaattatgattacaccacgggactctagcctgggtgacagagtgagaccctgtctg

SEQ ID NO: 4400 - DNA, 1588 bp, Homo sapiens
cggaagccgccgaaactctggggtagagtggcacgcgctttttgcttttccgcgtcttcttcggtggcgatccgcgtcctagaaagggcggtgggctccacctcggcctagaaggccagcgggagccgtaggaagccgtcgcgggaagctcagccgaattggagttggagcccccggattgcgctgaccctgagtctcagactccccagtacaatgactcaagcagaaattaagctctgttctttgttgctgcaagagcattttggagagattgtagaaaaaattggagtccatctgataagaaccggcagccagccactaagagtaattgcccatgacacaggaacatcactggatcaggtgaagaaagccctgtgtgtcctcgtccaacataacctggtgagttatcaagtgcacaaacgtggtgtggtggagtatgaagcccagtgcagccgggtattgcgaatgcttagatatccccggtacatctatactaccaaaactctgtacagtgacactggagagctgattgttgaggagcttctgttgaacggcaaactgacaatgtcagctgttgtgaagaaagtggcagaccggctcacagagaccatggaggatggcaagaccatggactatgctgaagtatcaaacacatttgtgcgactggcagacacacactttgtacaacgctgcccttcggtacctaccactgagaattcagaccctgggccaccaccacctgcccccacacttgtcattaatgaaaaggacatgtacctggttcctaaactcagcttgatagggaaaggtaaaaggaggagatcatctgatgaagatgctgctggggagcccaaggccaagagaccaaaatatactacagataacaaggagcccattccagatgatgggatttattggcaggccaaccttgacagattccaccaacacttccgtgaccaagccattgtgagcgcagttgctaacaggatggaccagacaagcagcgagattgtgcgaaccatgctccgaatgagtgagattaccacttcctctagtgctcccttcacccagccattgtcttccaatgagatcttcagatccctacctgttggctataacatctctaagcaagttcttgatcagtatctcactctgctggcagatgatccactagagtttgttggaaagtctggcgacagtggtggaggaatgtatgtcatcaacctccataaggcattagcatccctagccacagccactctggagtccgtcgtacaggagagatttgggtctcgctgtgctagaatattccgtctagttttgcagaagaaacacatagagcagaagcaagtggaagactttgcaatgattcctgcaaaggaggcaaaggatatgctatataagatgctctcagaaaatttcatgtcactccaggttggatgccagtgagatccaggtggacgaaaccatcttcctgctggagtcttacattgagtgcaccatgaagagacagtgatccagaagaagcatcttcctcagaagatctggggggatggaaagcaaaataaaggaggtgcctggatgcatt

SEQ ID NO: 4401 - DNA, 4249 bp, Homo sapiens
gggtcctgtgcgcgtgcgcagcgaacagctgtcacctagtgcggaacaagtctcccaaatttcccaaatctccctgggccggaggccactgtcttctcttcctcctccaccgagtcgtgctctcgccccaacccgcgcgccagacactgccctaaccatcatggaggtggccgaggtggaaagtcctctgaaccccagctgtaagataatgaccttcagaccctccatggaggagttccgggagttcaacaaataccttgcatacatggagtctaaaggagcccatcgtgcgggtcttgcaaaggtgattcctcctaaggagtggaagccaagacagtgctatgatgacattgataatttgctcattccagcaccaattcagcagatggtcacagggcagtcaggactgttcactcagtacaacatccagaaaaaagcgatgactgtgaaggagttcaggcagctggccaacagtggcaaatattgtactccaagatacttggattacgaagatttggagcgcaagtactggaagaacttaacttttgtggcacctatctatggtgcagatattaatgggagcatatatgatgagggtgtggatgaatggaacatagctcgcctcaatacagtcttggatgtggttgaagaagagtgtggcatttctattgagggtgtaaataccccatatctctattttggcatgtggaagaccacgtttgcatggcacaccgaagacatggacctctatagcattaattatctccactttggagagcccaagtcttggtatgctatacctccggagcatggaaaacgacttgaaagactagctcaaggttttttcccaagcagctcccaagggtgtgatgcatttcttcgccacaagatgacattgatttctccatcagtattgaagaaatatggtattccctttgacaagataacccaggaggctggagaattcatgatcactttcccatatggctaccatgctggttttaatcatggtttcaactgtgcagaatctacaaattttgctactgtcagatggattgactatggaaaagttgccaaattgtgcacttgcaggaaagacatggtgaagatttcaatggatatctttgtgaggaaatttcagccagacagatatcagctttggaaacaaggaaaggatatatacaccattgatcacacgaagcctactccagcatccacccctgaagtaaaagcatggctgcagaggaggaggaaagtaagaaaagcatcccgaagcttccagtgtgctaggtctacctctaaaaggcctaaggctgatgaggaagaggaagtgtcagatgaagtcgatggggcagaggtccctaaccccgactcagtcacagatgacctcaaggtcagtgaaaagtcagaagcagcagtgaagctgaggaacacagaagcatcttcagaagaagagtcatctgctagcaggatgcaggtggagcagaatttatcagatcatatcaaactctcaggaaacagctgcttaagtacatctgtaacagaagacataaaaactgaggatgacaaagcttatgcatatagaagtgtaccttctatatccagtgaggctgatgattccattccattgtctagtggctatgagaagcccgagaaatcagacccatccgagctttcatggccaaagtcacctgagtcatgctcatcagtggcagagagtaatggtgtgttaacagagggagaagagagtgatgtggagagccatgggaatggccttgaacctggggaaatcccagcggtccccagtggagagagaaatagcttcaaagtccccagtatagcagagggagagaacaaaacctctaagagttggcgccatccacttagcaggcctccagcaagatctccgatgactcttgtgaagcagcaggcgccaagtgatgaagaattgcctgaggttctgtccattgaggaggaagtggaagaaacagagtcttgggcgaaacctctcatccacctttggcagacgaagtcccctaacttcgcagctgagcaagagtataatgcaacagtggccaggatgaagccacactgtgccatctgcactctgctcatgccgtaccacaagccagatagcagcaatgaagaaaatgatgctagatgggagacaaaattagatgaagtcgttacatcggagggaaagactaagcccctcataccagagatgtgttttatttatagtgaagaaaatatagaatattctccacccaatgccttccttgaagaggatggaacaagtctccttatttcctgtgcaaagtgctgcgtacgggttcatgcaagttgttatggtattccttctcatgagatctgtgatggatggctgtgtgcccggtgcaaaagaaatgcgtggacagcagaatgctgtctctgcaatttgagaggaggtgctcttaagcaaacgaagaacaataagtgggcccatgtcatgtgcgccgttgcggtcccagaagttcgattcactaatgtcccagaaaggacacaaatagatgtaggcagaatacctttacagaggttaaaattgaaatgcatcttctgcagacaccgggttaagagggtctctggagcctgcatccagtgttcctacggtcgctgcccggcctccttccatgtcacttgtgcccatgctgctggggtactgatggagcctgatgactggccttatgtggtgaacattacatgctttcgacataaggtcaaccccaacgtgaagtccaaggcttgcgagaaggtcatttccgtgggtcaaacggtcatcacgaagcatcggaacacccggtattacagttgcagagtgatggctgtgacatcgcagaccttctatgaggtcatgtttgatgatggctcctttagcagagacacatttcctgaggatatcgtgagccgagactgtctgaagctgggcccacctgctgagggagaagtcgtccaagtcaagtggcccgatggcaaactctatggagcaaaatattttggatcaaatattgcccacatgtaccaggttgagtttgaagatggatcccagatagcaatgaagagagaggacatctacactttagatgaagagttacccaagagagtgaaagctcgattttccacagcctctgacatgcgatttgaagacacgttttatggagcagacattatccaaggggagagaaagagacaaagagtgctgagctccaggtttaagaatgaatatgtggccgaccctgtataccgcacttttttgaagagctctttccagaagaagtgccagaagagacagtagtctgcatacatcgctgcaggccacagagcagcttgggttggaagagagaagatgaagggacatccttggggctgtgccgtgagttttgctggcataggtgacagggtgtgtctctgacagtggtaaatcgggtttccagagtttggtcaccaaaaatacaaaatacacccaatgaattggacgcagcaatctgaaatcatctctagtcttgctttcacttgtgagcagttgtcttctatgatcccaaagaagttttctaagtgaaaggaaatactagtgaatcacccacaaggaaaagccactgccacagaggaggcgggtccccttgtgcggcttagggccctgtcaggaaacacacggggacctctctctctagctccagcaggtggcacctcggtacccagcgggtagggcgataatttatatattttccacagtcagggaaggactctcacttatttgtttcaaattgcagtttttataaaacatttttaaaacacaaatggcatgtatgctaatgagatttacccgtgtgctatctgtatttcccttgtacagaacttttacatttttgaatattcctattacttttgattgtgtctgatgggaactgagttgttggcctttgtgaaatgaaatttttggctcttgagaaagaattcttatgaattgttatgcgaattttatatatttaaagagggagatctggggctgttatttttaaacactttttttcataatacatattccgagtagatatttataaaatatatgtttctttcattatgtgtttgtaaaattagagtttaaataaatatgctttgatgcatagttttgaactaatgtaacatgatttttcttttttaaaacagcctgaaaatgtactagtgtttaaaaataaagatttccattttctcc

SEQ ID NO: 4402 - DNA, 4181 bp, Homo sapiens
  misc_feature (596)..(789): n is a, c, g, or t
gggtcctgtgcgcgtgcgcagcgaacagctgtcacctagtgcggaacaagtctcccaaatttcccaaatctccctgggccggaggccactgtcttctcttcctcctccaccgagtcgtgctctcgccccaacccgcgcgccagacactgccctaaccatcatggaggtggccgaggtggaaagtcctctgaaccccagctgtaagataatgaccttcagaccctccatggaggagttccgggagttcaacaaataccttgcatacatggagtctaaaggagcccatcgtgcgggtcttgcaaaggtgattcctcctaaggagtggaagccaagacagtgctatgatgacattgataatttgctcattccagcaccaattcagcagatggtcacagggcagtcaggactgttcactcagtacaacatccagaaaaaagcgatgactgtgaaggagttcaggcagctggccaacagtggcaaatattgtactccaagatacttggattacgaagatttggagcgcaagtactggaagaacttaacttttgtggcacctatctatggtgcagatattaatgggagcatatatgatgagnnnnnnnnnnnnnnnnnnnnnnnnnnnnnnnnnnnnnnnnnnnnnnnnnnnnnnnnnnnnnnnnnnnnnnnnnnnnnnnnnnnnnnnnnnnnnnnnnnnnnnnnnnnnnnnnnnnnnnnnnnnnnnnnnnnnnnnnnnnnnnnnnnnnnnnnnnnnnnnnnnnnnnnnnnnnnnnnnnnnnnnnnnnnnnnnnngtatgctatacctccggagcatggaaaacgacttgaaagactagctcaaggttttttcccaagcagctcccaagggtgtgatgcatttcttcgccacaagatgacattgatttctccatcagtattgaagaaatatggtattccctttgacaagataacccaggaggctggagaattcatgatcactttcccatatggctaccatgctggttttaatcatggtttcaactgtgcagaatctacaaattttgctactgtcagatggattgactatggaaaagttgccaaattgtgcacttgcaggaaagacatggtgaagatttcaatggatatctttgtgaggaaatttcagccagacagatatcagctttggaaacaaggaaaggatatatacaccattgatcacacgaagcctactccagcatccacccctgaagtaaaagcatggctgcagaggaggaggaaagtaagaaaagcatcccgaagcttccagtgtgctaggtctacctctaaaaggcctaaggctgatgaggaagaggaagtgtcagatgaagtcgatggggcagaggtccctaaccccgactcagtcacagatgacctcaaggtcagtgaaaagtcagaagcagcagtgaagctgaggaacacagaagcatcttcagaagaagagtcatctgctagcaggatgcaggtggagcagaatttatcagatcatatcaaactctcaggaaacagctgcttaagtacatctgtaacagaagacataaaaactgaggatgacaaagcttatgcatatagaagtgtaccttctatatccagtgaggctgatgattccattccattgtctagtggctatgagaagcccgagaaatcagacccatccgagctttcatggccaaagtcacctgagtcatgctcatcagtggcagagagtaatggtgtgttaacagagggagaagagagtgatgtggagagccatgggaatggccttgaacctggggaaatcccagcggtccccagtggagagagaaatagcttcaaagtccccagtatagcagagggagagaacaaaacctctaagagttggcgccatccacttagcaggcctccagcaagatctccgatgactcttgtgaagcagcaggcgccaagtgatgaagaattgcctgaggttctgtccattgaggaggaagtggaagaaacagagtcttgggcgaaacctctcatccacctttggcagacgaagtcccctaacttcgcagctgagcaagagtataatgcaacagtggccaggatgaagccacactgtgccatctgcactctgctcatgccgtaccacaagccagatagcagcaatgaagaaaatgatgctagatgggagacaaaattagatgaagtcgttacatcggagggaaagactaagcccctcataccagagatgtgttttatttatagtgaagaaaatatagaatattctccacccaatgccttccttgaagaggatggaacaagtctccttatttcctgtgcaaagtgctgcgtacgggttcatgcaagttgttatggtattccttctcatgagatctgtgatggatggctgtgtgcccggtgcaaaagaaatgcgtggacagcagaatgctgtctctgcaatttgagaggaggtgctcttaagcaaacgaagaacaataagtgggcccatgtcatgtgcgccgttgcggtcccagaagttcgattcactaatgtcccagaaaggacacaaatagatgtaggcagaatacctttacagaggttaaaattgaaatgcatcttctgcagacaccgggttaagagggtctctggagcctgcatccagtgttcctacggtcgctgcccggcctccttccatgtcacttgtgcccatgctgctggggtactgatggagcctgatgactggccttatgtggtgaacattacatgctttcgacataaggtcaaccccaacgtgaagtccaaggcttgcgagaaggtcatttccgtgggtcaaacggtcatcacgaagcatcggaacacccggtattacagttgcagagtgatggctgtgacatcgcagaccttctatgaggtcatgtttgatgatggctcctttagcagagacacatttcctgaggatatcgtgagccgagactgtctgaagctgggcccacctgctgagggagaagtcgtccaagtcaagtggcccgatggcaaactctatggagcaaaatattttggatcaaatattgcccacatgtaccaggttgagtttgaagatggatcccagatagcaatgaagagagaggacatctacactttagatgaagagttacccaagagagtgaaagctcgatttgtaagtgctggcagatgccacttggggacctgccaagtgaattccttgtcctcacctcatgtttcccaagcccagcaggaaacatacttgggcttttggattaattctaaaaaaagccaatgcaacattttccttagtggaacctattgaatgcaaacttcaaattcaaccaaaatcggggaaattaatgcatgtgctttacttttcttctaatgaagtcacatgatgcttctttgtgttgacatttattggtgcacaaaaatacttactgaatgtgtgctctgtgtaaaacaccaggagcaaacaaagataccatcaaggcatttgcaatcttgttagtagaagcaacattaaaagtattcaggagtagatcaaaggggactcggcataattgaatgtctgtctattcttttataggtttttcatggattgactaccttctgtctcagaaagttactgatgtttgtgtcagttcatcattaagctaaactctgactttcataataaaagggataaacaaagcctaaatgctagttgtgggaatactaaagcagttttttaaaaaggaaatagtagtttcatgccctcacataccattaaaagatgaacaaacatggacaaatattcaaaactgcagtcattgaaaaatataattcacaataatttagacttcatattattgtatcataaaatattcagtggaccctgaaatgaagtcagttttattcatttagaattatatctattgtgtctgtgaaatgataaatcctaaatagagaaatttgaatggatggggtttttctgactaaaatgaaattttttttctgaataattcagtttagtgagtgcttatgatatacttgtctgcagtgatagagtcactatagattatttggttattttggaaaaaccaagggttttcttaaatcagggatgtccaatctttttgcatccctgggccatacttgaagaagaagaattgtctttggcctcacataaactacactaacaatagctgatgagctac

SEQ ID NO: 4403 - DNA, 1097 bp, Homo sapiens
gagggcgggcctgtttccgggaggcgcgtggggcttgaggccgagaacggcccttgctgccaccaacatggagactttgtaccgtgtcccgttcttagtgctcgaatgtcccaacctgaagctgaagaagccgccctggttgcacatgccgtcggccatgactgtgtatgctctggtggtggtgtcttacttcctcatcaccggaggaataatttatgatgttattgttgaacctccaagtgtcggttctatgactgatgaacatgggcatcagaggccagtagctttcttggcctacagagtaaatggacaatatattatggaaggacttgcatccagcttcctatttacaatgggaggtttaggtttcataatcctggaccgatcgaatgcaccaaatatcccaaaactcaatagattccttcttctgttcattggattcgtctgtgtcctattgagttttttcatggctagagtattcatgagaatgaaactgccgggctatctgatgggttagagtgcctttgagaagaaatcagtggatactggatttgctcctgtcaatgaagttttaaaggctgtaccaatcctctaatatgaaatgtggaaaagaatgaagagcagcagtaaaagaaatatctagtgaaaaaacaggaagcgtattgaagcttggactagaatttcttcttggtattaaagagacaagtttatcacagaattttttttcctgctggcctattgctataccaatgatgttgagtggcattttctttttagtttttcattaaaatatattccatatctacaactataatatcaaataaagtgattattttttacaaccctcttaacattttttggagatgacatttctgattttcagaaattaacataaaatccagaagcaagattccgtaagctgagaactctggacagttgatcagctttacctatggtgctttgcctttaactagagtgtgtgatggtagattatttcagatatgtatgtaaaactgtttcctgaacaataagatgtatgaacggagcagaaataaatactttttctaattgcaaaaaaaaaaaaaaaaaaaaaaaaa

SEQ ID NO: 4404 - DNA, 2544 bp, Homo sapiens
cataaaagtgagaaagatcaagctggacttgagccactggccctcaggctcagcagggagctgcaggagaaggagaaagtgattgaagtcctgcaggccaagctggatgctcggtccctcacaccctccagcagccgtgccttgtctgactcccaccgctctcccagcagcacctctttcctgtctgatgagctggaagcctgctctgacatggacatagtcagcgagtacacacactatgaagagaagaaagcttctcccagtcactcagattccatccatcattcgagtcattctgctgtgttgtcttctaaaccatcatcaaccagtgcatctcagggggctaaggccgaatccaacagcaaccccatcagcttgccaactccccagaatacccccaaggaggccaaccaagcccattcaggtaccagcactgttcctcctgcttccacagctacattgctgagcaacgacttggaagccgactcttcctactacctcaactctgcccagcctcactctcctccaaggggcaccatagaactgggaagaatcctagagcctgggtacctgggcagcagtggcaagtgggatgtgatgaggcctcagaaagggagtgtatctggggacctatcctcaggctcctctgtgtaccagcttaactccaaacccacaggggctgacctgctggaagagcatcttggtgaaatctggaacctgcgccagcgcctggaggagtccatctgcatcaatgactgcctacgggagcaactggaacaccggctgacctctactgctcgtggaaggggatccacttctaacttctacagtcagggcctggagtccatacctcagctctgcaatgagaacagagtcctcagggaagaaaatcgaagacttcaggctcaactgagtcatgtttccagagagcactcccaggaaacagaaagcctgagggaggctctgctgtcctctcgatcccaccttcaagagctggaaaaggagctggagcaccagaaggtggaaaggcagcagcttttggaagacttgagggagaagcagcaagaggtcttgcatttcagggaggaacgtctttccctccaggaaaacgactccaggtaagaggggacccattgacagagaaggtagcattcttcattcttacattcattcttacattacaagaggaagggatattggcaagacaattgatgtcctcttttggaaacctaaatgttccctctgctattcctgatttttgtgtgtcagtggggtggggggaggggcgctttgagcagaagaaaggacttctctgggaatgccttgtcactcccaagttgagagagtaaaactctgttatagaagtcttcagtatatcagagacatgaaaaaagaagggttcccatgcttccaattagatataggacattagtctcaccatcacctaggaagcttctatactggctgtgatgcttggtcccagcataagccctgtaactgcttgtcagaatgcaaacagcactgtaggaacagtaaggagactgtgctggtgtgtctgttctgctctgaactaatgtaggtaatggtgtgttttcaagcaaagttacttgacctccctcagcctccatttccatatctgcaaaataaaagtgatagtcttcatgaccccctgagttgacatctggggctcagatgtaaccctaactgtaaccctttatgaccctctgagttgacatctggctctcagcttgttgctctggtgtggctgagtagctctgccatctcagtgggccttgcctctccctggtcagactgcagcacaagctggttctcctgcagcaacagtgtgaagagaaacagcagctctttgagtccctccagtcagagctacaaatctacgaggcactttatggcaattccaagaaggggctgaaaggtatgtgttcttctcccctcaccccatgagctttttgcccttgcataggatgctagtgaggtctttcctttgggagttgtggagatcatgggaagctacagagttctgtcgcagaaacccccacccgagcctggggctcccagtaggagctctcaaacacaaagcccaacgggacaggttggtggcacgagcaagatccggcctgatcattcctaattactttaagaaaatctagacattcctatcaatgtctagattgtaacatttttgaaagcaaaagaactgtcctaatgatatcatcatttgaaaaggcctttaatattgttggtaatacatactgacaacccattcagcccaatgtagcaggcagtctgctcccaccctgaccctttccgtagtgacatctggctctcagcttattgccctttcatgtaattttcataaatcctgatttagtttcctgattttctaaagagaaggtgaactggaatttgaagaaatacaggggcttaccaggctgggcgaatagcttaagtacaaagtcatggtgagtgttgagtcagtggggaccagcctgcccacaggagaaaattaaaagacacaaaaac

SEQ ID NO: 4405 - DNA, 1698 bp, Homo sapiens
ctttgttcgggtgcagttggcacatccacacagtggctcatggccgcccttgcccagctctccaggcctggccgccggctgcccccccccccaccctgttgctgtctcgtgcagcccctgcacgggagctccagcttgtgtcagcgggaagggctatttcaccataagcaacactcacactcacacggggcttggttcctgtcccccgttcaccattctcagatcccccagctggccgcctgccccctgcagagcctgaggttgtccaagccacggagccccggacgctgctgcgcctggtgtggttgtctcaactgtgagcccttcaagtggctcccaagtcctcgcaggtggcccggggcgtgcctgaaactgtgctgtactcaggctctgtgttaatggctccagacctgcaaacggtgtttggccaggatcacagggcccttggtgggcagcaggtctgtttttaagctgaaaccctgtacttctgttcgcggccgtgtagagctgccccttatgccacagcttcctcatccatacgtaggggtgatgttggcaaggcctccggggcgctcaggatcaaaggcggcggcagtgtcctgccaagtgttcacagctgatgagacgtggtccctgaacacagcggttcctgttctgatcactcgagtctccgtgatgccaccgttcccagaaggcagcccgtgcagcctccgggtccccccttcagccatggcagcccgtgcagcctccgggtcgtcccttcggccaagcttccctttccttgagagcagcacgctggcctggccatgcagaacaaaacacaactcagaaatccctcctcagccctcggcagtaaaacttctgaggattcgactttttagttaatttgctcactgtggcagctcactggaaaataaatcgaggatgccaagtcctcctcttagaaaaatagcccctgcagtggggtttgctgatgtgctcatttgtgtcattgcaggctttatcctgtggataaacgcagagtgaacgagtttggggagtcctacgaggagaaggccacgcgggcgccccacacggactgaaggccgcccgggctgccgccagccaagtgcaacttgaattgtcaatgagtatttttggaagcatttggaggaattcctagacattgcgttttctgtgttgccaaaatcccttcggacatttctcagacatctcccaagttcccatcacgtcagatttggagctggtagcgcttacgatgcccccacgtgtgaacatctgtcttggtcacagagctgggtgctgccggtcaccttgagctgtggtggctcccggcacacgagtgtccggggttcggccatgtcctcacgcgggcaggggtgggagccctcacaggcaagggggctgttggatttccatttcaggtggttttctaagtgctccttatgtgaatttcaaacacgtatggaattcattccgcatggactctgggatcaaaggctctttcctcttttgtttgagagttggttgttttaaagcttaatgtatgtttctattttaaaataaatttttctggctgtggcatttttcttgacctggtataatgaaagtatttcagatatttgagtttaacccttttccagaaagtaatacatgatatggatttatttatgcattaaaagagcaaatttaaagagc

SEQ ID NO: 4406 - DNA, 1045 bp, Homo sapiens
gagctgagagctcgaggtgagctgggctcgcggtcgcccctctcgcgcgccctctttaagaaccacggcgtccaacctccctggaaatggggggaacatggccgaggcgcgtggcgaggccgcctcgtggaggccccggagcggcatcctcagcgccccagcgatccggtgcccattagatttctttagtacagaacctgctaaggccatcaaacctattgatcggaagtcagtccatcagatttgctctgggccggtggtaccgagtctaagcactgcggtgaaggagttagtagaaaacagtctggatgctggtgccactaatattgatctaaagcttaaggactatggagtggatctcattgaagtttcaggcaatggatgtggggtagaagaagaaaacttcgaaggcttaatctctttcagctctgaaacatcacacatctaagattcaagagtttgccgacctacctcaggttgaaacttttggctttcggggggaagctctgagctcactttgtgcactgagtgatgtcaccatttctacctgccatgtatcggcgaaggttgggactcgactggtgtttgatcactatgggaaaatcatccagaaaaccccctacccccaccccagagggatgacagtcagtgtgaagcagttattttctacgctacctgtgcaccataaagaatttcaaaggaatattaagaagaaacgtgcctgcttccccttcgccttctgccgtgattgtcagtttcctgaggcctccccagccatgcttcctgtacagcctgcagaactaggatgtaactggagagctacgggcatgcagaagttggaagatgagggaaggcatcacagaggctgtggggtgaaccgacttcaaggaatgggtgcttcccttcagaaccacatgtgtgtgggacacccagacagaaaacacgaatgcaaagtcaagtggagggcatttggaaggagcagtgaagccaagccaggaaacaccaagatggcgagccagtgtggttgtagagattgtagagaggg

SEQ ID NO: 4407 - DNA, 1829 bp, Homo sapiens
gtacgctgcggtggcaggcgtgctggccggcgtggagagccgccagggctctatcaaggggctggtgtactccagcaacttccagaacgtgaagcagctgtacgcgctggtgtgcgaaacgcagcgctactccgccgtgctggatgccgtgatctccagcgccggcctcctcagtgcgaagaagctgcagccgcacctggccaagggtaggggcggggcggggaagtgaaccccgacggtcagcgctttgtcatctggtttcagccccgctgccgtgcacggcgggactggagcaagtcgctcacctgaaatgagtgctagtgtatgagttgttgggaaagggctttcgagggggtgggggccaatggaaggctctgttgggacggcaccaggcgaggtgttgagttggctcggctcaaggttcttcggggtgtgagctggcatgaggacctgttggaagtgggatccaggcctggtccagcctcccagctgcctcgatttgtgcgtgtgaacactctcaagacctgctccgtttatgtagttatttcaagagacaaggtttctcctatcagggtcgggcttccaggctggatggagtgccctggcgcgatctcggctcaccgcaacctctgcctcctgggttcaagcgattctcctgcttcagccttctgagcagctgggattatgaaggggtggcctgcccctccacatctgtgggatatctcatcagccttgatgacttacaagccctcaaggggaagcattttctcctggactccttgatgccggagctgctggtgtttcccgcccagacagatctgcatgaacacccactgtaccgggccggacacctcattctgcaggacagggccagctgtctcccagccatgctgctggacccccgccaggctcccatgtcatcgatgcctgtgccgccccaggcaataagaccagtcacttggctgctcttctgaagaaccaagggaagatctttgcctttgacctggatgccaagcggctggcatccatggccacgctgctggcctgggttggcgtctcctgctgtgagctggctgaggaggacttcctggcggtctcccccttagatccgcgctatcgtgaggtccactatgtcctgctggatccttcctgcagtggctcgggtgagatggtatgccgagcagacagctggaggatcccggggcagggacacctagcccggtgcgtctgcatgccctggcagggttccagcagcgagccctgtgccacgcgctcactttcccttccctgcagcggctcgtctactccatgtgctccctctgccaggaggagaatgaagacatggtaccagatgcgctgcagcagaacccgggcgccttcaggctagctcccgccctgcctgcccggccccaccgaggcctgagcacgttcccgggtgccgagcactgcctccgggcttcccccaagaccacgcttagcggtggcttcttcgttgctgtaattgaacgggtcgagatgccgacctcagcctcacaggccaaagcatcagcaccagaacgcacacccagcccagccccaaagagaaagaagagacagcaaagagccgcagccggtgcttgcacaccgccttgcacatagcagaggctccaggctgactccttcctggtgggaaaggaagatgcctgtcctctccgtggaggaccctgggccctcaccgcaggcagcagtttgcattttgaaaggttattgggtcccttcctcgggctgtgttcttgctggtgagcaaaagtgttgcctgcagaaataaaatgcagaacgtactctacgat

SEQ ID NO: 4408 - DNA, 4597 bp, Homo sapiens
ggagattctgaagccgagcaacttgcccaagtccttcttcttttcccattaacaagatatgatatcaccaagccaaacgtcatcattaagttggagcagggagaggagctgtggataacgggaggtgaatttccatgtcaacatagtccagggatcgtgggactttaccagatcggtttgtaataacacctcgaagacgctatccgatccatcagacccagtattcctgtccgggggtacttcccacagtgtgctggaatggttatcacaagaaggctgtgctgtcccctcgcaactccaggatggtgtgtagcccagtgactgtgaggatcgcccctcctgacagaagattttcacgttctgcgataccagagcagataatcagctcaacactgtcgtcaccatcaagtaatgccccagacccatgtgcaaaggagactgtactgagtgccctcaaagagaagaagaagaaaaggacagtggaggaagaagaccaaatattccttgatggccaggaaaataaaagaaggcgccatgatagcagtggcagtggacattcagcatttgagcccctggtggccagtggagtccccgcttcttttgtgcctaagcctgggtctctgaagagaggcctcaattctcagagctcagatgaccacttgaataagagatcccgaagctcttccatgagctccttgacaggcgcttacacaagtggcatccctagctccagccgcaatgccattaccagttcctacagctccactcgaggcatctcacagctctggaagagaaatggccccagttcatcacccttctctagcccagcctcatcccgctcccagacaccggagaggccagcaaagaaaataagagaagaagagctgtgtcatcattccagttcttcaactccattggcagcagacaaggagtcccagggagaaaaggctgcagatacaaccccaaggaagaaacaaaactcgaattctcagtctacacctggcagctctgggcagcgtaagcggaaagttcagctgctgccttctcggcgaggggaacagctgaccttgcctccacctccccagcttggctattcgatcactgccgaggacctagacttagagaagaaggcttcattacagtggttcaaccaggccttggaggacaagagtgatgctgcctcgaactctgtcactgagaccccacctaccactcagccttcatttacctttaccctgcctgctgctgcaactgcctccccacccacctccctcctggccccaagcaccaacccactgttagagagcttgaagaagatgcagactcccccgagcctgccaccctgcccagaatctgctggagcagcaaccactgaggccctctcacctccaaagacacccagcctcctacccccgctgggtttatcacagtcagggccgccagggctgctccccagcccctcctttgactccaaacccccgaccactttgctggggctgatccctgctccatccatggtaccagccactgacaccaaggcacctccaacccttcaagcagagacggctaccaaaccccaagccacatctgccccgtcccccgcccccaagcaaagcttcctgtttggaacacagaacacctcaccttccagccctgccgcccctgctgcatcttcagcatctcccatgttcaagcccattttcacggctccacccaagagtgagaaggaaggccccacaccgcctggcccttcagtcacagccacagcgccctccagctcctccctccccacgaccaccagcaccacagccccgaccttccagcctgtctttagcagcatggggccacctgcatctgtgcccttgcctgctcccttcttcaagcagacaactactcccgccactgctcccaccacaactgccccgctcttcactggcctggccagcgccacctctgctgtggctcccatcacctctgccagtccatccacagactctgcttcgaagcctgcgtttggctttggcataaacagtgtgagcagcagcagtgtgagtaccacgaccagcaccgccactgccgcctcacagcctttcctcttcggggcgccccaggcctctgctgccagcttcaccccggccatgggctccatattccagtttggcaaacctcctgccttgcccacaaccaccacagtcaccaccttcagccagtccctgcccactgccgtgccaacggccaccagcagcagcgctgccgactttagtggttttggcagcaccctcgccacctccgccccggccaccagcagccagcccactctgacgttcagtaacacgagcacccccacgttcaacattccctttggctcaagcgccaagtccccgctcccatcatatccgggagccaacccccagcccgcatttggggccgctgaggggcagccaccgggggccgccaagccagcccttacccccagctttggcagctctttcacttttggaaactctgcagccccggccccggctactgcacccacacctgcacctgcgtccacgatcaagatcgtgcctgcgcacgtgcctacgcccatccagcctacctttggcggtgccacgcactcggcgtttggattgaaagccacggcttccgccttcggcgctcccgccagctcacagcccgcctttggcggctccactgctgtcttctccttcggtgcagccaccagctccggctttggagccaccacccagaccgccagcagcgggagcagcagctcggtgtttggcagcacaacaccatcacccttcacgtttgggggttcggcagcccccgctggcagtgggagctttgggatcaacgtggccaccccaggctccagcgccaccaccggagctttcagctttggagcaggacagagtgggagcacagccacctccacccccttcacagggggcttaggtcagaacgccctgggcaccaccggccagagcacaccgtttgccttcaacgtgggcagcacaactgagagcaaacctgtgtttggaggcaccgccacccccacctttggtcagaacacccctgcgcctggagtgggcacatcgggcagcagcctctcctttggggcatcttcagcacccgcccaaggctttgttggtgttggaccgttcggatcggcggccccttcattttccattggtgcgggatccaagaccccaggggctcgacagcgactgcaggcccgaaggcagcacacccgcaaaaagtagcctttgtcccctgtccctgttccccccaccccttccctaaatctggaccttggcacgtgctagaaagagccttggacccttccagctgcgtaaagcaaacctaccccggatctctggcttcagccgccagggggcagtggcagccctggggccctttcccttctggaggaagcacaagcctcagggaaggggaagcaggatgcggagggccaaagcccgggacctctacttgaacagttccactggggaggctggagaactaaggacctgtacatagtgtccgctgccctgactcccgcttagcgcacccttaggcaggcgccccttccacctttccccgagagccgtcgtcgctggagggggcagggtccagcccgcctggatcggtggtgtgcacctgatgggatttgggaaatgggttatccctaaagctttatcttgcttggcttagctgtgagaagtggttctcttcctctggtcccttctggggactctgtttccccatttcttgctgctgtgtccctcaccggttccttgcaggattccctcctttttaaatgcccttgaatctagctttgccttggagaccccagtgggtgctgctcctgccgttttcttcctgccaagcctgaatcaatgtttcatctccaaccctctgccagtttggcccctcagagcttggtggctcaagactgttagcctggcagagccaggggtgaagggagaagctcttggagcaggcaggatgcccaccgctgcttcagctgcctcctcgcccagctaccctttggccccattgggccctcgtctgcctctccaggattgtatgtttcaagccttgtcctgtgttcctttgtctgacgctctgtgtattgctctttgaatcgagtttggaggaagagttgagttgtatgagtggcggcatgttggtagtgccggacttcctgtttcaagttttctggggcctcgctaattgaatgtggaaagtagcaccacttgacggctacaagtgccgactcctgaattttcccatggtgttctgacttcaagggctggcagccagggagaatgggcccaggggaagcaaagacctcttccctctgcggtttctgtcccacttaactgacctcactggaggctacgtcacccaaagtagatgttagaaaacctaaattaatgaaccatatttttaaaatcctatttttcccaaacagggccctctgcagcccatcctttccttccgtccttctgaaaccacataccccaggcccaagcgccttgctgtcacgcccaacctctttgggagaagtatgaatgcgtgtgtctaaatt

SEQ ID NO: 4409 - DNA, 1322 bp, Homo sapiens
agagcactcccaggagatggaaagcctgagggaggctctgctgtcctctcgatcccaccttcaagagctggaagaggagctggagcaccagaaggtggaaaggcagcagcttttggaagacttgagggagaagcagcaagaggtcttgcatttcagggaggaacgcctttccctccaggaaaacgactccagactgcagcacaagctggttctcctgcagcaacagtgtgaagagaaacagcagctctttgagtccctccagtcagagttacaaatctatgaggcactttatggcaattccaagaaggggctgaaagcttacagcctggatgtctgtcaccaaatccctttgagcagtgacttgagccacctggtggcagaggtacgaggtctgagagggcagctggagaacagcattcaggggaacaattgtctgtgactgcagctgcaacagcagctggatagcctgctggcaaagccagcctcagcccctcctctgttaaccagaacttcccagccagcgctgaccctggaaacaagcagctgctcctccaagattcagctgtgtcccctccagtccgggatgttggtatgaattccccagctctggtcctccccagctctgcttcctctactcctggctcagaaacggccataatcaacagaacacatggcttgggtttggatacttctccagtaatgaaggcccctcccaagctggagggtgatgctactgatggctcctttgccaataagcatggccgccatgtcattggccacattgatgactacagtgccctaagacagcagattgcggagggcaagctgctggtcaaaaagatagtgtctcttgtgagatcagcgtgcagcttccctggccttgaagcccaaggcacaggggtgctaggcagcaaaggcattcatgagcttcggagcagcaccagtgccctgcaccatgccctagaggagtcggcttccctcctcaccatgttctggagagtggccctgccaagcacccacatccctgtgctgcctggcaaagtgggagaatcaacagaaagggaacttctggaactgagaaccaaagtatccaaacaggagcggctacttcagagcacagctgagcatctgaagaacgccaaccagcagaaggagagcatggagcagttcatcgtcagccagctaaccagaacacatgatgttttaaagaaggcgaggactaacttataggtgaaatccctaagggctctgctgtgtactccagccttgtgacccttgctttccaggaaccatgcaagaagcgcagccaccagaagtcctta

SEQ ID NO: 4410 - DNA, 8325 bp, Homo sapiens
gagctcggctcttaagatacgagtctgccaatgctcccggccaaataaaaaacctcttccttctttaatctggtgtctgaggagttttgtctgtgactcgtcctgctacatttcttggttccctggccaggaagcaaggtaattgaaggacagtcgaggcagccccttaggtggcttaggcctgccctgtggagcatccctgcaggggactctggccagcttgagtgacgcggatcctgagagcgctcccaggtaggcaattaccccggtggaaagcctcgtcagagcagtgcgtggcaggcccctgtggaggatcaatgcagtggctgaacactgggaaggaacaggcacttggagtccagacatttgaaacttggtaagactggtcttcggaacttgcccactccatttgagtggaagcgtggcctgatcaaccacggcatgcctgtactggcactttggtttttgtttttgacttgacttgaattgcttgatactttggttttggtttgacctggcttggatttctggatactctgattttggttttgattctggtttggtgaaaactgaaaaagtgtgtgtgtgcactttttacccattctttgttttgtggtgtgcatgtggtgtgagcttggtgttttgtcttgaggaaacatggatcagacacaaaataagcctactcctctaggaactatgttgaaaaattttaagaagggatttaatggagactatggggttactatgacaccagggaaacttagaactttgtgtgaaatagattggccaacattagaagtgggttggccatcagaaggaagcctggacaggtcccttgtttctaaggtatggcacaaggtaactagtaagtcaggacactcagaccagtttccatacatagacacttggttacagctggtgctagaccccccacagtggctaagagggcaggcagcagcagtgctagtagcaaagggacagatagtcaaggaaggattctgctccacccgctgagggaaatcaactcctgaagttctgttcgaccaaacatcagaagatccattgcaggagatggcaccagtgatcccagtgttgccctccccttatcagggagagaggctccccacttttgagtccacagtgcttgcgcctctgccagacaaatgtatccctaggccactcagagtagacaagagaggaggtgaagcctcgggagaaacccctcccttggcagctcatttaagacccaaaacagggatacaaatgcccctgagagagcagcagtatactggaatagatgaggatgggcacatggtggagagtcgtgtttttgtgtaccagcccttcacctctgccgaccttctcaactggaaaaacaataccccgtcctatactgaaaagccgcaagctctaattgatttgctccaaactattatccagacccataaccccacttgggctgattgccaccagttgctcatgttcctctttaaaacagatgaaaggtgaagggtgcttcaagcagcaactaagtggctagaggaacatgcactggctgattaccaaaacccccaagagtatgtaaggacacagttaccaggaaccgacccccagtgggacccaaattaaagagaggatatgcaaaggctaaaccgatacaggaaagctctcttagaaggattaaagaggagagcccagaaggccacaaacattaacaaggtctctgaggtcattcagggaaaagaagaaagtccagcaaaattctacgagagactgtgtgaggcttattgtatgtatactccctttgatcccgatagccctgaaaatcaacgcatgattaacatggctttagttagtcaaagcacagaagacattagaagaaaactgcagaaaaaggctgggtttgcagggatgaacacatcacagttattagaaatagccaaccaggtgtttgtaaacagggatgcagcaagccgtaaggaaaaccacatagagaatgaacgtcaggcccggcgaaacgccgacctgttagctgcagcaattagaggggtccccccaaagaggcaagggaaaaggggggccctgggaaagaaactcagcctggctgtcagagcttgcagtgtaatcagtgtgcttatcgtaaagaaataggatattggaagaacaaatgccctcagctaaaaggaaaacaaggtgactcggagcaggaggctccagacaaggaggaaggggccctgctcaacctggcagaagggttattggactgagggggactgggctcaaggacctccaaagagcctatggtcaggatgacagttgggggtaaagacattgattttcttgtagataccagtgctgaacattcggtagtaactgcctcagtcgcccccttatccaaaaagactattgacatcatcggagccatgggagtttcagcaaaacaagctttctgcttgccccagacttgtactataggaggacataaagtgattcatcagtttttgtacatgcctgattgtcccttgcccttgttgggaagagacttgcttagcaaactgagagccactatctcttttacagagcacggctctttgctgctaaagttacccggaacaggagtcattatgacccttatgctcccccgagaggaggaatggagacttttcttaactgagccgggccaagagataagaccagctctggctaagcggtggccaagagtgtgggcggaagacaaccctccagggttggcagtcaaccaagcccccgtgcttatagaagttaagcctggggtccagccggttaggcaaaaacagtacccggtcctcagagaagctcttgaaggtatccaggtccatctcaagtgcctaagaacctttagaattatagttccttgtcagtctccatggaacactcccctcctgcctgttcccaagcctgggaccaaggactacaggccggtacaggatttgcgcttggttaatcaggctacagtgactttacatccaacagtacctaacctgtacacattgctggggttgctgccagctgaggacagctggttcacctgcttggacctgaaagatgctttctttagcatcagattagcccctgagagacagaagctgtttgcctttcagtgggaagatccagagtcaggtgtcactactcaatacacttggacccagcttccccaaaggttcaagaactcccccaccatctttggggaggcgttggctcgagacctccagaagtttcccaccagagacctaggctgcgtgttgctccagtacgttgatgaccttttgctgggacaccccacggcagtcgggtgcgccaagggaacagatgctctactccggcacctggaggactgtgggtataaggtgtccaagaaaaaaagctcagatctgccgacagcaggtatgttacttgggatttactatccaacagggggagcacagcctgggatcagaaagaaagcaggtcatttgtaatctaccggagcctaagaccagaaggcaggtgagagaattcttaggggctgtgggtttttgcagactgtggatcccaaactttgcagtattagctaagcctttgtatgaggtcacaaaggcgggggaccaggaaccttttgaatggggatcccagcaacagcaagcctttcatgagttaaaggaaagacttatgtcagtcccagccctggggctacctgatctgacaaagccttttacattgtatgtgtcagagagtgaaaagatggcagttggagttttaacccaaactgtggggccctggctgaggccggtggcctacctctctaaacaactagacggggtttctaaaggatggcccccgtgtttgagggccttggcagcaactgccctgctagtacaagaagcagataagctgattcttgggcaaaacctgaacataaaggacccccatgctgtggtgactttaatgaatactagaggacatcattggctaacgaatgctagacttactaagtaccaaagtttgctttgtgaaaatccccatataaccattgaagtttgtaacaccctgaaccccgctaccttgctcccagtattagagatccctgtcgagcatgactgtgtagaagtgttggactcagtttactctgggcatcagtagactgggaactatacgtggatgggagcagctttgtcaacccacaagaagagagatgtgcagggtatgcggtggtaactctggacactgttgctgaagccagatcgtttccccagggcacttcaactcagaaagctgaactcattgctttaattcgggccttagaactcagtgaaggtaagactgtaaacatttacactgactcttgatatgtctttttaacccttcaagtgcatggagcattatgtaaagaaaagggcctattgaactctgggggaaaagacataaaatatcaacaagaaatcttgcaattattagaagcagtatggaaaccccacaaggtggctgttatacattgcggaggacaccagtgagcttccaccttggtgggtttggggaattcctgcactgacttagaggctcaaaaagcagcatctgcccccttccgggcatcagtgacagcccccctgctccctcaagcacctgatcttgtacctacttattctaaagaagaaaaggactttctccaggcagagggaggacaagtgatggaggaaggatggatttggttaccagatgggagagtagctgtgccacagctgctaggagctgcagttgtactggctgtgcataaaaccacccatctaggtcaggaatcacttgaaaagttgttaggctggtatttctacatctcgcatttgtcagcccttgccaaaacagtgacgcagcggtgtgttacctgccgacagcataatgcgagacaaggtccagctgttccccctggcatacaagcttatggagcagccccctttgaagatctccaggtggacttcacagagatgccaaagtgtggaggtaacaagtatttactagttcttgtgtgtacctactctgggcaggtggaggcttatccaacacgaactgagaaagctcatgaagtaactcgtgtgcttcttcgagatcttattcctagatttggactgcccttacggattggctcagataatgggctggtgtttgtggctgacttggtacagaagacggcaaaggtattggggatcacatggaaactgcatgctgcctaccagcctcagagttccggaaaggtagagcggatgaatcggactatcaaaaatagtttagggaaagtatgtcaagaaacaggattaaaatggatacaggctcttcctatggtattatttaaaattagatgtaccccttctaaaagaacaggatattccccttatgaaatattatatcataggccccctcctatattgcggggacttccaggcactccccgagagttaggtgaaattgagttacagcgatagctacaggcttcaggaaaaattacacaaacaatctcggcctgggtaaatgagagatgccctgttaacttattctccccagttcaccctttctccccaggtgatctagtgtggatcaaggactgaaacgtagcctgtttgtgtccacggtggaaaggaccccagactgtcatcctgagcactcccaccgctgtgaaggtagagggaatcccaacctggatccaccacagccgtgtaaaacctgcagtgcctgaaacctgggaggcaagaccaagcccagaaaacccctgcagagtgaccccgaagaagacaacaagccctgctccagtcacacccggaagctgactggtccacgcacggccgaagcatgcagaagctcatcatgggattcatttttcttaaattttggacttatacagtaagggcttcaactgatcttactcaaactggggactgttcccagtgtattcatcaggtcaccgaggtaggacagcaaattaaaacaatgtttctgttctatagttattataaatgtataggaacattaaaagaaacttgtttgtataatgctactcagtacaatgtatgtagcccaggaaatgaccgacctgatgtgtgttataacccatctgagcctcctgcaaccaccatttttgaaataagaataagaactggccttttcctaggtgatacaagtaaaataataactagaacagaagaaaaagaaatccccaaacaaataactttaagatttgatgcttgtgcagccattaatagtaaaaagctaggaataggatgtgattctcttaactgggaaaggagctacagaataaaaaataaatatgtttgtcatgagtcaggggtttgtgaaaattgtgcctattggccatgtgttatttgggctacttggaaaaagaacaaaaaggacccggtttatcttcagaagggggaagccaacccctcctgtgctgctggtcactgtaacccactagaactaataattaccaatcccctagatccccattggaaaaagggagaacgtgtaaccctggggattgatgggacagggttaaacccccaagttgccattttaattagaggggaggtccacaagtgctctcccaaaccagtatttcaaaccttttataaggagctgaatctgccagcaccagaatttccaaaaaagacaaaaaatttgtttctccaattagcagaaaatgtagctcattcccttaatgttacttcttgttatgtatgcgggggaaccactatcggagaccgatggccttgggaagcccgagagttggtgcctactgatccagctcctgatataattccagttcagaaaacccaagctagcaacttctgggtcctaaaaacctcaattattggacaatactgtatagctagagaagggaaagactttatcatccctgtaggaaagcttaattgtataggacagaagttgtataacagtacaacaaagacaattacttggtggggcataaaccacactgaaaagaatccatttagtaaattttcaaaattaaaaactgcttgggctcatccagaatctcatcaggactggatggctcccgctggactatactggatatgtgggcacagagcctacattcggttacctaataaataggcaggcagttgtgttattggcactattaagtcgtcctttttcttattacccataaaaacaggtgagaccctaggtttccctgtctatgcctcccgagaaaagagaggcatagttataggaaactggaaagataatgagtggcgccctgaaaggatcatacagtattatgggcctgccacatgggcacaagacggctcatggggataccgaacccccatttacatgctcaatcggatcatacggttgcaggccatcttagaaataattactaatgaaactggcagagctttgactgttttagctcggcaggaaacccaaacgaggaatgctatctatcagaatagactggccttggactacttgctagcagctgaaggaggagtttgtggaaaatttaacttaaccaattactgcctacaaatagatgatcaaggacaggtggttgaaaacatagtcagggacatgacaaaggtggcacatgtgcctgtacaggtttggcacaagtttaatcctgagtctttatttggaaaatggtttccagctataggaggatttaaaaccctcattgtaggtgtattgctagtgataggaacttgcttgctgctcccctgtgtattacccttgctttttcaaatgataaaatattttgttgttactttagttcatcagaaaacttcagcacatgtgtattatacaaatcactatcgctctatctcacaaagagactaaaaaagtgaggacgagagtaagaactcccactaaaagtgaaaattctcaaagggggggaaatatggtatgaggtcgccacttctcctgttgtccttctcagtttctccccaacctccccttttccctagtttataagacaggagaaaagggagaaagcaaaaagttgaaaagaaacagaagtaagataaatagctagacgaccttggcaccaccacctggccctggtggctaaaataataataatattattaacccctgaccaaaactattggtgttatctgtaaattccagacactgtatgagaaaatactgtaaaactttttgttctgttagctgatgtatgtagcccccagtcatgtttctcacgcttacttgatctattatgactttttcatgtagaccccttagagttgtaagcccttaaaagggctaagaatttctttttcggggagctcg

SEQ ID NO: 4411 - DNA, 3432 bp, Homo sapiens
cccgccagcaggagccgcgcggtagatgcggtgcttttaggagctccgtccgacagaacggttgggccttgccggctgtcggtatgtcgcgacagagcaccctgtacagcttcttccccaagtctccggcgctgagtgatgccaacaaggcctcggccagggcctcacgcgaaggcggccgtgccgccgctgcccccggggcctctccttccccaggcggggatgcggcctggagcgaggctgggcctgggcccaggcccttggcgcgctccgcgtcaccgcccaaggcgaagaacctcaacggagggctgcggagatcggtagcgcctgctgcccccaccagttgtgacttctcaccaggagatttggtttgggccaagatggagggttacccctggtggccttgtctggtttacaaccacccctttgatggaacattcatccgcgagaaagggaaatcagtccgtgttcatgtacagttttttgatgacagcccaacaaggggctgggttagcaaaaggcttttaaagccatatacaggttcaaaatcaaaggaagcccagaagggaggtcatttttacagtgcaaagcctgaaatactgagagcaatgcaacgtgcagatgaagccttaaataaagacaagattaagaggcttgaattggcagtttgtgatgagccctcagagccagaagaggaagaagagatggaggtaggcacaacttacgtaacagataagagtgaagaagataatgaaattgagagtgaagaggaagtacagcctaagacacaaggatctaggcgaagtagccgccaaataaaaaaacgaagggtcatatcagattctgagagtgacattggtggctctgatgtggaatttaagccagacactaaggaggaaggaagcagtgatgaaataagcagtggagtgggggatagtgagagtgaaggcctgaacagccctgtcaaagttgctcgaaagcggaagagaatggtgactggaaatggctctcttaaaaggaaaagctctaggaaggaaacgccctcagccaccaaacaagcaactagcatttcatcagaaaccaagaatactttgagagctttctctgcccctcaaaattctgaatcccaagcccacgttagtggaggtggtgatgacagtagtcgccctactgtttggtatcatgaaactttagaatggcttaaggaggaaaagagaagagatgagcacaggaggaggcctgatcaccccgattttgatgcatctacactctatgtgcctgaggatttcctcaattcttgtactcctgggatgaggaagtggtggcagattaagtctcagaactttgatcttgtcatctgttacaaggtggggaaattttatgagctgtaccacatggatgctcttattggagtcagtgaactggggctggtattcatgaaaggcaactgggcccattctggctttcctgaaattgcatttggccgttattcagattccctggtgcagaagggctataaagtagcacgagtggaacagactgagactccagaaatgatggaggcacgatgtagaaagatggcacatatatccaagtatgatagagtggtgaggagggagatctgtaggatcattaccaagggtacacagacttacagtgtgctggaaggtgatccctctgagaactacagtaagtatcttcttagcctcaaagaaaaagaggaagattcttctggccatactcgtgcatatggtgtgtgctttgttgatacttcactgggaaagtttttcataggtcagttttcagatgatcgccattgttcgagatttaggactctagtggcacactatcccccagtacaagttttatttgaaaaaggaaatctctcaaaggaaactaaaacaattctaaagagttcattgtcctgttctcttcaggaaggtctgatacccggctcccagttttgggatgcatccaaaactttgagaactctccttgaggaagaatattttagggaaaagctaagtgatggcattggggtgatgttaccccaggtgcttaaaggtatgacttcagagtctgattccattgggttgacaccaggagagaaaagtgaattggccctctctgctctaggtggttgtgtcttctacctcaaaaaatgccttattgatcaggagcttttatcaatggctaattttgaagaatatattcccttggattctgacacagtcagcactacaagatctggtgctatcttcaccaaagcctatcaacgaatggtgctagatgcagtgacattaaacaacttggagatttttctgaatggaacaaatggttctactgaaggaaccctactagagagggttgatacttgccatactccttttggtaagcggctcctaaagcaatggctttgtgccccactctgtaaccattatgctattaatgatcgtctagatgccatagaagacctcatggttgtgcctgacaaaatctccgaagttgtagagcttctaaagaagcttccagatcttgagaggctactcagtaaaattcataatgttgggtctcccctgaagagtcagaaccacccagacagcagggctataatgtatgaagaaactacatacagcaagaagaagattattgattttctttctgctctggaaggattcaaagtaatgtgtaaaattatagggatcatggaagaagttgctgatggttttaagtctaaaatccttaagcaggtcatctctctgcagacaaaaaatcctgaaggtcgttttcctgatttgactgtagaattgaaccgatgggatacagcctttgaccatgaaaaggctcgaaagactggacttattactcccaaagcaggctttgactctgattatgaccaagctcttgctgacataagagaaaatgaacagagcctcctggaatacctagagaaacagcgcaacagaattggctgtaggaccatagtctattgggggattggtaggaaccgttaccagctggaaattcctgagaatttcaccactcgcaatttgccagaagaatacgagttgaaatctaccaagaagggctgtaaacgatactggaccaaaactattgaaaagaagttggctaatctcataaatgctgaagaacggagggatgtatcattgaaggactgcatgcggcgactgttctataactttgataaaaattacaaggactggcagtctgctgtagagtgtatcgcagtgttgggtaagactttgaacaagcttgttctcaggctttgataagtagtgctgtttgccagctgtatattatccctaaaaataagtaataaggtatatatggtacatattttgacatgcatatacatatttgcatcctgactaggctgcccacagcaatttaagttacttgaaactcgctttt

SEQ ID NO: 4412 - DNA, 1244 bp, Homo sapiens
gcttctgtctggcggcggcagcatggcggcgggggcggctgaggcagctgtagcggccgtggaggaggtcggctcagccgggcagtttgaggagctgctgcgcctcaaagccaagtccctccttgtggtccatttctgggcaccatgggctccacagtgtgcacagatgaacgaagttatggcagagttagctaaagaactccctcaagtttcatttgtgaagttggaagctgaaggtgttcctgaagtatctgaaaaatatgaaattagctctgttcccacttttctgtttttcaagaattctcagaaaatcgaccgattagatggtgcacatgccccagagttgaccaaaaaagttcagcgacatgcatctagtggctccttcctacccagcgctaatgaacatcttaaagaagatctcaaccttcgcttgaagaaattgactcatgctgccccctgcatgctgtttatgaaaggaactcctcaagaaccacgctgtggtttcagcaagcagatggtggaaattcttcacaaacataatattcagtttagcagttttgatatcttctcagatgaagaggttcgacagggactcaaagcctattccagttggcctacctatcctcagctctatgtttctggagagctcataggaggacttgatataattaaggagctagaagcatctgaagaactagatacaatttgtcccaaagctcccaaattagaggaaaggctcaaagtgctgacaaataaagcttctgtgatgctctttatgaaaggaaacaaacaggaagcaaaatgtggattcagcaaacaaattctggaaatactaaatagtactggtgttgaatatgaaacattcgatatattggaggatgaagaagttcggcaaggattaaaagcttactcaaattggccaacataccctcagctgtatgtgaaaggggagctggtgggaggattggatattgtgaaggaactgaaagaaaatggtgaattgctgcctatactgagaggagaaaattaataaatcttaaacttggtgcccaactattgtaagaaatatttaattacattgggagcagttcatgatttagtcctcagaaatggactaggaatagaaaattcctgctttctcagttacatgttttgtgtatttcacaatgtcgtgctaaataaatgtatgttacatttttttcccaccaaaaatagaatgcaataaacatcttcaaattattaac

SEQ ID NO: 4413 - DNA, 935 bp, Homo sapiens
tcgccccttctcggccgccgtagtttttttttttttttaaagaaaaaacggttacccagcaactagaaaaacaaccggaaccggcggcaccagctcggagagaaaggaggttccataggcagttcttaccaagaagatgtcgattccattctccaacacccactaccgaattccacaaggatttgggaatcttcttgaagggctgacacgcgagattctgagagagcaaccggacaatataccagcttttgcagcagcctattttgagagccttctagagaaaagagagaaaaccaactttgatccagcagaatgggggagtaaggtagaagaccgcttctataacaatcatgcattcgaggagcaagaaccacctgagaaaagtgatcctaaacaagaagagtctcagatatctgggaaggaggaagagacatcagtcaccatcttagactcttctgaggaagataaggaaaaagaagaggttgctgctgtcaaaatccaagctgccttccggggacacatagccagagaggaggcaaagaaaatgaaaacaaatagtcttcaaaatgaggaaaaagaggaaaacaagtgaggacactggttttacctccaggaaacatgaaaaataatccaaatccatcaaccttcttattaatgtcatttcttcctgaggaaggaagatttgatgttgtgaaataacattcgttactgttgtgaaaatctgtcatgagcatttgtttaataagcataccattgaaacatgccacttgaagatttctctgagatcatgagtttgtttacacttgtctcaagcctatctatagagacccttggatttagaattatagaactaaagtatctgagattacagagatctcagaggttatgtgttctaactattatcaaatgaataaatcctctctatcacatccccc

SEQ ID NO: 4414 - DNA, 2145 bp, Homo sapiens
ctcttacaacattggctgccggcgtgactttgaccgcttcccggtgcgttaccggcagctgaacccacccggcgccacgggactttgacgcgtgctctgcgcttgccatgagactcctgggagctgcagccgtcgcggctctggggcgcggaagggcccccgcctccctaggctggcagaggaagcaggttaattggaaggcctgccgatggtcttcatcaggggtgattcctaatgaaaaaatacgaaatattggaatctcagctcacattgattctgggaaaactacattaacagaacgagtcctttactacactggcagaattgcaaagatgcatgaggtgaaaggtaaagatggagttggtgctgtcatggattccatggaactagagagacaaagaggaatcactattcagtcagcagccacttacaccatgtggaaagatgtcaatattaacattatagatactcctgggcatgtggacttcacaatagaagtggaaagggccctgagagtgttggatggtgcagtccttgttctctgtgctgttggaggggtacagtgccagaccatgactgtcaatcgtcagatgaagcgctacaacgttccgtttctaacttttattaacaaattggaccgaatgggctccaacccagccagggccctgcagcaaatgaggtctaaactaaatcataatgcagcgtttatgcagatacccatgggtttggagggtaattttaaaggtattgtagatcttattgaggaacgagccatctattttgatggagactttggtcagattgttcgatatggtgagattccagctgaattaagggcggcggccactgaccaccggcaggagctaattgaatgtgttgccaattcagatgaacagcttggtgagatgtttctggaagaaaaaatcccctcgatttctgatttaaagctagcaattcgaagagctactctgaaaagatcatttactcctgtatttttgggaagcgccttgaagaacaaaggagttcagcctcttttagatgctgttttagaatacctcccaaatccatctgaagtccagaactatgctattctcaataaagaggatgactcaaaagagaaaaccaaaatcctaatgaactccagtagagacaattcccacccatttgtaggcctggcttttaaactggaggtaggtcgatttggacaattaacttatgttcgcagttatcagggagagctaaagaagggtgacaccatctataacacaaggacaagaaagaaagtacggttgcaacggctggctcgcatgcatgccgacatgatggaggatgttgaggaagtatatgccggagacatctgtgcattgtttggcattgactgtgctagtggagacacattcacagacaaagccaacagcggcctttctatggagtcaattcatgttcctgatcctgtcatttcaatagcaatgaagccttctaacaagaacgatctggaaaaattttcaaaaggtattggcaggtttacaagagaagatcccacatttaaagtatactttgacactgagaacaaagagacagttatatctggaatgggagaattacacctggaaatctatgctcagaggctggaaagagagtatggctgtccttgtatcacaggaaagccaaaagttgcctttcgagagaccattactgcccctgtcccgtttgactttacacataaaaaacaatcaggtggtgcaggccagtatggaaaagtaataggtgtcctggagcctctggacccagaggactacactaaattggaattttcagatgaaacattcggatcaaatattccaaagcagtttgtgcctgctgtagaaaaggtaaatttttaaaaaagtgtttttgcatttttacttactaaaaacagtttatcaggtattaaatcatactttgtcttccatcatgttgtctatcacagtttgttttagttacagtcctgtttctctgattgttaagctttccatctgatttagaatctctaattcattaagcagaagagctgtaaatccatgctgtgacaatgatgggaaattattatgtttctgaatcatagttatatttttcttaataaattgaaactactgtattgattgt

SEQ ID NO: 4415 - DNA, 4655 bp, Homo sapiens
tttagacagctgtggaggccacaaaagagctccctgttgcttctcaggccctgccctgtggtgggtgtggagtctgtgtaggtctggtggggagacgggggtgttctggtcattcctgcccaataggcaacaccaggagggtggaagtggaccggccacatcattaaccctgtgcagcctgggcaggtggttttagggaaaccaagctgagggggttggggtgctgagcttgctggcaggaggaaggggtgctttgggtcttagaccccagcctgggggtgacagattctggccctgccttggcatcaggtatcagaagcatgtgcacacgtatcgcattctgcctgatggagaagatttcttggctgtgcagacctcgcagggtgtgcctgtgcgccgcttccagaccctgggtgagctcatcggcctgtacgcccagcccaaccagggccttgtgtgcgccctgcttcttcctgtagagggtgagcgagagccggacccaccggatgaccgggatgcctcagatggggaggatgagaagcccccgctgcccccgcgctctggctccaccagcatttctgcccccactgggcccagcagtcccctgccagctcctgagactcccacagctccagctgctgagagtgctcccaatgggctgagcaccgtctcgcacgactacctgaaaggcagctatgggctggacctggaagctgtgaggggtggagccagccacctgccccacctcacccgtaccctcgctacctcatgccggaggctgcacagtgaggtggacaaggtcctgtcaggcctggagatcctgtccaaggtgtttgaccagcagagctcgcccatggtgacccgccttttgcagcagcagaacctgccacagacaggggagcaggaactagagagcctggtgctgaagctgtcagtgctaaaggacttcctgtcaggcatccagaagaaggccctgaaggccctacaggacatgagctccacagcacccccagctccgcagccatccacacgtaaggccaagaccatccccgtgcaggcctttgaggtgaagctagatgtgaccctgggtgacctgaccaagattgggaagtcacagaagttcacgctgagcgtggatgtggagggtgggcggctggtgctgctgcggagacagcgggactcccaggaggactggaccaccttcacgcacgaccgcatccgccagctcattaagtcccagcgtgtccagaacaagctgggtgttgtgtttgagaaggagaaggaccggactcagcgcaaggacttcatctttgtcagtgcccggaagcgggaggccttctgccagctgttgcagctcatgaagaacaagcactccaagcaggacgagcccgacatgatctcagtcttcataggcacctggaacatgggaagtgtaccacctccaaaaaacgtgacatcctggttcacatcgaagggtctggggaagaccctggacgaggtcacagtgaccataccccatgacatctatgtctttgggacccaggagaactcagtgggcgaccgcgagtggctggacctactgcgcgggggcctcaaggagcttacggatctggattaccgcccgattgccatgcaatcactgtggaatatcaaggtggcagtgctggtcaagccagagcacgagaaccgtatcagccatgtcagtacgtccagtgtgaagactggcatcgccaacaccctggggaacaagggggctgtgggcgtctccttcatgtttaatggcacctcatttggctttgtgaattgtcacctcacctcgggaaatgagaagacggctcggaggaaccaaaactacttggacatcctgcggctgctctcgctgggcgaccggcagctcaatgcctttgacatctctctgcgtttcacacacctcttctggtttggggacctcaactaccgcctggacatggatatccaggagatcctgaactacatcagcaggaaagagtttgagcccctcctcagggtggaccagctcaacctggagcgggagaagcacaaggtcttccttcgattcagtgaggaggagatctccttcccacccacctaccgctatgagcggggttcccgggacacatatgcctggcacaagcagaagccaactggggtccggaccaatgtgccctcatggtgtgaccggattctgtggaaatcctaccctgaaactcacatcatctgcaattcttatggttgcactgatgacatcgtcaccagcgaccattcccccgtgtttgggacatttgaggttggagttacctcccagttcatctccaagaaagggctctcaaagacttcagaccaggcctacattgagtttgagagcatcgaggccattgtgaagacagccagccgcaccaagttcttcatcgagttctactctacctgcctggaggaatacaagaagagctttgagaatgatgcccagagcagtgacaacatcaacttcctcaaagtgcagtggtcttcacgccagctgcccacgctcaaaccaattctggctgatatcgagtacctgcaggaccagcacctcctgctcacagtcaagtccatggatggctatgaatcctatggggagtgtgtggttgcactcaaatccatgatcggcagcacggcccaacagttcctgaccttcctatcccaccgtggcgaggagacaggcaatatcagaggctccatgaaggtgcgggtgcccacggagcgcctgggcacccgtgagcggctctacggtggatcagcattgataaggatgaggcaggagcaaagagcaaagccccctctgtgtcccgagggagccaggagcccaggtcagggagccgcaagccagccttcacagaggcctcctgcccgctctccaggttatttgaagaaccagagaaaccgccaccaacggggaggcccccagccccaccccgagcagctccccgggaggagcccttgacccccaggttgaagccagagggagctcctgaaccagaaggggtggcggcccccccacccaagaacagcttcaataaccctgcctactacgtccttgaaggggtcccgcaccagctgctgcccccggagccaccctcgcctgccagggcccctgtcccatctgccaccaagaacaaagtggccattacagtgcctgctccacagcttgggcaccaccggcaccctcgtgtgggagaggggagttcttcagatgaggagtctggaggcacactgccccctccagactttccacctccaccactgccggactcagccatcttcctgccccccagcctggatcctttaccagggccagtggtccggggccgtggtggggctgaggcccgtggcccaccacctcccaaggcccatccaaggcctccactgcccccaggcccctcaccagccagcactttcctgggggaagtggccagtggggatgaccggtcctgctcggtgctgcagatggccaagacgctgagcgaggtggactatgcccctgctgggcctgcacgctcagcgctcctcccaggccccctggagctgcagcccccccggggactgccctcggactatggccggcccctcagcttccctccaccccgcatccgggagagcatccaggaagacctggcagaggaggctccgtgcctgcagggcgggcgggccagcgggctgggcgaggcaggcatgagtgcctggctgcgggccatcggcttggagcgctatgaggagggcctggtgcataatggctgggacgacctggagtttctcagtgacatcaccgaggaggacttggaggaggctggggtgcaggacccggctcacaagcgcctccttctggacaccctgcagctcagcaagtgatagcggaggcaccacgaagctgtgaactcagagcccctccctgctaccaaggcccagctatggccccagggttgaaaagttatgagggtcagggcagtatctctctgcctatttattggggtgcctatttattggggatctgcattccccgctgcccaatcatttgcaatgccctaattagggcatcctgcccctcgccttttaggctcaggacggaaggtcagttgccatggttaccgaggaccctggttactctggtgctgtcctgttttactggaccccgcctcccagccccaggggtgcctgtgggggtccatttgggtacgtctgggcccccactttcaccagtttctgcggccttccaccgggcctgaaccacagcggaggagctccgctaagacctccccacccccgctgggggtgggggcgggtgtccgtccggaaatgaaggaatagcccgaggaccgggctggggtttatttaaactgttctgtgtgggtctggggagggagagcaccttaatattattggggttggttggggtggggcaggatctcagccataaagtgccagtttgcttagttctcactgtctcctggtctgtgctgccctgctctggggatgcacggcggcagggtgggggagggaggttcctcgcaggtctcagcccgggacagggtcttgcaagcagcctcctgggcagtcgtaagggttgcggcgtgatgtcttcaataaattaagttttatttgga

SEQ ID NO: 4416 - DNA, 1771 bp, Homo sapiens
cccagtctctgggcccggttgtctgttggggtcactgaaccccgagcatgcctgacgtctgggaccccgggtccccgggcacaactgactgcggtgaccccagataccaggacccgggaggcctcagagaactctggaacccgttcgcgcgcgtggctggcggtggcgctgggcgctgggggggcagtgctgttgttgttgtggggcgggggtcggggtcctccggccgtcctcgccgccgtccctagcccgccgcccgcttctccccggagtcagtacaacttcatcgcagatgtggtggagaagacagcacctgccgtggtctatatcgagatcctggaccggcaccctttcttgggccgcgaggtccctatctcgaacggctcaggattcgtggtggctgccgatgggctcattgtcaccaacgcccatgtggtggctgatcggcgcagagtccgtgtgagactgctaagcggcgacacgtatgaggccgtggtcacagctgtggatcccgtggcagacatcgcaacgctgaggattcagactaaggagcctctccccacgctgcctctgggacgctcagctgatgtccggcaaggggagtttgttgttgccatgggaagtccctttgcactgcagaacacgatcacatccggcattgttagctctgctcagcgtccagccagagacctgggactcccccaaaccaatgtggaatacattcaaactgatgcagctattgattttggaaactctggaggtcccctggttaacctggtgagtgagacatccttccttccaagaatccctgccccaggtcagtgtgggaagggtaggtttcccctaattcaaggatgtttggtcaagtttctgagcagttctttgttggctatctctcaatatccaaccagatctccccaacacttgctggtacttttgttcgggtgcccccatcccctactatttgtttaggctagggaactgggggctgtatccctgcaggatggggaggtgattggagtgaacaccatgaaggtcacagctggaatctcctttgccatcccttctgatcgtcttcgagagtttctgcatcgtggggaaaagaagaattcctcctccggaatcagtgggtcccagcggcgctacattggggtgatgatgctgaccctgagtcccagcatccttgctgaactacagcttcgagaaccaagctttcccgatgttcagcatggtgtactcatccataaagtcatcctgggctcccctgcacaccgggctggtctgcggcctggtgatgtgattttggccattggggagcagatggtacaaaatgctgaagatgtttatgaagctgttcgaacccaatcccagttggcagtgcagatccggcggggacgagaaacactgaccttatatgtgacccctgaggtcacagaatgaatagatcaccaagagtatgaggctcctgctctgatttcctccttgcctttctggctgaggttctgagggcaccgagacagagggttaaatgaaccagtgggggcaggtccctccaaccaccagcactgactcctgggctctgaagaatcacagaaacactttttatataaaataaaattatacctagcaacatattatagtaaaaaatgaggtgggagggctggatcttttcccccaccaaaaggctagaggtaaagctgtatccccctaaacttaggggagatactggagctgaccatcctgacctcctattaaagaaaatgagctgctg

SEQ ID NO: 4417 - DNA, 1460 bp, Homo sapiens
cttcgggcatggcgggctttggggggcattcgctgggggaggagaccccgtttgacccctgacctccgggccctgctgacgtcaggaacttctgacccccgggcccgagtgacttatgggacccccagtctctgggcccggttgtctgttggggtcactgaaccccgagcatgcctgacgtctgggaccccgggtccccgggcacaactgactgcggtgaccccagataccaggacccgggaggcctcagagaactctggaacccgttcgcgcgcgtggctggcggtggcgctgggcgctgggggggcagtgctgttgttgttgtggggcgggggtcggggtcctccggccgtcctcgccgccgtccctagcccgccgcccgcttctccccggagtcagtacaacttcatcgcagatgtggtggagaagacagcacctgccgtggtctatatcgagatcctggaccggcaccctttcttgggccgcgaggtccctatctcgaacggctcaggattcgtggtggctgccgatgggctcattgtcaccaacgcccatgtggtggctgatcggcgcagagtccgtgtgagactgctaagcggcgacacgtatgaggccgtggtcacagctgtggatcccgtggcagacatcgcaacgctgaggattcagactaaggagcctctccccacgctgcctctgggacgctcagctgatgtccggcaaggggagtttgttgttgccatgggaagtccctttgcactgcagaacacgatcacatccggcattgttagctctgctcagcgtccagccagagacctgggactcccccaaaccaatgtggaatacattcaaactgatgcagctattgattttggaaactctggaggtcccctggttaacctggctagggaactgggggctgtatccctgcaggatggggaggtgattggagtgaacaccatgaaggtcacagctggaatctcctttgccatcccttctgatcgtcttcgagagtttctgcatcgtggggaaaagaagaattcctcctccggaatcagtgggtcccagcggcgctacattggggtgatgatgctgaccctgagtcccagggctggtctgcggcctggtgatgtgattttggccattggggagcagatggtacaaaatgctgaagatgtttatgaagctgttcgaacccaatcccagttggcagtgcagatccggcggggacgagaaacactgaccttatatgtgacccctgaggtcacagaatgaatagatcaccaagagtatgaggctcctgctctgatttcctccttgcctttctggctgaggttctgagggcaccgagacagagggttaaatgaaccagtgggggcaggtccctccaaccaccagcactgactcctgggctctgaagaatcacagaaacactttttatataaaataaaattatacctagc

SEQ ID NO: 4418 - DNA, 1488 bp, Homo sapiens
aaaatggcggcggcggcgacggccgggcgctcctgaagcagcagttatggagcttccctcagggccggggccggagcggctctttgactcgcaccggcttccgggtgactgcttcctactgctcgtgctgctgctctacgcgccagtcgggttctgcctcctcgtcctgcgcctctttctcgggatccacgtcttcctggtcagctgcgcgctgccagacagcgtccttcgcagattcgtagtgcggaccatgtgtgcggtgctagggctcgtggcccggcaggaggactccggactccgggatcacagtgtcagggtcctcatttccaaccatgtgacacctttcgaccacaacatagtcaatttgcttaccacctgtagcacccctctactcaatagtccccccagctttgtgtgctggtctcggggcttcatggagatgaatgggcggggggagttggtggagtcactcaagagattctgtgcttccacgaggcttccccccactcctctgctgctattccctgaggaagaggccaccaatggccgggaggggctcctgcgcttcaggttcctggccattttctatccaagatgtggtacaacctcttaccctgcaagttcagagacccctggtctctgtgacggtgtcagatgcctcctgggtctcagaactgctgtggtcacttttcgtccctttcacggtgtatcaagtaaggtggcttcgtcctgttcatcgccaactaggggaagcgaatgaggagtttgcactccgtgtacaacagctggtggccaaggaattgggccagacagggacacggctcactccagctgacaaagcagagcacatgaagcgacaaagacaccccagattgcgcccccagtcagcccagtcttctttccctccctcccctggtccttctcctgatgtgcaactggcaactctggctcagagagtcaaggaagttttgccccatgtgccattgggtgtcatccagagagacctggccaagactggctgtgtagacttgactatcactaatctgcttgagggggccgtagctttcatgcctgaagacatcaccaagggaactcagtccctacccacagcctctgcctccaaggcattcgatgcgtgtttaatgatgatgactccgcaagccctctgacattgtgatcacctcagtttcccagctctggcccggtgacccctcagccaacagccctaacatttgccaagtcttcctgggcccggcaggagagcctgcaggagcgcaagcaagcactatatgaatacgcaagaaggagattcacagagagacgagcccaggaggctgactgagctcaaaggaacaggatggcacccagagccgcaggacggagactgggggcagccctcacccaactcacaacaggctggatgggtgggtggtaaaaagggaaggatgaggctcccccaatgtcacattaaattcatggttttcattc

SEQ ID NO: 4419 - DNA, 4044 bp, Homo sapiens
gtcgcactccttttccccgagacttggtactgggagataggacgggagtctcctacacgcagtcaacacttgccacgagcggctagacttaggacaggcaagttgccctgccatccttctatcgcccccacccctcctttacttaagggcgatggcagagacgtcctcctcccccttctcctcctctttggtgcctccagccaggaggcgggagcgatccacagcagctgacccagctcaggcactgcctctctcacagccctcaagacacaccatgggcccagaggcaggtttgctacacagcagcgacgacgcaggcggcggccccagcgactcgcaactgcctccctgaccacagcggccaccgcccaacacccccgagaagccatcgccaccaccggcaggagaacctagggtccataaagccatcttcgcgatcgactaaagctacgtcaacaactatggcgggcgacgggcggcgggcagaggcggtgcgggaaggatggggtgtgtacgtcacccccagggcccccatccgagagggaaggggccggctcgcccctcaaaatggcggcagcagcgatgcgcctgcgtacagaactcctccgtcgcgccagggccggcgggaagtgaggttctcggacgagccgccagaagtgtacggcgacttcgagcccctggtggccaaagaaaggtccccggtgggaaaacgaacccggctagaagagttccggtccgattctgcgaaagaggaagtgagagaaagcgcgtactaccttcggtctaggcagcggaggcagccgcgaccccaggaaaccgaggaaatgaagacgcgaaggactacccgccttcagcagcagcactcagagcagcctccgctacagccgtctcctgttatgaccaggagagggctgcgggactctcattcctctgaagaggatgaagcatcttcccaaactgatttaagccaaacgatctcaaagaaaactgtcaggagcatacaagaggctccagtgagtgaagatcttgtaatcaggttacgtcgaccccctctaagatacccaagatatgaagccaccagtgtccaacagaaggtcaatttctctgaagaaggagaaactgaagaagatgatcaagacagctctcacagcagtgtcactactgttaaggccagatccagggattctgatgaatctggagataaaaccaccagatcatctagtcaatatatagaatcattttggcagtcatcacaaagtcaaaacttcacagctcatgataagcaaccttcagtgctaagctcaggatatcaaaaaactccccaggaatgggccccacaaactgcaagaataaggaccaggatgcaaaatgacagcattctgaaatcagagcttggaaaccagtcaccatcaacctccagccgacaagtgactggacaaccccaaaatgcatcttttgtcaagaggaaccggtggtggctacttcctctgatagctgctcttgcctctgggagtttttggttctttagtactcctgaggtagaaaccactgctgttcaagagttccagaaccagatgaatcaacttaagaataagtaccaaggtcaagatgagaagctgtggaaaaggagccaaacattcctggaaaaacatcttaatagctcccatcctcggtctcagcctgctatcttactgctcactgctgcccgagatgctgaagaagcacttaggtgtctgagtgaacaaattgctgatgcctattcttcttttcgtagtgtccgtgccatccggattgatgggacagataaagctactcaagacagtgatactgtcaaactagaggtagaccaagaactgagcaatggatttaagaatggccagaatgcagctgtggtacaccgctttgagtcatttcccgcaggctctactttgatcttctacaaatattgtgaccatgaaaacgcggccttcaaagatgtagccttagtcctgactgtcttattggaggaagagacacttggaacaagtctaggcctaaaggaagttgaagaaaaagtaagagattttcttaaagtcaagttcaccaattctaacacacccaactcctacaatcatatggacccagacaaactgaatggcctctggagccgtatttctcacttagttctgcctgtgcaacctgaaaatgccctgaaaaggggcatctgcttataagaagtgagagagaagaaaaatcatgtcccaagttctgagaattgttcacactttctaaccagagacagaattcagagctctttttgaaagaactagtttctttttaaagaagttaagtgcttacataaacatggaacatataaatcattcattcaacctaattatctgtgatatgagagaatcatttcagtttccattgagagctctgttaaaggtatcttaggagtgcagattatatgcagttccttagagaatctgttttgattctgggctgagttattacagttatggtatgaccagtgagagggatttgtgtcctttcttatgaaccttcctgattttttaacttagatttctcactaagtttcctgagttattagtaagattgctccctaaatgtaaccagggattttcccattatgttcccttttataccatttaggtgtgagttccttagcttctgcctataggaacataagtaatgaaaggtcatctaggtgtgtgtttggaatttttttcttttgttttttggaaaatggaaagaacaaggcaaggaaggaaaattaatggggaagctgaagggaggaaatgttacagtaatccactgagatgtagtttagtcaaacataggtatatgaactgttaatcttggtggattccgttgggatttgttttttacatctcctttttccttccttgaagaaaaattcttggctgtcccaaggattcttcatgtatattgcaaaatttaatatatttgttcacttgagtcttaagagtaggtcaggccaaggcaggtggatcacctgaggtcagaagttcaagaccagcctggccaacatggtgaaaccccgtctctactaaaaatacaaaaattagctgggcgtggtggtgcatgcctgaaatcccagctacttgggaggctgaggcaggagaattgcttgaacccgggaggcggaggttgcagtaagccgagaccatgcttattgccctccagtctgggcaacaaaaatgaaactccgtctcaaaaaaaaaaaagtaggtcaattcgtaacagtttattttggacacaccctgaagcttttgttttgaattaagaaatgagtttcaggaattgacaaaccatttgttaaccagctgtcctgggctattgaagaagatttcattttccgcgcatccacttgttgcagtccaagtcctctagtgcaacgccatagcaaatataaagatttactatgcacgtgatacattttatggagtgcctcaagccaagatagtgaatttatatgaagggtgtgaaatgtatttctttactactatagtagtttagttataactttgcatctataattgagctttctcatctgtcaaatgctatggttttcttaaaatgttacaattctagatctatccaccttgtttttttattgtctacaaaccattaaatgtaaatattgtttttagagtcagtcattggctttgtcatttaccctttgagagttccacaagtggtagtagagtggtttaacgtctttcctctagtactaccagtattcataaatgtataccccttactgtaatttgttcctcttagaagtcagatcatctgatttatagaggattatgaaaaccagagtttttgaaaaggcttattttatacatacgtattatatagagaaacaaatgtttttattaaatgtttcattgacccaagtaatttaaaagtaatatgttacctatgtctttcaggaaaaataattatagcagctgatctgtaaatgactttaaaagctattttagtaatttaaataaatttactttcttggtttat

SEQ ID NO: 4420 - DNA, 9633 bp, Homo sapiens
atgcccaagcgcgcgcactggggggccctctccgtggtgctgatcctgctttggggccatccgcgagtggcgctggcctgcccgcatccttgtgcctgctacgtccccagcgaggtccactgcacgttccgatccctggcttccgtgcccgctggcattgctaaacacgtggaaagaatcaatttggggtttaatagcatacaggccctgtcagaaacctcatttgcaggactgaccaagttggagctacttatgattcacggcaatgagatcccaagcatccccgatggagctttaagagacctcagctctcttcaggttttcaagttcagctacaacaagctgagagtgatcacaggacagaccctccagggtctctctaacttaatgaggctgcacattgaccacaacaagatcgagtttatccaccctcaagctttcaacggcttaacgtctctgaggctactccatttggaaggaaatctcctccaccagctgcaccccagcaccttctccacgttcacatttttggattatttcagactctccaccataaggcacctctacttagcagagaacatggttagaactcttcctgccagcatgcttcggaacatgccgcttctggagaatctttacttgcagggaaatccgtggacctgcgattgtgagatgagatggtttttggaatgggatgcaaaatccagaggaattctgaagtgtaaaaaggacaaagcttatgaaggcggtcagttgtgtgcaatgtgcttcagtccaaagaagttgtacaaacatgagatacacaagctgaaggacatgacttgtctgaagccttcaatagagtcccctctgagacagaacaggagcaggagtattgaggaggagcaagaacaggaagaggatggtggcagccagctcatcctggagaaattccaactgccccagtggagcatctctttgaatatgaccgacgagcacgggaacatggtgaacttggtctgtgacatcaagaaaccaatggatgtgtacaagattcacttgaaccaaacggatcctccagatattgacataaatgcaacagttgccttggactttgagtgtccaatgacccgagaaaactatgaaaagctatggaaattgatagcatactacagtgaagttcccgtgaagctacacagagagctcatgctcagcaaagaccccagagtcagctaccagtacaggcaggatgctgatgaggaagctctttactacacaggtgtgagagcccagattcttgcagaaccagaatgggtcatgcagccatccatagatatccagctgaaccgacgtcagagtacggccaagaaggtgctactttcctactacacccagtattctcaaacaatatccaccaaagatacaaggcaggctcggggcagaagctgggtaatgattgagcctagtggagctgtgcaaagagatcagactgtcctggaagggggtccatgccagttgagctgcaacgtgaaagcttctgagagtccatctatcttctgggtgcttccagatggctccatcctgaaagcgcccatggatgacccagacagcaagttctccattctcagcagtggctggctgaggatcaagtccatggagccatctgactcaggcttgtaccagtgcattgctcaagtgagggatgaaatggaccgcatggtatatagggtacttgtgcagtctccctccactcagccagccgagaaagacacagtgacaattggcaagaacccaggggagtcggtgacattgccttgcaatgctttagcaatacccgaagcccaccttagctggattcttccaaacagaaggataattaatgatttggctaacacatcacatgtatacatgttgccaaatggaactctttccatcccaaaggtccaagtcagtgacagtggttactacagatgtgtggctgtcaaccagcaaggggcagaccattttacggtgggaatcacagtgaccaagaaagggtctggcttgccatccaaaagaggcagacgcccaggtgcaaaggctctttccagagtcagagaagacatcgtggaggatgaagggggctcgggcatgggagatgaagagaacacttcaaggagacttctgcatccaaaggaccaagaggtgttcctcaaaacaaaggatgatgccatcaatggagacaagaaagccaagaaagggagaagaaagctgaaactctggaagcattcggaaaaagaaccagagaccaatgttgcagaaggtcgcagagtgtttgaatctagacgaaggataaacatggcaaacaaacagattaatccggagcgctgggctgatattttagccaaagtccgtgggaaaaatctccctaagggcacagaagtacccccattgattaaaaccacaagtcctccatccttgagtctagaagtcacaccaccttttcctgctatttctcccccctcagcatctcctgtgcagacagtaaccagtgctgaagaatcctcagcagatgtacctctacttggtgaagaagagcacgttttgggtaccatttcctcagccagcatggggctagaacacaaccacaatggagttattcttgttgaacctgaagtaacaagcacacctctggaggaagttgttgatgacctttccgagaagactgaggagataacttccactgaaggagacctgaaggggacagcagcccctacacttatatctgagccttatgaaccatctcctactctgcacacattagacacagtctatgaaaagcccacccatgaagagacggcaacagagggttggtctgcagcagatgttggatcgtcaccagagcccacatccagtgagtatgagcctccattggatgctgtctccttggctgagtctgagcccatgcaatactttgacccagatttggagactaagtcacaaccagatgaggataagatgaaagaagacacctttgcacaccttactccaacccccaccatctgggttaatgactccagtacatcacagttatttgaggattctactataggggaaccaggtgtcccaggccaatcacatctacaaggactgacagacaacatccaccttgtgaaaagtagtctaagcactcaagacaccttactgattaaaaagggtatgaaagagatgtctcagacactacagggaggaaatatgctagagggagaccccacacactccagaagttctgagagtgagggccaagagagcaaatccatcactttgcctgactccacactgggtataatgagcagtatgtctccagttaagaagcctgcggaaaccacagttggtaccctcctagacaaagacaccacaacagcaacaacaacaccaaggcaaaaagttgctccgtcatccaccatgagcactcacccttctcgaaggagacccaacgggagaaggagattacgccccaacaaattccgccaccggcacaagcaaaccccacccacaacttttgccccatcagagactttttctactcaaccaactcaagcacctgacattaagatttcaagtcaagtggagagttctctggttcctacagcttgggtggataacacagttaatacccccaaacagttggaaatggagaagaatgcagaacccacatccaagggaacaccacggagaaaacacgggaagaggccaaacaaacatcgatataccccttctacagtgagctcaagagcgtccggatccaagcccagcccttctccagaaaataaacatagaaacattgttactcccagttcagaaactatacttttgcctagaactgtttctctgaaaactgagggcccttatgattccttagattacatgacaaccaccagaaaaatatattcatcttaccctaaagtccaagagacacttccagtcacatataaacccacatcagatggaaaagaaattaaggatgatgttgccacaaatgttgacaaacataaaagtgacattttagtcactggtgaatcaattactaatgccataccaacttctcgctccttggtctccactatgggagaatttaaggaagaatcctctcctgtaggctttccaggaactccaacctggaatccctcaaggacggcccagcctgggaggctacagacaggcatacctgttaccacttctggggaaaatcttacagaccctccccttcttaaagagcttgaggatgtggatttcacttccgagtttttgtcctctttgacagtctccacaccatttcaccaggaagaagctggttcttccacaactctctcaagcataaaagtggaggtggcttcaagtcaggcagaaaccaccacccttgatcaagatcatcttgaaaccactgtggctattctcctttctgaaactagaccacagaatcacacccctactgctgcccggatgaaggagccagcatcctcgtccccatccacaattctcatgtctttgggacaaaccaccaccactaagccagcacttcccagtccaagaatatctcaagcatctagagattccaaggaaaatgttttcttgaattatgtggggaatccagaaacagaagcaaccccagtgaacaatgaaggaacacagcatatgtcagggccaaatgaattatcaacaccctcttccgaccaggatgcatttaacttgtctacaaagctggaattggaaaagcaagtatttggtagtaggagtctaccacgtggcccagatagccaacgccaggatggaagagttcatgcttctcatcaactaaccagagtccctgccaaacccatcctaccaacagcaacagtgaggctgcctgaaatgtccacacaaagcgcttccagatactttgtaacttcccagtcacctcgtcactggaccaacaaaccggaaataactacatatccttctggggctttgccagagaacaaacagtttacaactccaagattatcaagtacaacaattcctctcccattgcacatgtccaaacccagcattcctagtaagtttactgaccgaagaactgaccaattcaatggctactccaaagtgtttggaaataacaacatccctgaggcaagaaacccagttggaaagcctcccagtccaagaattcctcattattccaatggaagactccctttctttaccaacaagactctttcttttccacagttgggagtcacccggagaccccagatacccacttctcctgccccagtaatgagagagagaaaagttattccaggttcctacaacaggatacattcccatagcaccttccatctggactttggccctccggcacctccgttgttgcacactccgcagaccacgggatcaccctcaactaacttacagaatatccctatggtctcttccacccagagttctatctcctttataacatcttctgtccagtcctcaggaagcttccaccagagcagctcaaagttctttgcaggaggacctcctgcatccaaattctggtctcttggggaaaagccacaaatcctcaccaagtccccacagactgtgtccgtcaccgctgagacagacactgtgttcccctgtgaggcaacaggaaaaccaaagcctttcgttacttggacaaaggtttccacaggagctcttatgactccgaataccaggatacaacggtttgaggttctcaagaacggtaccttagtgatacggaaggttcaagtacaagatcgaggccagtatatgtgcaccgccagcaacctgcacggcctggacaggatggtggtcttgctttcggtcaccgtgcagcaacctcaaatcctagcctcccactaccaggacgtcactgtctacctgggagacaccattgcaatggagtgtctggccaaagggaccccagccccccaaatttcctggatcttccctgacaggagggtgtggcaaactgtgtcccccgtggagggccgcatcaccctgcacgaaaaccggaccctttccatcaaggaggcgtccttctcagacagaggcgtctataagtgcgtggccagcaatgcagccggggcggacagcctggccatccgcctgcacgtggcggcactgccccccgttatccaccaggagaagctggagaacatctcgctgcccccggggctcagcattcacattcactgcactgccaaggctgcgcccctgcccagcgtgcgctgggtgctcggggacggtacccagatccgcccctcgcagttcctccacgggaacttgtttgttttccccaacgggacgctctacatccgcaacctcgcgcccaaggacagcgggcgctatgagtgcgtggccgccaacctggtaggctccgcgcgcaggacggtgcagctgaacgtgcagcgtgcagcagccaacgcgcgcatcacgggcacctccccgcggaggacggacgtcaggtacggaggaaccctcaagctggactgcagcgcctcgggggacccctggccgcgcatcctctggaggctgccgtccaagaggatgatcgacgcgctcttcagttttgatagcagaatcaaggtgtttgccaatgggaccctggtggtgaaatcagtgacggacaaagatgccggagattacctgtgcgtagctcgaaataaggttggtgatgactacgtggtgctcaaagtggatgtggtgatgaaaccggccaagattgaacacaaggaggagaacgaccacaaagtcttctacgggggtgacctgaaagtggactgtgtggccaccgggcttcccaatcccgagatctcctggagcctcccagacgggagtctggtgaactccttcatgcagtcggatgacagcggtggacgcaccaagcgctatgtcgtcttcaacaatgggacactctactttaacgaagtggggatgagggaggaaggagactacacctgctttgctgaaaatcaggtcgggaaggacgagatgagagtcagagtcaaggtggtgacagcgcccgccaccatccggaacaagacttacttggcggttcaggtgccctatggagacgtggtcactgtagcctgtgaggccaaaggagaacccatgcccaaggtgacttggttgtccccaaccaacaaggtgatccccacctcctctgagaagtatcagatataccaagatggcactctccttattcagaaagcccagcgttctgacagcggcaactacacctgcttggtcaggaacagcgcgggagaggataggaagacggtgtggattcacgtcaacgtccagccacccaagatcaacggtaaccccaaccccatcaccactgtgcgggagatagcagccgggggcagtcggaaactgattgactgcaaagctgaaggcatccccaccccgagggtgttatgggcttttcccgagggtgtggttctgccagctccatactatggaaaccggatcactgtccatggcaacggttccctggacatcaggagtttgaggaagagcgactccgtccagctggtatgcatggcacgcaacgagggaggggaggccaggttgatcctgcagctcactgtcctggagcccatggagaaacccatcttccacgacccgatcagcgagaagatcacggccatggcgggccacaccatcagcctcaactgctctgccgcggggaccccgacacccagcctggtgtgggtccttcccaatggcaccgatctgcagagtggacagcagctgcagcgcttctaccacaaggctgacggcatgctacacattagcggtctctcctcggtggacgccggggcctaccgctgcgtggcccgcaatgccgctggccacacggagaggctggtctccctgaaggtgggactgaagccagaagcaaacaagcagtatcataacctggtcagcatcatcaatggtgagaccctgaagctcccctgcacccctcccggggctgggcagggacgtttctcctggacgctccccaatggcatgcatctggagggcccccaaaccctgggacgcgtttctcttctggacaatggcaccctcacggttcgtgaggcctcggtgtttgacaggggtacctatgtatgcaggatggagacggagtacggcccttcggtcaccagcatccccgtgattgtgatcgcctatcctccccggatcaccagcgagcccaccccggtcatctacacccggcccgggaacaccgtgaaactgaactgcatggctatggggattcccaaagctgacatcacgtgggagttaccggataagtcgcatctgaaggcaggggttcaggctcgtctgtatggaaacagatttcttcacccccagggatcactgaccatccagcatgccacacagagagatgccggcttctacaagtgcatggcaaaaaacattctcggcagtgactccaaaacaacttacatccacgtcttctgaaatgtggattccagaatgattgcttaggaactgacaacaaagcggggtttgtaagggaagccaggttggggaataggagctcttaaataatgtgtcacagtgcatggtggcctctggtgggtttcaagttgaggttgatcttgatctacaattgttgggaaaaggaagcaatgcagacacgagaaggagggctcagccttgctgagacactttcttttgtgtttacatcatgccaggggcttcattcagggtgtctgtgctctgactgcaatttttctttttttgcaaatgccactcgactgccttcataagcgtccataggatatctgaggaacattcatcaaaaataagccatagacatgaacaacacctcactaccccattgaagacgcatcacctagttaacctgctgcagtttttacatgatagactttgttccagattgacaagtcatctttcagttatttcctctgtcacttcaaaactccagcttgcccaataaggatttagaaccagagtgactgatatatatatatattttaattcagagttacatacatacagctaccattttatatgaaaaaagaaaaacatttcttcctggaactcactttttatataatgttttatatatatattttttcctttcaaatcagacgatgagactagaaggagaaatactttctgtcttattaaaattaataaattattggtctttacaagacttggatacattacagcagacatggaaatataattttaaaaaatttctctccaacctccttcaaattcagtcaccactgttatattaccttctccaggaaccctccagtggggaaggctgcgatattagatttccttgtatgcaaagtttttgttgaaagctgtgctcagaggaggtgagaggagaggaaggagaaaactgcatcataactttacagaattgaatctagagtcttccccgaaaagcccagaaacttctctgcagtatctggcttgtccatctggtctaaggtggctgcttcttccccagccatgagtcagtttgtgcccatgaataatacacgacctgttatttccatgactgctttactgtatttttaaggtcaatatactgtacatttgataataaaataatattctccc

SEQ ID NO: 4421 - DNA, 2694 bp, Homo sapiens
tacaattattatgtgtcaactataaataaaatttttttaaaaagaattggcccgtgggttttctccattacagatttattgccaaaccctgtgcactctgtattggcatcgaggacagtggtccttatcaggcccaacccaatgccatccttgaaaaggtgttcatatctattaccaaggtaagtgggcaaagaaacagagaggaatattcacataaggcgttgctccatggggcaggggaggatagagagcacgtacctctaagggtaaggataggatgggatggtccttcatatttgagtagtccatgtagctatatggagagctttatcccctcagggaaaacctttgggccctacgtatgtcaagtttacgtacgtagtaggtttgagttttaggcccagcagccacccttacccctctttccccagacacataccatatctggtttttgtttttccttgttccagtttctgtcactgcctagttgtgtgatcgagatggagacagtactgatagcctttgcagtttgggttttttgttttttggagagacaaggttttgccatgttgcccaggctggtctcggactcctgggctcaagccatccttcggccctcagccttcaaaaatcccaggattacaggcatgagccaccatgcctggcctgcaatttgggtttttaatatccttttttactcagcttgggctggaggaagagacaaaaggatatgtataggtgagcagtacaggtccttgatatgtaagataaaatttcttactaaaaatgactttgggataaaacttggaaagataaacatcacttgagccacttatggctatcataccttgtcgctcagctagtcaatgggattgaaggaggggtatgaggagacgggtgttctgactctggttatacattcacagtatcctgataagaaaaggctggagggcctgtcaaagcagctggattggaatgtccgaaaaatccaatgctggtttcgccatcggaggaatcaggacaagcccccaacgcttactaaattctgtgaaagcatgtggagattcacattttatttatgtatattctgctatggaattagatttctctggtcgtcaccttggttctgggacatccgacagtgctggcataactatccatttcagcctctttcaagtgggctttatcactattatatcatggaattggccttctattggtcccttatgttttctcagtttacagacattaaaagaaaggacttcctgatcatgtttgtgcatcacttggtcaccattgggcttatctccttctcctacatcaacaatatggttcgagtgggaactctgatcatgtgtctacatgatgtctcagacttcttgctggaggcagccaaactggccaattatgccaagtatcagcggctctgtgacaccctttttgtgatcttcagtgctgtttttatggttacacgactaggaatctatccattctggattctgaacacgaccctctttgagagttgggagataatcgggccttatgcttcatggtggctcctcaatggcctgctgctgaccctacagcttctgcatgtcatctggtcctacctaattgcacggattgctttgaaagccttgatcaggggaaaggtgaggatgaaagatggcttctttcttttgggtatggaagatagggattactcaacagacgttctctctccatcaaacctggtgagccccatctactcaagcaggccaagcaaaaagcctagggctccaaagtcttcgcctcttcggtatcgaaggatgatcgcagtgatgtggagagcagctcagaggaagaagatgtgaccacctgcacaaaaagtccctgtgacagtagctccagcaatggtgccaatcgggtgaatggtcacatgggaggcagctactgggctgaagagtaaggtggttgctatagggacttcagcacacatggacttgtagggccactggcaacatactcctcttggcccttcccatatctactcttctgtgattgggagactgcaaggcactgaggagtatcaaagaagcaaatattttcactttgaaagaaaactgccattttgtatttaatagcctccaggttctttcagtaatgttatttgctctgtgtgtttttgtgtgtttgttgatgtgcgtttgtgcatatgcgtgagtttcattgccggggttggggcacaattgtggactggggccatgaggccttccctggtccccactgaacccaccttagttccacatttggctgcatcttgaattatgccaactccagacttctccttcttttttgcccttggctcttgacactctaaacccctggaccatctgaatggagcagccaagttcagtcccacatttctgtactgttcctctttcacagctggaatatgtcacatgatgaagttgtatagaaacagaaccatggatggatggccaggattgccgtggtccctagctagatccccttcctatcaatcacctgatagcaacagggacagctgccaataccctgctctttactcaatggtacccagggagggagcatgggaagagggtgagctgagggctggaggagggcaacagccactgggtgagctgttcacggtcttatactattgtttgtttgtgattaaaagtgcttcaaccc

SEQ ID NO: 4422 - DNA, 794 bp, Homo sapiens
agcccccaggccatcatctatgctgatggaggcacgtgtggatctcatcgacctggacttgtgtaactcgacccagtggtacaatgagcacgttcagccaaccaatgtgtgcgcggggtatcctgtaggcaagatcgacacctgccagggggacagcggcgggcctctcatgtgcaaagacagcaaggaaagcgcctgtgtggtcgtgggaatcacaagctggggggtaggctgtgcccgtgccaagcgccccggaatctacacggccacctggccctatctgaactggatcgcctccaagattggttctaacgctttgcgtatgattcaatcggccacccctccacctcccaccactcgaccgcccccgattcgaccccccttctcccaccctctctctgctcaccttccttggtatttccaaccgccccctcgaccacttccaccccgaccaccggcagcccagccccgacccccaccttcacccccgcccccacccccacccccaccctcacctttacccccacccccacccccacccccacctacaccctcatctaccacaaaacttccccaaggactttcttttgccaagcgcctacagcagctcatagaggtcttgaaggggaagacctattccgacggaaagaaccattatgacatggagaccacagagctcccagaactgacctcgacctcctgatctgacctggttctcaacagacccagtgagcccttcactcctgagaaaaaggaaagatgaaataaataaataaacatatatatatagatat

SEQ ID NO: 4423 - DNA, 877 bp, Homo sapiens
gtctacccgcccctgccctgaggaccctagtccaacatggcggcgcccagcggagggtggaacggcgtcggcgcgagcttgtgggccgcgctgctcctaggggccgtggcgctgaggccggcggaggcggtgtccgagcccacgacggtggcgtttgacgtgcggcccggcggcgtcgtgcattccttctcccataacgtgggcccgggggacaaatatacgtgtatgttcacttacgcctctcaaggagggaccaatgagcaatggcagatgagtctggggaccagcgaagaccaccagcacttcacctgcaccatctggaggccccaggggaagtcctatctgtacttcacacagttcaaggcagaggtgcggggcgctgagattgagtacgccatggcctactctaaagccgcatttgaaagggaaagtgatgtccctctgaaaactgaggaatttgaagtgaccaaaacagcagtggctcacaggcccggggcattcaaagctgagctgtccaagctggtgattgtggccaaggcatcgcgcactgagctgtgaccagcagccctgttgcgggtggcaccttctcatctccggtgaagctgaaggggccctcctggctcccaacagcttctcagttcccacttcctgctgagctcttctggactcaggatcgcagatccggggcacaaagagggtggggaacatgggggctatgctggggaaagcagccatgctccccccgacctccagccgagcatccttcatgagcctgcagaactgctttcctatgtttacccaggggacctcctttcagatgaactgggaagagatgaaatgttttttcatatttaaataaataagaacattaaaaagc

SEQ ID NO: 4424 - DNA, 4548 bp, Homo sapiens
ggcacgattctgggtacaggtgatgagggatttgaggaatggggtaaaacttaagaaggtccaagagcggcagtacaaccctttgcccattgaatatcagctcaccccttatgagatgttaatggatgacattcgctgcaaaagatacaccttgcgaaaagtgatggtgaatggtgatattccccctcggttaaaaaagagtgctcatgaaatcatcctcgacttcatcagatccagacctcctttaaatccagtctcagccagaaaactgaaaccaactccaccacggccacggagcctccatgaaagaatattagaagaaattaaagcagaaagaaagctgcggcctgtatcaccagaggagattagacgtagcagattagatgtgactacccctgaatctacaaagaatcttgtggagtcatctatggtgaatggaggtttgacatcacaaacaaaagaaaacgggttaagtacctcacagcaggtgcctgcacagcggaagaagctcctcagagccccaactctggccgaactggacagctctgagtctgaggaagaaacgctgcacaagtcgaccagcagcagcagcgtgtctccctctttccctgaagagccagtcctggaggccgtgtccacaaggaagaagcctccaaaattcctgcccatatcatcaacaccccagccagagagacggcagccaccccagagacgacattccattgaaaaggaaacgcctactaacgtgaggcagttcctgccgccttccaggcagagttcccgctctcttgaggaattctgctacccagtggaatgcctcgctcttactgtggaagaagtgatgcatattcgccaggtcctggtgaaggcagagctggaaaaataccaacagtataaagacatctacaccgccttgaaaaaaggaaagctctgcttttgttgccgaaccaggaggttttccttcttcacttggtcttatacctgtcagttctgtaagaggccggtgtgctcacagtgttgcaaaaagatgcggctgccctccaaaccatactccactcttcctatcttttcattgggaccttctgctctgcaaagaggggaaagtagtatgaggtcagaaaaaccctccactgcccatcatcggccacttcggagcattgccaggttctcctcaaaatctaagtctatggacaaatcagatgaagaactccagtttcccaaagagttgatggaggactggagcaccatggaggtgtgtgtggactgcaagaagttcatttcggaaatcatcagttcaagccggcgcagtctggtgttggccaacaaaagggcccgattgaaaaggaaaacgcagtctttctacatgtcctcgccaggcccctcggagtactgcccttcagagaggacgatcagtgagatctgagcctcgtgcctttcagctgcttttgtgctacgagtcagcgtccgtgcgcgaggacactgagccgggctggctctcctttctgtggttttatttaatgggcttgaatttgcattagatcagatttttgccgcatcacattgttccacagactgaatgctgtgttcgtatcgattgatgaaacgtgacaggtccgccaattgctcgtttgcactgagagaggacaacagtttgaaacttacttttgtgtgtgtgtggctttggaagccagtagctacttccttagttcagttctttactgttcctcgaataatctcctgactaaggcaaaaaaaaaaagcttctcctacgagaatcagtctaacagagatgccgatgtcagcacagccctaagcagtaagtcatattggcatttccacgtgactgtgtttctatcccgtgtacagagagatccagagccctacactccacgacctgggggctcacagcacagaacctagaagcacctgctgacactcttcaactgatttttaaatgttgttgcttggagataaaaattacataagggactttttgcctgcattctagtgcaaaacatctgaagagctgtacacccacaagggtgactatttcccctgagtggccgtgttgtcccagtgccctggttcagtgtctcctgagtggatgacaggtcttcattctctatcttgaatgtattatggttactaatagttttataatggaggtctaagaattaaagttgtgtgggagtttcaggacaaaggaaggctaaaagtttgtcaagacgttgagcgtattttggttacctatgagaagggttgtgacagtgtacagtggcagctgttggccacgctgcagaaatgagctggagctcatgggttttcagctacatttttcataactttgtagtacatccatcttgagtaaattaagccacaatttggtacctagggtctcaaactaaaatttatttttataaatgaattttaaaagaaaaaatatctacttcttttaaagttagaagaaaattaacctgctgacaggcaacatttttggggtgctttctgcactagttttccttgtaaatgatttgagtgagtaggtttggtttctgacgaaagtagactggagggtagcattgtatgcctcaaatgtctcagtgtgtttggctcatacgtgggctatactgtattattttggtatgcttacaaatgactaaccaatcaaattgtcattaatgtttggaaaatctgttaatgcacatgcacaataatttcctgaaagccataggacatgtctgtagtcagcaccacgatagcaccgtttcatgaaaggcatggcggctgcatttcataccacatcaaaatacagtaacatttctatactaaattaacagtaatacctcaaaactgctccggtagtagtttttaatggattgaaatttacagtttagtaaaaggcttaaaattacttatacttatgaaataaactttaccagttgactaaaataatgcatgttaacagttggtctgtatttgcatgtaaaagtgggccaccagagaacccttattgattacttaagtgtttacattattttaaagactcctgtttaagagctttcagaattgtactgggtgaatctcatttataaaacttcctaagagactatctgaactctatactccagacagttaggtgggagtataaatctaccccttttgatgaccccaggcttgagtttttaaaatgactacccagaagggcacaagggggaaggaaatggtatttgtatatgtatataaatatgcacctaggagaatgtgctttttaaaataatgactactgtttttattaaaacataagaaactacacccccaaaataagactttcattcacattcacaaagcaaacatctagtacatgtctttcacttcactttatgatagtgtattggatgatttgggcattacgatcacctcttaccacagcacagaacatacattcttcaacagcattaacggagtttgccaagtgcattaaagaggtcacgtggagggtacgttcatatgaaacaatctgcagaaagtggggtaagaaagggcacatggcacagttaaagttgtagaaatcaaattactatcattttttgttgccaaaacaaagtcttacatttaacccccctttctaccacccccctccacacttcacgtcagctacatagtttccacagggtaattcactaagagcttgtggagcttggttttaaaatccttagcctggtctgactttaggcatagcttccagttcttccttccgtgtcctggtttcttgttcagttttacttctaatccaacaacaaaagaaatgtctggctggtctcagctagagtctgatgtgtcttagagcatgtgtgcgtatctgaaccatcatccctgctctcatctcagctccctccaggcctgagcaccggttccttttgtcccatacgtcatgaagtcacactattgggaaacctgtgcttccctctccatggcttaactccctgtcagtgtcggagtgtataagaatgcttgtaaatactgtaatatatttattaatatttgaaaggcattcattcagtggacagtgggaattaactctcccaaggcaagtgaaaatgaatgattgacgtacgttgatttaacaatcttactagattttaattcttaaggatttcaaatgaaaccagaaggtggttatgtaagaggcttaaaatgatcttatgtttaaagagattctgttattagcaccatgaactcgtactatgaaatttttaagccttttatttttctaactatattactgtaggactggatattaggtgtcatataggaaacacaaaagtttattgctgtttgctaaagcaaaatagcagaaaattttgtatatgcaaaactgttgaaggaccatagagaaatgtgtactactgacggggcttttactaggcttcctgcgtgtgtaaaagtcgaggtattgctggcattcagggtgacatgatggtactaaatgttttccattaaagtcttctattttaaaatttagagaaaaataaaatggctttccatcag

SEQ ID NO: 4425 - DNA, 2809 bp, Homo sapiens
cgggcctcactggcttcaggagctgaataccctcccaggcacacacaggtgggacacaaataagggttttggaaccactattttctcatcacgacagcaacttaaaatgcctgggaagatggtcgtgatccttggagcctcaaatatactttggataatgtttgcagcttctcaagcttttaaaatcgagaccaccccagaatctagatatcttgctcagattggtgactccgtctcattgacttgcagcaccacaggctgtgagtccccatttttctcttggagaacccagatagatagtccactgaatgggaaggtgacgaatgaggggaccacatctacgctgacaatgaatcctgttagttttgggaacgaacactcttacctgtgcacagcaacttgtgaatctaggaaattggaaaaaggaatccaggtggagatctactcttttcctaaggatccagagattcatttgagtggccctctggaggctgggaagccgatcacagtcaagtgttcagttgctgatgtatacccatttgacaggctggagatagacttactgaaaggagatcatctcatgaagagtcaggaatttctggaggatgcagacaggaagtccctggaaaccaagagtttggaagtaacctttactcctgtcattgaggatattggaaaagttcttgtttgccgagctaaattacacattgatgaaatggattctgtgcccacagtaaggcaggctgtaaaagaattgcaagtctacatatcacccaagaatacagttatttctgtgaatccatccacaaagctgcaagaaggtggctctgtgaccatgacctgttccagcgagggtctaccagctccagagattttctggagtaagaaattagataatgggaatctacagcacctttctggaaatgcaactctcaccttaattgctatgaggatggaagattctggaatttatgtgtgtgaaggagttaatttgattgggaaaaacagaaaagaggtggaattaattgttcaagcattccctagagatccagaaatcgagatgagtggtggcctcgtgaatgggagctctgtcactgtaagctgcaaggttcctagcgtgtacccccttgaccggctggagattgaattacttaagggggagactattctggagaatatagagtttttggaggatacggatatgaaatctctagagaacaaaagtttggaaatgaccttcatccctaccattgaagatactggaaaagctcttgtttgtcaggctaagttacatattgatgacatggaattcgaacccaaacaaaggcagagtacgcaaacactttatgtcaatgttgcccccagagatacaaccgtcttggtcagcccttcctccatcctggaggaaggcagttctgtgaatatgacatgcttgagccagggctttcctgctccgaaaatcctgtggagcaggcagctccctaacggggagctacagcctctttctgagaatgcaactctcaccttaatttctacaaaaatggaagattctggggtttatttatgtgaaggaattaaccaggctggaagaagcagaaaggaagtggaattaattatccaagttactccaaaagacataaaacttacagcttttccttctgagagtgtcaaagaaggagacactgtcatcatctcttgtacatgtggaaatgttccagaaacatggataatcctgaagaaaaaagcggagacaggagacacagtactaaaatctatagatggcgcctataccatccgaaaggcccagttgaaggatgcgggagtatatgaatgtgaatctaaaaacaaagttggctcacaattaagaagtttaacacttgatgttcaaggaagagaaaacaacaaagactatttttctcctgagcttctcgtgctctattttgcatcctccttaataatacctgccattggaatgataatttactttgcaagaaaagccaacatgaaggggtcatatagtcttgtagaagcacagaagtcaaaagtgtagctaatgcttgatatgttcaactggagacactatttatctgtgcaaatccttgatactgctcatcattccttgagaaaaacaatgagctgagaggcagacttccctgaatgtattgaacttggaaagaaatgcccatctatgtcccttgctgtgagcaagaagtcaaagtaaaacttgctgcctgaagaacagtaactgccatcaagatgagagaactggaggagttccttgatctgtatatacaataacataatttgtacatatgtaaaataaaattatgccatagcaagattgcttaaaatagcaacactctatatttagattgttaaaataactagtgttgcttggactattataatttaatgcatgttaggaaaatttcacattaatatttgctgacagctgacctttgtcatctttcttctattttattccctttcacaaaattttattcctatatagtttattgacaataatttcaggttttgtaaagatgccgggttttatatttttatagacaaataataagcaaagggagcactgggttgactttcaggtactaaatacctcaacctatggtataatggttgactgggtttctctgtatagtactggcatggtacggagatgtttcacgaagtttgttcatcagactcctgtgcaactttcccaatgtggcctaaaaatgcaacttctttttattttcttttgtaaatgtttaggtttttttgtatagtaaagtgataatttctggaatta

SEQ ID NO: 4426 - DNA, 2410 bp, Homo sapiens
agcttagaggcaaagttaagagactcatcagattctgagctgctgcgggatattttgcagaagacgtgctgtattgcccagaagccatcgtgtcactggtcggggtcctgcggaggctggctgcctgccgggagcacaagcaggctcctgaggtctacctggcctttaccgtccgcaacccagagacgtgccagctgttcaccaccgagctaggctggactgggatcagatgggaagtggaagctcatcatgaccagaaactgtttccctacagagagcacttggagatggcaatgctgaacctcacactgtaggactcacacacgactccaacgggcttgtgagaattaagtcactctcgtgggaagaatttttatatgggaaagcggataaaactttcattgcactggaatgtttggaaaatgttaaattccaaatcaggaaccacaaactgccctctaataagacattggctatctaagcatgtgggtgccccctttctgccagcagttctggttcttaagaaaatcaccataaatcagacatgaaaattctggctccaaaaatagcattttctttgtgcaaataaaaacgagtgtatcaagtatgacgttcccccaacgtggacacacttgtttcctcagaaagccaaacctgctgcagctgccacatccctggacacactcgtttcctcacaaagccaagcccgctacagctgccacatccctggacacactcggttcctcacaaagccaagcccgctgcagctgccacattcctgggcttatggtgcagcaggtgcttttttcaagacaggaatcaaagtgtaaggaacatggcagaaaggtgacacctggagaccaaatgcaggatgaggagtactgcagaggtcacagggaagtcacagaacagtaatacgctggcaggggcatggggcatgaagaacagaagaagacatttgagaaaagcatctgcaaaatactaaagagcagagcttacctcatttcctgtccccaccccatcccaggtcaccacctggctgaccccaggtccccgacccaacaacaacccctcccaagtccctaactcccttacctggacttgagacccttcacaccccagcagtgctccgcctccaacttgacatcatgctttctggaaacttccccgtgtgtcccactttcccacacttggtgcgctggagcaccttccggcctctacatgctgtacgttcccctgtgagcaccctcctctcggcctctggccaacacagtcccacccatctgtgggtaacaagggggtgtgggtgttcttttcagccttgctaaactgtctgaatcaaggatcacaaactacagccttcaggccaaatccagcccacagcctgtgtttgtaaataaagctttattggaacaaagccacaccccttaatctacagatgatctgtggctactttcacgccacaacagagtaccatggttctgacagagactgggggacccagtctaaatgacttccgacctggacctttactgaaaatcctcccaatcattctgttgacaagaatgatgtattactttttgcaataagaaacaagtaacatttgcagaattccacccatctttcaaggctggtcccagaagttccctttgcccacacacctacctgatcctgacaacttcctaaactgcagccctgcccacccggctccagcatcatttgtggagtgtcagctccataaatccagagggcaggtgggggtgtgtcctaacattcccgagcctactgtaccgaaacgggacagcagagtaggccagcatctgtgacttctgctccctcactagcttttccaccagaccccacatgttaccaccctggctgtgggaagcagggatcagggagtgtggctcggtgcccgtctccagaaccctgcccaccctggcgtggtggcagacatggttacctgcagctgagctgccagttcctctgagtcctcaaagaccaggccgttttcttcatgtttcactagctcatgtaaactgcagagagaaccaagggagcctgagagctgcctggggaagacaccagacccctggggtgcccagcttgcctcccacccaccccacgctcaagccaggctgggggttggaacagggggtgtggtttctgggagctggttcttagatttggcatctgaagcatataaaggtctgggggagtgcacatcaaaatggccaaatcaatttgaggagggagccttaaggaaggtttgtacgttctgtgctggatgctcttcaagtactgaagaattatttttgcatgtttttcttaattccatggccatggaacaagtaaaggcaaccccctggggactggttcagcacataaaagatgacttttctaggacacc

SEQ ID NO: 4427 - DNA, 3447 bp, Homo sapiens
gcagcggcgcccagtgtaagggagtgggagctggtccgtgccgcggcggccgcgcagggagctctcgaggcaacgccggggcgcccgaggtctggaaggcgcagaaatggagcaagagccacaaaatggagaacctgctgaaattaagatcatcagagaagcatataagaaggcctttttatttgttaacaaaggtctgaatacagatgaattaggtcagaaggaagaagcaaagaactactataagcaaggaataggacacctgctcagagggatcagcatttcatcaaaagagtctgaacacacaggtcctgggtgggaatctgctagacagatgcaacagaaaatgaaagaaactctacagaatgtacgcaccaggctggaaattctagagaagggtcttgccacttctctgcagaatgatcttcaggaggtgcccaagttatatccagaatttccacctaaagacatgtgtgaaaaattaccagagcctcagtcttttagttcagctcctcagcatgctgaagtaaatggaaacacctcaactccaagtgcaggggcagttgctgcacctgcttctctgtctttaccatcacaaagttgtccagcagaagctcctcctgcttatactcctcaagctgctgaaggtcactacactgtatcctatggaacagattctggggagttttcatcagttggagaggagttttataggaatcattctcagccaccgcctcttgagaccttagggctggatgcagatgaattgattttgataccaaatggagtacagattttttttgtaaatcctgcaggggaggttagtgcaccttcgtatcctgggtaccttcgaattgtgaggtttttggataattctctcgatacggttctaaaccgtcctcccgggtttcttcaggtttgtgactggttatatcctctagttcctgatagatctccggttctgaaatgtactgcgggagcctacatgtttcctgatacaatgctacaagcagcaggatgctttgtgggggtcgtcctgtcctctgagttaccagaggatgatagagagctctttgaggatctgttaaggcaaatgtctgaccttcggctccaggccaactggaacagagcagaagaagaaaatgaattccaaatccctggaagaactagaccctcctctgaccaactaaaagaagcctctggcactgatgtgaaacagttggaccaaggcaataaggatgtacgtcataaaggaaaacgtggaaaaagggctaaagatacttcaagtgaagaagttaacctgagtcacattgtaccatgtgagccagttccagaagaaaagccaaaagaattacctgaatggagtgaaaaagtggctcacaacattttgtcaggtgcttcctgggtgagttggggtttagtcaaaggtgctgagattactggtaaggcaatccagaaaggtgcttctaaactccgagagcggattcaaccagaagaaaaacccgtggaagttagtccagctgtcaccaagggactttatatagcgaagcaagctacaggaggagcagcaaaagtcagtcagttcctggttgatggagtttgcactgtagcaaattgcgttggaaaagaactagctccacatgtcaagaagcatggaagcaaacttgttccagaatctcttaaaaaagacaaagatgggaaatctcctctggatggtgctatggttgtagcagcaagtagtgttcaaggattttcaactgtctggcaaggattggaatgtgcagctaaatgcatcgttaacaatgtttcagcagaaactgtacaaactgtcagatacaaatacggatataatgcaggagaagctacccaccatgcggtggattctgcggtcaatgttggcgtaactgcctacaatattaacaacattggtatcaaagcaatggtgaagaaaactgcaacacaaacaggacacactctccttgaggactatcagatagttgataattctcagagggaaaatcaagaaggagcagcaaatgtcaacgtgagaggggagaaggatgagcagacgaaggaagtaaaggaggcaaagaagaaagataaatgatgaagtgctgggaatcacttataccaaagccttatgaaatggatgaaattttgttaaataggcaaatgtggaattcctcacagattaaccagtattttttaaatgtattcattcctacaaattaactttcataaattttatggcatgtcttctatttaaaaggaaaagaataagtattcttgcatctggccttagaaatgtgaagttatattctcaagtttatttttttccaagtgtagctaaaatatttttgcaggtaaaataaagctgatagtacatgtgttgttcaaaccttgttaaacctaatattgaactatttttatatctgctgtctttcagaaggcaaataggaaactatatatttgcttaaaaattggcatttagtaaccttaattctttttatagaaggaatgacttaaagtattgtcccctctttttgcactaattgtggatttttttagatgcttctcaaaattttcagtgtgtaagctaaacaaaaactaaaactaagaattctcaaaaaaacttgttcaaaacagggaaagactgatgaaaagtaaaatggactacttttgtaacttacctgtttgttaggaaatggaatggtctctttgatttaaaataaataaaaatagattattacgtcttttgtattgagactgtattgttatgagcctaggaaatttgggaacatgattgtattgtattaaaattcgaagtgattattatcagcttaattggattaaaaaagtacttcaagaaattattttatcatatctgcttctgtttttccaaaaggttaaaacttgtaaaaaaaatatatataaacaattgagtttactaatggtaaacatttttattctgggattcggtcattggaatttatattaaaagacaagttattaaaaaggaaaggttctattcataatcagggtaaagaatatgaaaaccttagacgtaatccatggtggataggcattatggtttccactttggcagaaggcagactattcacagccctatttacttacataggctaaaaaactatgtaactaaatacctaatggtatttaatttttgtttattgaatttaagagattggtattagttttcatagctgtagtccattctaataatttctgatcttctagtggctacttaattagacattatttgaagctgtctgaagaatgcactttatgaattaaaaaactgaattgcctgacctcgttatcacatgagcttatattttgggaacacatagaactgatggaggcttttcctaaggccaaggataatgtactagttgttaaaatggaaataaaagtgaagtggtaaat

SEQ ID NO: 4428 - DNA, 1990 bp, Homo sapiens
agggagctctcgaggcaacgccggggcgcccgaggtctggaaggcgcagaaatggagcaagagccacaaaatggagaacctgctgaaattaagatcatcagagaagcatataagaaggcctttttatttgttaacaaaggtctgaatacagatgaattaggtcagaaggaagaagcaaagaactactataagcaaggaataggacacctgctcagagggatcagcatttcatcaaaagagtctgaacacacaggtcctgggtgggaatctgctagacagatgcaacagaaaatgaaagaaactctacagaatgtacgcaccaggctggaaattctagagaagggtcttgccacttctctgcagaatgatcttcaggaggtgcccaagttatatccagaatttccacctaaagacatgtgtgaaaaattaccagagcctcagtcttttagttcagctcctcagcatgctgaagtaaatggaaacacctcaactccaagtgcaggggcagttgctgcacctgcttctctgtctttaccatcacaaagttgtccagcagaagctcctcctgcttatactcctcaagctgctgaaggtcactacactgtatcctatggaacagattctggggagttttcatcagttggagaggagttttataggaatcattctcagccaccgcctcttgagaccttagggctggatgcagatgaattgattttgataccaaatggagtacagattttttttgtaaatcctgcaggggaggttagtgcaccttcgtatcctgggtaccttcgaattgtgaggtttttggataattctctcgatacggttctaaaccgtcctcccgggtttcttcaggtttgtgactggttatatcctctagttcctgatagatctccggttctgaaatgtactgcgggagcctacatgtttcctgatacaatgctacaagcagcaggatgctttgtgggggtcgtcctgtcctctgagttaccagaggatgatagagagctctttgaggatctgttaaggcaaatgtctgaccttcggctccaggccaactggaacagagcagaagaagaaaatgaattccaaatccctggaagaactagaccctcctctgaccaactaaaagaagcctctggcactgatgtgaaacagttggaccaaggcaataaggatgtacgtcataaaggaaaacgtggaaaaaggctaaagatacttcaagtgaagaagttaacctgagtcacattgtaccatgtgagccagttccagaagaaaagccaaaagaattacctgaatggagtgaaaaagtggctcacaacattttgtcaggtattacagtaatgttaatttttttccctgtatgacattaagcctttggaaccaaataaagatattgtttattagggaatactgagaaagataatattttgtattttggttttaaatgatcaatttagaaataaatgtagaaggaactagtcttttgaaacatcagatattgtcatataagtataaattcttcctggcctattattctgttctactattgggaaaatggatagtgaaaagcttcaggaatcttcaaattcttaatagttctgaatctaaaattagttatgttcgtttcccctttgaagctccctcttaacctccccctacccctgtccctcagctgtggtctgaatgtgtcccttcaaaattcatatattgaaatcctaacccctgaggtgatggttttaggaggtggggcctttggaaggtgattaggtcatgagggaggagccctcatcaatgggattagtcccttataaaagagatcccaaagagctgccttgtccctttcactatgtgaggaagcagtaagaaggtgtcattctatgaaccaggaagtgggcccctcaccagagaccaaatgtaccagcaccttagtcttgtacttcccagcctctagaattgtgagaaataaatttttgttgttaat

SEQ ID NO: 4429 - DNA, 4172 bp, Homo sapiens
ctgcgagtcaggccgtgatggcggacgcctgggaagagattaggcggttggcggccgacttccagcgggcgcagttcgccgaggccacgcagaggttgtccgagcggaactgcattgagattgttaataaattgattgctcagaaacagctagaagtagttcatacactcgatggaaaggaatatattactccagcccaaattagtaaagaaatgagagatgagctacatgtccgaggtggtcgagtaaacattgttgatctacaacaggtaattaatgtggacctgattcatattgaaaatagaattggtgacattattaaatcagaaaagcatgttcagttagtgttgggacaactgatagatgagaattatttggatcggttggcagaagaggtcaatgataaattgcaagaaagtggtcaggtcaccatatcagaactgtgtaaaacttatgatcttcctgggaactttctgacacaggcactaactcagcgacttggtagaattatcagtggacatattgatcttgataatagaggagtaatttttacggaagcttttgtagctcgacataaagcacgtatccgtggactattcagtgctattacccggcctacagctgtgaattctttgatttcaaaatatggatttcaggagcagcttctttactctgtgcttgaggaacttgttaatagcggacgcttacgaggcactgtggttggtgggagacaggataaagctgtgtttgtccctgacatctactccaggacacagagtacttgggtggattcctttttcaggcagaatggctatctagaatttgatgctttgtccagacttggaatcccagatgctgtaagctacataaagaaaagatataagactacacaactcttgtttttgaaagcagcttgtgttggtcaaggacttgtggatcaagtggaagcatcagtagaagaagccatcagctctggaacatgggttgatattgcacctctgctacccacttctttatcagttgaagatgctgccatattgcttcagcaggtgatgagggcattcagcaaacaggcctcaactgtagtctttagcgacactgttgtagtcagtgaaaaatttataaatgactgtacagaactgttccgtgagctgatgcaccagaaagctgaaaaggaaatgaaaaataatcctgtgcatttaatcactgaagaagatctgaaacaaatctccactttagaaagcgttagtacaagtaaaaaggataaaaaagatgagcgaagaaggaaagcaacagagggcagtggaagcatgagaggaggaggtgggggcaatgccagagagtacaaaattaaaaaagtcaagaagaaaggaagaaaagatgatgatagtgatgatgaatctcaatcatcccacactggaaagaagaagccagagatcagttttatgttccaggatgagattgaagattttttaagaaaacacatacaagatgcccctgaggagtttatttcggaacttgctgagtacttaataaaacctcttaataaaacttatctcgaggtggtacgttcagtattcatgtcttcaacaacttctgcttctgggacgggcagaaaacgcacaatcaaggacttgcaagaagaagtttcaaacctgtacaataacattaggttatttgaaaaagggatgaagttttttgcagatgacacacaggctgctcttaccaaacacttgctgaagtcagtgtgtactgatatcactaacctcattttcaacttcttagcttcggatttaatgatggcagtagacgatcctgcagccattacaagtgaaataagaaagaaaattttaagtaaattatcagaagaaaccaaagtagctcttacaaaactccataactctctgaatgaaaagagcatagaagactttatttcttgtctggattctgcagcagaagcttgtgatattatggtgaaaaggggagacaaaaaaagggaaagacagatactgttccaacatcgacaagcactggctgaacagctaaaggtcacagaagaccctgctcttattctgcacctcacatcagtcctgttgtttcagttttcaacccacagcatgctccatgcacctggaagatgtgtcccacagatcattgcttttcttaatagtaaaattccagaggatcagcatgctcttttggtaaagtatcaaggtttggttgtaaagcagctagtcagtcaaagtaagaagactgggcagggagattatcccttgaataatgaattagacaaagaacaagaagatgttgccagtactactcgtaaagagcttcaagaactttcttcatccattaaagaccttgttctcaaatctaggaaatcatctgtgacggaagagtaatgatcttaatttacatttgtcatatagtaagcattttcccccaaggttgaaggtgagtggtcacaaaaaagtagtcactatacaactcccctctccctgcaaaaaccacctcatacacacacaattcagttaaaacagtagtattgtattaaatgtaaatcttaaaaagatgtgaatttttgtaaattgggttcttcatggaagtttttttccacctgattttcacacaaatactatatgaaatttttcacattattttcacataattttaaaaattacatatttcaggtttgttctctttccaaatgttgaatgaaaaacaaattttccaatccatttatccctggggaaggattcatttgttgcgagtgccagtatacttaaatgtatactttatatacatttaagcagaaatttaaaatgtggtcttttttttttaaaagaaacacttctgtgtcagaaatgaaaataaatcatgttttttatttttaaatagaaagcacttcaaaactaaaatacagaaatttacaaaaaagaaaaattattactaagcccttgctcttatttttggcagaataaacattgattttggttggggctgcaaggatgcctttacaggtgcacaagaacgctagagtggcccatgcattgctgtgttctcttctaaaacaagctactaacaagagagagaacacatgcaatttattaccagtaagcataagtcatatttaacattggaataactaagcattttatacaaagatttttctttgacccagtttgcatttgtacattttatttttttagttcaacagctgctctgtcacataatactttgtaaatactagtgtgaaaaacagataggatgccttttccagtggtaggagcatctgtaagtgcatttaaatcattagaagcttttttccaaaactagaaacccttattaaaaaatagacatttttttctaaagattattagttaaaaataactaaaagagttccttagagtaatcatttcaaccaaatgaatttcaagcaacaacttacttactatttatcaaaaagggatttaattattttgaatataattataaattaaatttcaaatatttaaaaatactattttatataattccttatgacattttaaactttatattttaaaatatttgaatacgaaaagatcagtctacctctactccattctagacaaagtattaatccttagtgaaagtaattaattaaattgccaacttggcattattattaaacttgataggaacgcaacattaaatttaaaaatgttttcccgtgggtaattttctattatatattttcatatgggcaaagggaaaaaatgataaatcctctgtaatcacaaaccccaatttcgttttgtttattcagcttctaaaatattgaacacccagacttttaattcaacctttaagaaccttatcatttatgtttcagtagatatcaaagtaatccatgtttgtgtcaaatgatcatagaaaataaatagaagagacagtgaagcaagtaaaaagaaaagcattgttttaatttgtttgcattaatttttttcatttgtcaaaatgcttcttttgttgccacagtaaagaacagtttttattgttttgtaagtaaaattacgtagctgattttgtatgtaaagattaatttccataataaaaattattgtatgtttactgtgatcttaatgggcagggttaagaaagttatttaaaataaagttacctattctact

SEQ ID NO: 4430 - DNA, 898 bp, Homo sapiens
cccgctgtcctcaccgcaatggcggctgtgagggtcctggtggcctcgaggctcgctgcggcatctgcattcacgtccctgtcccccggcggtcggacgccttcccagcgcgcagcccttcacctctccgtgccgcgccccgcggccagggtcgcgctggtgctgtctggatgcggagtctacgatgggaccgagatccacgaggcctcggcgatcctggtgcacctgagccgtggaggggctgaagtccagatctttgctcctgacgtccctcagatgcacgtgattgaccacaccaaggggcagccgtccgaaggcgagagcaggaatgttttgaccgagtctgcgaggatcgcccgtggcaaaatcacagacctggccaacctcagtgcagccaaccatgatgctgccatctttccaggaggctttggagcggctaaaaacctcttgtgctgcattgcacctgtcctcgcggccaaggtgctcagaggcgtcgaggtgactgtgggccacgagcaggaggaaggtggcaagtggccttatgccgggaccgcagaggccatcaaggccctgggtgccaagcactgcgtgaaggaagtggtcgaagctcacgtggaccagaaaaacaaggtggtcacgaccccagccttcatgtgcgagacggcactccactacatccatgatgggatcggagccatggtgaggaaggtgctggaactcactggaaagtgacgcgcatggacggggcccagctaggcgccaggacttggcctcaccctctggctgaggagctgtcggctgctttccatccagctgggagtctggcaggcccttttttttttttctttgccgaaacctgcaggcgttctctctctaaggaggatgtgctgcagtgcat

SEQ ID NO: 4431 - DNA, 1902 bp, Homo sapiens
tcttctcctctctgcaaacctctcctgtgctgatgcctgggcaccagagatgaggtgggagcagtacctgccctgggcggggctcacggtctagtgcccacagcagctgtccagggagtgcaggctgaagcagtgagatggcaggggggacggagtgagaaaagagcctctcagaagggcaggaggggcggggaggggcggggtggcacatggagctgccaggaactccagaggcagctctgttcccagagttcagaaacctccaagaaaagctggtggcattgtccgttttgttgtttgcctatctggcctttggctattgactggatggcatcttgggaatcctctgaagggctggagtttaccccaagcacagggacagagggagcaggtggagtcacttcttgttgatgtccagctgagctgggctggtggctgcctcagaagggagggggcagctactaggagcagcagcctcaccccagggctctgtggacctccttagcctgtgatggccttggcaatggggatggcctggttgggggactgagcaaaaggcaggcagtagggatgggtgttcccagccttgagtcagatcctgagaagctccagggcggggcacgttctgtctctgccatctggaaacctaccagctacagcaattgtcacctccaacaagaacccctgagcccggaagctgggtgagaggaacctccaggtacaactctccacccagcacagaccaggtctgctgatctgtgccattccctgatgcactgtggcatcccgtgaccacagactgtcacccacatccctagaacctgcacggtgcttgcttggtacagactaactactgagtgtccattaagccaaactggtaccaccatctggacctgtgaaatgtcctttaacactcccccacccaccccttcctgccacgcccctccctcccttccacgtccctcccttccacgcccctccctcccttccatgcccctcccttccacacccctccctccctccctcccacaaacttgtcttgagacctactgtgttgggtggcgaggagacgaaggccttgggaaccacattcctgttgctcccgtggcccagaaccagccctcatgcctcctgcgcacaccatgttcacctgttctccccctgagctccagcgcagagaccctccctgcccaagttcactgcagtgtctcagcccccagctgagcgcctggcatagagcaggcactttccaaattttttaatgatctagaaatggaataaatactgaggggctcagggtgtctcacagcaagtgtgaaagggcttgggtgcagtggctcacgcctgtaatcccagcactttgggaggccaaggcaggcagatcacctgaggtcaggagattgagaccagctgaccaatatagagaaaccccgtctctactaaaaatacaaaatcagctgggcgtggtgttgcatgccagtaatcccagctactcgggaggctgaggcaagaggatcacttgaacctgggaggtggagattgtggtgagctgagattgcaccattgcactccagcctggacaatgagagtgaaactctgtctcaaaaaaaaaaaccaaaaaggccgggcgcggtggctcacgcctgtaatcccagcactttgggaggccgaggcgggcagatcacgaggtcaggagatcgagaccatcctggctaacacggtgaaaccccgtctctactaaaaatacaaaaaattagccgggtgcggtggcgggcacctgtagtcccagctactagggaggctgaggcaggagaatggcctgaacccgggaggcggagcttgcagtgagccgagatcgcgccactgtactcccgcctgggcaaaagagcgagactccgtctt

SEQ ID NO: 4432 - DNA, 2809 bp, Homo sapiens
cgcacgcaggcatataaacgtaggtttttgatgctcctctgcctgttgaccccgctattttcatgtttccaacaggtttttcttcccccagtccctcagctgctgctgctgctcaggaggtcagatctgccactgatggtaataccagcaccactccgcccacctctgccaagaagagaaagttaaacagcagcagcagtagcagcagtaacagtagtaacgagagagaagactttgattccacctcttcctcctcttccactcctcctttacaacccagggattcggcatccccttcaacctcgtccttctgcctgggggtttcagtggctgcttccagccacgtaccgatacagaagaagctgcgttttgaagacaccctggagtttgtagggtttgatgcgaagatggctgaggaatcctcctcctcctcctcctcatcttcaccaactgctgcaacatctcagcagcagcaacttaaaaataagagtatattaatctcttctgtggcttcggtgcatcatgcaaacggcctagccaaatcttctaccaccgtctctagctttgctaacagcaaacctggctctgctaagaagttagtgatcaagaactttaaagataagcctaaattaccagaaaactacacagatgaaacctggcaaaaactgaaagaagcagtggaagctattcagaatagtacttcaattaagtacaatttagaagaactctaccaggctgtagaaaatctctgttcttacaagatttctgcaaacttgtacaaacagctgagacagatctgcgaagatcacatcaaagcacagattcatcaattcagagaggattcattggatagcgttctttttttaaagaagattgatagatgctggcaaaaccattgcagacaaatgatcatgatcaggagcatttttttgtttctggatagaacttacgttcttcagaattcaatgctaccctccatttgggacatgggactggagttatttagggctcatattataagtgatcagaaagtgcagaataagacaattgatggcattcttctcttgattgagagggaaaggaatggtgaagcaattgatagaagtttacttcgaagccttttaagcatgctgtctgatttgcaaatttatcaagattcttttgaacaacgatttttggaagaaactaaccggctctatgcagctgaaggccaaaaattaatgcaagaaagagaggttcctgaatatctacatcatgttaacaaacgtctagaagaagaagcagacagacttattacttacttagatcagaccacccagtaagtcattaattgctactgtagaaaaacaacttctaggtgaacacttaacagcaattcttcagaaaggtttaaataacctccttgatgaaaaccgaattcaagatttgtctcttctgtatcagctcttcagtagagttcgaggtggagttcaggttcttttgcagcagtggatcgaatatatcaaggcatttggcagcactattgtaattaatcctgaaaaagataaaaccatggttcaagaattgctggattttaaagataaggttgaccatataattgatatctgctttctgaagaatgagaaatttatcaatgccatgaaagaagcatttgaaacgttcattaacaaaagaccaaataaaccagctgaacttatagctaagtatgtagattcaaaacttcgtgcaggcaacaaagaagctacagatgaagaacttgagaaaatgttggataaaattatgatcatatttagatttatctatggcaaggatgtttttgaggccttctataagaaagatttagccaagcgcctgttagtcggaaagagtgcatctgtagatgctgaaaaatcaatgctgtccaaacttaaacatgaatgcggagctgctttcaccagcaaacttgaaggaatgtttaaagacatggaactttctaaagacatcatgattcagttcaaacaggtaaaatatatgcagaatcagaatgttccgggaaatattgagttaactgtgaatatcctgacaatgggctattggccgacatatgtgcctatggaagttcatttaccaccagagatggtaaaacttcaggagattttcaagacattttacctaggcaaacatagtggcaggaaacttcagtggcagtcaaccctaggacactgtgtgttaaaagcagaatttaaagagggtaaaaaggaactccaggtctctctttttcaaacactggtgctgctaatgtttaatgagggagaggagttcagtttagaagagatcaagcaggcaactggaatagaggatggagagttaaggagaacactgcagtcattagcctgtggcaaagctagagttctggcgaaaaatccaaagggcaaagacattgaagatggtgacaagttcatttgtaatgatgatttcaaacataaacttttcaggataaagatcaatcaaatccagatgaaagaaacggttgaagaacaagcaagcactacagaaagagtatttcaagacagacagtatcaaattgatgctgcaattgttcgaattatgaagatgagaaagacacttagccacaatctccttgtttcagaagtgtacaaccagttgaaatttccagtaaagcctgctgatcttaagaagagaatagaatctttaattgaccgggactacatggaaagagataaagaaaatccaaaccagtacaactatattgcatagaatgttggccttgcagcatttggtgtcatatgcagtagccagtggataaact

SEQ ID NO: 4433 - DNA, 2374 bp, Homo sapiens
aggacaccaaggaccgcctgggccggacgaatgcgagattttggacatcatcatgaaaatgtgctcttgctgtgaatgcaagtgcggccccatcgacctcctgttcgtgctggacagctcagagagcattggcctgcagaacttcgagattgccaaggacttcgtcgtcaaggtcatcgaccggctgagccgggacgagctggtcaagttcgagccagggcagtcgtacgcgggtgtggtgcagtacagccacagccagatgcaggagcacgtgagcctgcgcagccccagcatccggaacgtgcaggagctcaaggaagccatcaagagcctgcagtggatggcgggcggcaccttcacgggggaggccctgcagtacacgcgggaccagctgctgccgcccagcccgaacaaccgcatcgccctggtcatcactgacgggcgctcagacactcagagggacaccacaccgctcaacgtgctctgcagccccggcatccaggtggtctccgtgggcatcaaagacgtgtttgacttcatcccaggctcagaccagctcaatgtcatttcttgccaaggcctggcaccatcccagggccggcccggcctctcgctggtcaaggagaactatgcagagctgctggaggatgccttcctgaagaatgtcaccgcccagatctgcatagacaagaagtgtccagattacacctgccccatcacgttctcctccccggctgacatcaccatcctgctggacggctccgccagcgtgggcagccacaactttgacaccaccaagcgcttcgccaagcgcctggccgagcgcttcctcacagcgggcaggacggaccccgcccacgacgtgcgggtggcggtggtgcagtacagcggcacgggccagcagcgcccagagcgggcgtcgctgcagttcctgcagaactacacggccctggccagtgccgtcgatgccatggactttatcaacgacgccaccgacgtcaacgatgccctgggctatgtgacccgcttctaccgcgaggcctcgtccggcgctgccaagaagaggctgctgctcttctcagatggcaactcgcagggcgccacgcccgctgccatcgagaaggccgtgcaggaagcccagcgggcaggcatcgagatcttcgtggtggtcgtgggccgccaggtgaatgagccccacatccgcgtcctggtcaccggcaagacggccgagtacgacgtggcctacggcgagagccacctgttccgtgtccccagctaccaggccctgctccgcggtgtcttccaccagacagtctccaggaaggtggcgctgggctagcccaccctgcacgccggcaccaaaccctgtcctcccacccctccccactcatcactaaacagagtaaaatgtgatgcgaattttcccgaccaacctgattcgctagattttttttaaggaaaagcttggaaagccaggacacaacgctgctgcctgctttgtgcagggtcctccggggctcagccctgagttggcatcacctgcgcagggccctctggggctcagccctgagctagtgtcacctgcacagggccctctgaggctcagccctgagctggcgtcacctgtgcagggccctctggggctcagccctgagctggcctcacctgggttccccaccccgggctctcctgccctgccctcctgcccgccctccctcctgcctgcgcagctccttccctaggcacctctgtgctgcatcccaccagcctgagcaagacgccctctcggggcctgtgccgcactagcctccctctcctctgtccccatagctggtttttcccaccaatcctcacctaacagttactttacaattaaactcaaagcaagctcttctcctcagcttggggcagccattggcctctgtctcgttttgggaaaccaaggtcaggaggccgttgcagacataaatctcggcgactcggccccgtctcctgagggtcctgctggtgaccggcctggaccttggccctacagccctggaggccgctgctgaccagcactgaccccgacctcagagagtactcgcaggggcgctggctgcactcaagaccctcgagattaacggtgctaaccccgtctgctcctccctcccgcagagactggggcctggactggacatgagagccccttggtgccacagagggctgtgtcttactagaaacaacgcaaacctctccttcctcagaatagtgatgtgttcgacgttttatcaaaggccccctttctatgttcatgttagttttgctccttctgtgtttttttctgaaccatatccatgttgctgacttttccaaataaaggttttcactcctc

SEQ ID NO: 4434 - DNA, 988 bp, Homo sapiens
tcaacaagtgcgggcctggctcagcgcgggggggcgcggagaccgcgaggcgaccgggagcggctgggttcccggctgcgcgcccttcggccaggccgggagccgcgccagtcggagcccccggcccagcgtggtccgcctccctctgggcgtccacctgcccggagtactgccagcgggcatgaccgacccaccaggggcgccgccgccggcgctcgcaggccgcggatgaagaagaaaacccggcgccgctcgacccggagcgaggagttgacccggagcgaggagttgaccctgagtgaggaagcgacctggagtgaagaggcgacccagagtgaggaggcgacccagggcgaagagatgaatcggagccaggaggtgacccgggacgaggagtcgacccggagcgaggaggtgaccagggaggaaatggcggcagctgggctcaccgtgactgtcacccacagcaatgagaagcacgaccttcatgttacctcccagcagggcagcagtgaaccagttgtccaagacctggcccaggttgttgaagaggtcataggggttccacagtcttttcagaaactcatatttaagggaaaatctctgaaggaaatggaaacaccgttgtcagcacttggaatacaagatggttgccgggtcatgttaattgggaaaaagaacagtccacaggaagaggttgaactaaagaagttgaaacatttggagaagtctgtggagaagatagctgaccagctggaagagttgaataaagagcttactggaatccagcagggttttctgcccaaggatttgcaagctgaagctctctgcaaacttgataggagagtaaaagccacaatagagcagtttatgaagatcttggaggagattgacacactgatcctgccagaaaattttcctactctcacactggttctcaatgaaaaatagtgtctttgtgattttgagtaaagctcctatctgtttt

SEQ ID NO: 4435 - DNA, 1238 bp, Homo sapiens
gtgttggtcccagcggttcagctgaggtagggacgtgctgtaggccggaatgttaccggctgttggatctgcggatgaggaggaggatcctgcggaggaggattgtcctgaattggttcccattgagacgacgcaaagcgaggaggaggaaaagtctggcctcggcgccaagatcccagtcacaattatcaccgggtatttaggtgctgggaagacaacacttctgaactatattttgacagagcaacatagtaaaagagtagcggtcattttaaatgaatttggggaagggaagtgcgctggagaaatccttagctgtcagccaaggtggagagctctatgaagagtggctggaacttagaaacggttgcctctgctgttcagtgaaggacagtggccttagagctattgagaatttgatgcaaaagaaggggaaatttgattacatactgttagagaccactggattagcagaccctggtgcagtggcttctatgttttgggttgatgctgaattagggagtgatatttatcttgatggtatcataactattgtggattcaaaatatggattaaaacatttaacagaagagaaacctgatggccttatcaatgaagctactagacaagttgctttggcagatgccattctcattaataaaacagacctggttccagaagaagatgtaaagaaattaagaacgacaattagatccataaatggactaggacaaatcttagaaacacaaagatcaagtttgcagaaaaaacttcagcatgtgccaggaacacaacctcaccttgatcagagtattgttacaatcacatttgaagtaccaggaaatgcaaaggaagaacatcttaatatgtttattcagaatctcctgtgggaaaagaatgtgagaaacaaggacaatcactgcatggaggtcataaggctgaagggattggtgtcaatcaaagacaaatcacaacaagtgattgtccagggtgtccatgagctctatgatctggaggagactccagtgagctggaaggatgacactgagagaacaaatcgattggtcctccttggcagaaatttagataaggatatccttaaacagctgtttatagctactgtgacagaaacagaaaagcagtggacaacacgtttccaagaagatcaagtttgtacataacactagaggcatttcttatcaaaaggattggataataaaaataagtttctactgggt

SEQ ID NO: 4436 - DNA, 5874 bp, Homo sapiens
  misc_feature (1237)..(1344): n is a, c, g, or t
ggagcctaccataagcacctcatggaactcgctcttcagcaaacatatcaggacacctgtaattgcatcaagtcgcggatcaagttggaatttgaaaaacgtcaacaggagcggcttctgctctccctgctgccggcccacatcgccatggagatgaaagcggagatcatccagaggctgcagggccccaaggcgggccagatggagaacacaaataacttccacaacctgtatgtgaagcggcatacaaacgtgagcatcttatacgctgacatcgttggctttacccggctggcaagtgactgctccccgggagaactagtccacatgctgaatgagctctttggaaagtttgatcaaattgcaaaggagaatgaatgcatgagaattaaaattttaggagactgctactactgtgtatctggactccctatatctctccctaaccatgccaagaactgtgtgaaaatggggctggacatgtgtgaagccataaagaaagtgagggatgctactggagttgatatcaacatgcgcgtgggcgtgcattctgggaatgtcctgtgtggcgtgattggtctgcagaagtggcaatatgatgtgtggtcacatgatgtgaccttggccaaccacatggaagctggaggggtccctggacgtgttcacatttcttctgtcaccctggagcacttgaatggcgcttataaagtggaggagggagatggtgacattagggacccatatttaaaacagcacctggtgaaaacctactttgtgatcaaccccaagggagaacgacggagcccccagcatctcttcagacctcgccacacccttgatggagccaaaatgagggcctcggtccgcatgacccggtacttggagtcctggggggcagccaagccctttgcacacctacatcacagggacagcatgaccacagagaacggcaagatcagcaccacggatgtacccatgggtcagcataattttcaaaatcgcaccttaagaaccaagtcacaaaagaagagatttgaagaagaattgaatgaaaggatgattcaagcaattgatgggattaatgcacagaagcaatggctcaagtctgaagacattcagagaatctcactgcttttctataacaaagtactagaaaaagagtaccgggccacggcactgccagcgttcaagtattatgtgacttgtgcctgtctcatattcttctgcatcttcattnnnnnnnnnnnnnnnnnnnnnnnnnnnnnnnnnnnnnnnnnnnnnnnnnnnnnnnnnnnnnnnnnnnnnnnnnnnnnnnnnnnnnnnnnnnnnnnnnnnnnnnnnnnncaatgcagcaaaaaagcctctcccctgctcatgtggcttttgaagtcctcgggcatcattgccaaccgcccctggccacggatctctctcacgatcatcaccacagccatcatattaatgatggccgtgttcaacatgtttttcctgagtgactcagaggaaacaatccctccaactgccaacacaacaaacacaagcttttcagcctcaaataatcaggtggcgattctgcgtgcgcagaatttatttttcctcccgtactttatctacagctgcattctgggactgatatcctgttccgtgttcctgcgggtaaactatgagctgaagatgttgatcatgatggtggccttggtgggctacaacaccatcctactccacacccacgcccacgtcctgggcgactacagccaggtcttatttgagagaccaggcatttggaaagacctgaagaccatgggctctgtgtctctctctatattcttcatcacactgcttgttctgggtagacagaatgaatattactgtaggttagacttcttatggaagaacaaattcaaaaaagagcgggaggagatagagaccatggagaacctgaaccgcgtgctgctggagaacgtgcttcccgcgcacgtggctgagcacttcctggccaggagcctgaagaatgaggagctataccaccagtcctatgactgcgtctgcgtcatgtttgcctccattccggatttcaaagaattttatacagaatccgacgtgaacaaggagggcttggaatgccttcggctcctgaacgagatcatcgctgactttgatgatcttctttccaagccaaaattcagtggagttgaaaagattaagaccattggcagcacatacatggcagcaacaggtctgagcgctgtgcccagccaggagcactcccaggagcccgagcggcagtacatgcacattggcaccatggtggagtttgcttttgccctggtagggaagctggatgccatcaacaagcactccttcaacgacttcaaattgcgagtgggtattaaccatggacctgtgatagctggtgtgattggagctcagaagccacaatatgatatctggggcaacactgtcaatgtggccagtaggatggacagcaccggagtcctggacaaaatacaggttaccgaggagacgagcctcgtcctgcagaccctcggatacacgtgcacctgtcgaggaataatcaacgtgaaaggaaagggggacctgaagacgtactttgtaaacacagaaatgtcaaggtccctttcccagagcaacgtggcatcctgaagagtcaccttcattttggcaagaagactgtattttcaggaaggtatcacacactttctgactgcaacttctgtcccttgtttttgatgtgcgtgctgtctgtcctatggagcctctgcagactcgttctcgtgacccagtggcataccgtttggtgtctgatgtgtgcccagatcgttctgccacttgcactgtgcttgctcctaagcaaaagggaaaaggagcgcgcgtgatagaagaaaagcactgggagaactaacagaggagaaaggtgaaacacacacacattcttaaggcaataaaactagggggtgtatattatcttctggtgcatgttcttttctggaaaatatggtagctcgccaaccgcatctgctcatctgatattcaaacacacagtattcgtgaataagttgattctgtcccccacgtggactctgtgctcacccattgtctcattgccagtggtgtccaagggcccccgttgggacccacggctctcgtccctctgctccgtgtgtctcatgccagcagcacgtcgccatccgtcaccagaattagtcctcacagcctaggaccagttttgtatcaaactcgtctgatgttttgatgccatttgtcttttgtaaagttaattcattaaaagttttatgtactttgatttacagtgcctgtatcttttattttcctgtcttctttctcctgtggtttgctccagaattaaggtttgttttccatccattctcccttttgacacagttgtttcagaaagagctctccagaagccaatattgagatgtaattcagattaggacacagtgtgtgacgcagataactggttactcagctccctggaaagcaggcaagcatgttgaatgtatctagtggtctgattttaatttgggcatctctagagaacgctttcagggaaaaatactttaatagtaaaaagattctctgcgagcaacagtgccccctccgtccactacgctcctgtctccaagaatgttttgctagagctaacagacatagactgcaaaagaataatttggaatcagctatgcaaatcagtctcacaatagcgtgagctaactgagagaagtactaagacccacaaactgcctgttaagtctgagaaggctaaagaagacacacagccaacgttcatgcatttttaaagacagaaggccttgaagaatttgttcttgtaaatccaacacaagttgtttggtacttttaacataaagaaatcatactttgccaaatagtgaaaagtagagcaatcgtgtataagctaatgtttaaaagcaaaactgcaaattgtagcccagttggtcaaacttgttttctttttataactcatggcaggcatctgtaagaagtagagaacccagatgatctcttaggaagccttttattcgtgggaactcgaacttgaagcacaagttcctggtttgaatcctggctctgattttttactggctgtgtgactttgaacacatctcttagtccctcttaggagtactttccttattggcaacttatggactcgctagtgattaaacgaggcaatgactgtgagcgagcctggcaggtgccccgtggtacattcacagcacgggcacagctgctgtgccaggactgtgactcattcccagtaaaaggcacttatcgaagctgataaccgtccttcatcaccgaagtgtgagtagagcatgacttatttagtattctgcctcaatggggaattttttgatcctgtaatcacaactcagcattggccttaatatacctaaatctccaaaaacagtgattaaagcaagagaattattacaagggcttttctctttcctctaactcattcttcacggatgccgtagcgtttccgtgagctcaaactggccttggtgtaaaatgtgtaaggatgagcagcaggcgtgcctcgtgggttcttcctctgttacatcctgctacactcatccgcaggtcaccttagttcacctaccctgagtgaacacccccagctgggtggtccaccaagttctcataaacagagtccctcccattcccccacggggtgcaccgaacttgggtttgcgctaaaaagaactcaaaaggagaactgtgctctcccaaagccatatcaccagtcttaccaaacaataggcttttaaaagcattgagtcattgtcagaatccactatgggaagctctgtgtgtacctggtcccttctaggtgtggtcccataggagcagccttagcatcccctgtgaacttatcaaaaatgcaaattctcaggccccaacctgaaggaggaccctgaatttgagatccccggggctggggcccagcacaactgctgtttagtgaacaggttctccaggtgattctgatccctgatcaagcttcagacctccctccctccccagtgtttttgcaggtgaggaaacaggggcagagtaattcaggcacatgtgttcagagttccacagttgattagcagttgaggccaggctagaatggaaaactgcctgttccttgaatctgaaagagcattattcctggtcaaagctccttaaagttctgggcagctaaaagcatccctgtgagcaaaaatgccaggcagaaaactggcagtgcacctctcatcagcccaggtcccagtgccattggcttcaagaaaaaaaaaaaatctctccccaatgctctccttaacctttaagtcttacaggaagcctctcatagaaattgcctccagtccagtttcccaaaaaccccagtgttttacatatctgtttaggagtgtctaagttttgtcatcaatccaggatgttattcttccttcccaactcactgtgctcctaaaggcagcaaccattcatctttcctttgctctggatacaccgaatgaccaggtaacatcatcaggccgggtgcagtggctcctataatcccaatattttgggaggccgaggagagaggatcacttaagcccaggagtctgagaccagcctgggcaacatagcaagacccccatctctgcaaaaaaataagaaaattagcttggcatggtggcacgtgcctgtagtcccagctacatgggaggctgaggtgggaggatcacttgagcccaggaagtccagaacgtagtgagccttgattataccactgcactccagcctgggtgacagagcgagactctgtctcag

SEQ ID NO: 4437 - DNA, 771 bp, Homo sapiens
tcctccctaacagataaacagcccttgttcctcgggataaggactggcagtcccctgacaccctaagaccggcatctgtcgatgttatttccccagcatggccgaaacagaagccctgtcgaagcttcgggaagacttcaggatgcagaataaatccgtctttattttgggcgccagcggagaaaccggcagagtgctcttaaaggaaatcctggagcagggcctgttttccaaagtcacgctcattggccggaggaagctcaccttcgacgaggaagcttataaaaatgtgaatcaagaagtggtggactttgaaaagttggatgactacgcctctgcctttcaaggtcatgatgttggattctgttgcctgggtaccaccagagggaaagctggggcggtaaggaaggcatatgctcttttccctttttgctggccagtaatatcaaggattcttttcttgctcactctttttctttgtgcctgttgcaatgcttaaatgtgaataagcctttattgtttaagattctatatgctgcactaacctttggtatccttttaatagtactgataagttcgtctttcaaagtaatccttgagttcaggccccagtgctggagacgtcgtaaatatttacatgattttgcctattgtgattatcgctatcactacatcccctgactaagggaaaccatgatgtctgagtaaaactaattggtttatgctgttaacaatcagctgtttttccccttaataaatgtttgaaatttg

SEQ ID NO: 4438 - DNA, 1203 bp, Homo sapiens
caggagtgggagcgagcggcggggccagctgcgttctgagcctgggcgcagctgccatctgctctgggaagcaccagggtgtccccgccgccctcagctcgaagtcagccaccatggaggcgcaggcacaaggtttgttggagactgaaccgttgcaaggaacagacgaagatgcagtagccagtgctgacttctctagcatgctctctgaggaggaaaaggaagagttaaaagcagagttagttcagctagaagacgaaattacaacactacgacaagttttgtcagcgaaagaaaggcatctagttgagataaaacaaaaactcggcatgaacctgatgaatgaattaaaacagaacttcagcaaaagctggcatgacatgcagactaccactgcctacaagaaaacacatgaaaccctgagtcacgcagggcaaaaggcaactgcagctttcagcaacgttggaacggccatcagcaagaagttcggagacatgagttactccattcgccattccataagtatgcctgctatgagacgaaagtaggcggtacgaaccctaatggaggcagttttgaggaggtcctcagctccacggcccatgccagtgcccagagcttggcaggaggctcccggcggaccaaggaggaggagctgcagtgctaagtccagccagcgtgcagctgcatccagaaaccggccactacccagcccatctctgcctgtgcttatccagataagaagaccaaaatcccgctgggaaaaacccaggccttgacattgttattcaaatggcccctccagaaagtttaatgatttccatttgtatttgtgttgatgatggaccacttgaccatcacatttcagtattcatagatgactgtcacattttaaaatgttcccacttgagcaggtacacaactggtcataattcctgtctgtgtaattcgatgtatatttttccaaacatgtagctattgtttgctttgatttttgcttggcctcctttatgatgtgcatgtccttgaaggctgaatgaacagtccctttcagttcagcagatcaacaggatggagctcttcatgactgtctccagcaataggatgatttactataaatttcatccaactacttgtgatctctctcacctacatcaattatgtatgttaatttcagcaattaaaagaattgattttaatgac

SEQ ID NO: 4439 - DNA, 496 bp, Homo sapiens
gtttgttggagactgaaccgttgcaaggaacagacgaagatgcagtagccagtgctgacttctctagcatgctctctgaggaggaaaaggaagagttaaaagcagagttagttcagctagaagacgaaattacaacactacgacaagttttgtcagcgaaagaaaggcatctagttgagataaaacaaaaactcggcatgaacctgatgaatgaattaaaacagaacttcagcaaaagctggcatgacatgcagactaccactgcctacaagaaaacacatgaaaccctgagtcacgcagggcaaaaggcaactgcagctttcagcaacgttggaacggccatcagcaagaagttcggagacatgagacgaaagtaggcggtacgaaccctaatggaggcagttttgaggaggtcctcagctccacggcccatgccagtgcccagagcttggcaggaggctcccggcggaccaaggaggaggagctgcagtgctaa

SEQ ID NO: 4440 - DNA, 333 bp, Homo sapiens
atggaagccccagcacagcttctcttcctcctgctactctggctcccagataccaccggagaaattgtaatgacacagtctccagccaccctgtctttgtctccaggggaaagagccaccctctcctgcagggccagtcagagtgttagcagcagctacttatcctggtaccagcagaaacctgggcaggctcccaggctcctcatctatggtgcatccaccagggccactggcatcccagccaggttcagtggcagtgggtctgggacagacttcactctcaccatcagcagcctgcagcctgaagattttgcagtttattactgtcagcag

SEQ ID NO: 4441 - DNA, 2787 bp, Homo sapiens
ggggaatctagatctagtaagacttcttcaaaatcctgatttccaaggccgatccagctgcttattcccaagtgctgacccacagccttcttttattccaggatctgcaactgtatctttccaacctagccaaccagatagaccgggaaacaggaattggggatgtgcccctggtgattctattggatgacctgagtgaagcaggctccatcagtgagttggtcaatggggccctcacctgcaagtatcataaatggtaagtaagctgggatcaagacaaaattcatcgaagtgggaggagggagaacccagtccaggacaacctatgagttgtgtgcatgtggcagaaagcaagtgtgaaggcaagtctaagtgaatctttttcccctttctccctacagtccctatattataggtaccaccaatcagcctgtaaaaatgacacccaaccatggcttgcacttgagcttcaggtaagacctctagctctggatgaaccttctgaccctacccaagagtcttcaatcctggactctggccaggaggcagtagataggagaaggaaagagaagtatccagagctttttgggctggaaatagaaagtagatgtatttgtcatgtcagttacaaggtggaggaggacacttgaggagagaaaaggcctgctaagctaagagagagccaggtaggttgctctaagcagaattaggattctctgcccgcacacgctgatctgggtcagtgatgtcagaaggttatccgaagagggctaccaatttgagaatcagctctaccaccccagggctgctgctctgagttccgatgtccccactattacttgaaaagaaaccaagtaggcattagtgagaagcaggcagaaggagggacagactggcaggggctgaaccctgacaatgtccccattgccactctgaccccactttccccatccttggtggcaggatgttgaccttctccaacaacgtggagccagccaatggcttcctggttcgttacctgaggaggaagctggtagagtcagacagcgacatcaatgccaacaaggaagagctgcttcgggtgctcgactgggtacccaagctgtggtatcatctccacaccttccttgagaagcacagcacctcagacttcctcatcggtactggggtccagcttcccccgggggtcaggaggtggcttcccttttccactgtaccacctggagggatgctcccttctcttcctggagtcttcggcatgtaaaggagctgcaagccttgtggcttcagacttagaaccacttaacgagccttcccaacacagttagcaccacttcaatcaccagaaagctaacccctctccttgtttttttcccacaattaacagaaaaaaggaggcacatatgtaggaaggaattaaacagctttcctcactcccttatctcacttctaccttgtgaagcaggacttatgagattgccatctaggcagtcagcacccactagtcttgacaactctaaatttcctttaatcctttgactgtcagacccctctgcctggtactaaggagtaaaagaggcacacaaccgggaagatctaggttcccagccatcttcatggccccatcctcttccctaggcccttgcttctttctgtcgtgtcccattggcattgaggacttccggacctggttcattgacctgtggaacaactctatcattccctatctacaggaaggagccaaggatgggataaaggtccatggacagaaagctgcttgggaggacccagtggaatgggtccgggacacacttccctggccatcagcccaacaagacagcaccccaagttctctggactcagatcctctgatggccatgctgctgaaacttcaagaagctgccaactacattgagtctccagatcgagaaaccatcctggaccccaaccttcaggcaacactttaagggttcggcaatcactgtcacccccggacagcagaacgctggcatcagctatcttagctcctcctctcccctctcctctttcagagcactggctctccagccccaggaggagaacaggagggaggaggagatgaaagaggagggacaggttcttggtgctgtacctttgagaacttcctaggaaggaatggtggggtggcgtttgggaacttgtgccccctaaacacatttactggcctcctctaatgactttggggaaaagatgattctgggtctttcccttgacttcttgtttcaattacaaactcctgggctttctggggaggggttcagaaaacatcaaaacactgcagcagttcctaaatgattctcacaagcaaccctgagagagacagtcttgtgagggagatctgggggaggcaggaagctcctcagattttctcacagacccttcccaattccatcaccactgccaacaactcctcccccagagatctggctggagcccagaaaaagaagcatgtggtttaaaaaatgtttaaatcaatctgtaaaaggtaaaaatgaaaaacaaaaacaagcaaacaaacaaaaaacaatggaaaagatgaagctggagagagaggaaccagttgccaaggtagagagctgcccgctcctgccctctggatgacataggggacatcaacaagacggctgccaacctgagaagtcaccaaaccacaaaaataaccttacagccttcagggaaagactaccagctctgtctttctaccctctaatttaacaatgcataagagtcaataaaccctactttttt

SEQ ID NO: 4442 - DNA, 5220 bp, Homo sapiens
ctatggacgaagattcttcgttgagagattatactgtaagcttggactctgacatggatgatgcatctaaatttcttcaggattatgatattcgaactggcaacaccagggaagctttgagtccttgtccaagtactgtaagtaccaagtctcagccaggcagcagtgcttcttctagttctggagttaaaatgaccagctttgctgaacaaaaattcaggaaactgaatcataccgatggaaaaagtagtggaagcagttctcaaaaaactacaccagaaggctctgaacttaatattcctcatgtggttgcttgggcacaaattccagaagaaacagggcttccacagggacgggacactacccagctgttggcctctgaaatggtgcatcttaggatgaaactagaagaaaagaggcgtgctatagaagcccagaaaaagaaaatggaagctgcttttaccaaacagagacagaaaatgggaaggacagcattccttactgtagtgaaaaagaaaggggatgggatatctcctctacgagaggaagcggcgggtgcagaagatgagaaagtatatactgatcgagcaaaagaaaaggaatcacaaaaaactgatggacaaaggagcaagtcactggcagatataaaagagagcatggagaatcctcaagccaaatggctaaagtctccaactacacctattgatcctgagaagcagtggaacctggcaagcccctcagaagaaactttaaatgaaggagagattttagaatataccaaatccattgaaaagttaaattcatccctgcattttctacaacaagaaatgcaacgcttgtcacttcagcaggagatgttaatgcagatgagagagcaacaatcttgggtgatttcacctccacaaccctctccacagaaacagattcgagattttaagccttctaagcaggcaggcctgtcatcagccattgcaccattctcctcagactcccctcgtcctactcacccatctccacagtcttctaacaggaaaagtgcatctttttctgttaaaagtcaaaggactcctaggccaaatgagttaaaaataacacctttgaatcgaaccttgacacctcctcggtctgtggatagccttcctcggttaaggaggttttcaccaagtcaagttcctattcaaactaggtcatttgtatgttttggggatgatggagaacctcagttaaaggaatccaaacctaaagaggaagttaaaaaggaggaattggaatccaaagggactttggaacagcgtggacataatccagaagaaaaggaaatcaaaccttttgagtcaacagtctctgaagtcctatcactgcctgtcacagagactgtatgtctgacaccaaatgaggaccaattgaatcaacccacagaaccccctcctaaacccgttttcccacccactgctccaaaaaatgttaatctgattgaagtttccctctcagatttgaaaccccctgaaaaggctgatgtacctgttgaaaaatatgatggagaaagtgataaagaacaatttgatgatgaccagaaagtatgctgtggattcttttttaaggatgatcaaaaagcagaaaatgatatggcaatgaaacgggcagctttgttggagaaaagattaagaagggaaaaggaaactcagctccggaaacaacagttggaagcagaaatggagcataagaaggaggaaacaaggcgtaaaactgaggaagaacgtcagaagaaagaagatgagagagcacgcagagaatttattaggcaagaatatatgaggcggaaacaactgaaactaatggaagatatggatacagtaattaaaccccgtcctcaagtagtaaaacaaaaaaaacagcgaccaaaatctattcacagagatcatattgaatcccccaaaacaccaataaagggtcctccagtctctagcctttctttggcatcgctgaacacgggtgataacgagagtgtacattcaggcaagaggacgccaagatcagagtctgtagaaggcttcttatctccaagtcgttgtggcagtcgaaatggagaaaaagactgggagaatgcatcaacaacttcttcagtggcttctggaacagaatatacaggaccaaagctctacaaagaacccagtgcaaaatccaataagcacataatacaaaatgctttagctcattgctgtttggctggaaaagtaaatgaaggtcagaagaaaaaaatactggaggaaatggagaaatcagatgccaacaacttcttaatcttgttccgggattcaggatgccagttcagatctttatacacttattgcccagaaactgaagaaatcaataaactgactgggataggccctaaatctatcactaaaaaaatgattgaaggactttacaaatataattctgacaggaaacagtttagccacatacccgctaaaactttatctgccagtgttgatgcaattaccattcatagccatttatggcagaccaaaagaccagtaacacccaaaaaacttttacccactaaggcatagaagttgggaaatacttgcttcagaacattcatggtaaatttgcacttcatctttcctgcctatagaaaatctttctaattgccaacaagacttttattaattaaaactggacattaagctctgttgtcatgaacaactggaatgtaaaccacagtattttggagtgcagaacattctcaattaagtgataagtccaaatgatgaaggaaatgttttaattcacaaatggagatttgtatgtgttatcaggttcacctgcttgatattagatacattaaagcactgaattttcatggatattagttggatttatcattgaaatatggttaagattacaaattatgtgttttatttgttgcttttttttaaccttttaatgtatattcttgtcttcagatggtttgctatttttctctcctgggggtttattctaagatacctttgtattttatttcatgtggagatcatgaaagtaggaaatatacctttagaagtaactcgcacctttcttatgatgttaagagaaacactagtgtttagttttacagtaaccctcatattttaatggtgttacagcatttgcaaaaattattctgctaagtatttacaactctatttattattcactcaagtattaacattctctattaaataagaggaggtgttgtaaagagctgctagtaggttcgctttaaaccacatgagcttaaccaagaatatgttatgagaagttgctgattaaatcagtgctgtttttacaccacttctggccaactcagaataatttagattgttcttttaacaaaaaaggctttctatctcttttaaagtaagtcactttataagttggcagaagtgaatgacactttgagagtagtctttcaatctgaagatgtaagacttcctgaaacaagttctcaagaagtctttacattatatttataactcatataaaaattatatttagaatttttaaacatgtacaaagggctacattttaattttaaaatagcttcacattattttacttatattgggtttttcttcattttaatccttttcaagtggaatggcttagaataagtatacacttgaaatctcctctacatgatctttgttctttaacagtgtataccagagggttagttggggaaaaacttcattctcaggaaaagacttgaatgattatgtgaccctgttatatttcagtgttgtgacaaatgtgtaaactagcgggggaagacagtattgtatcataaatgagatgcgtagtttgttttctttcatgggaagtagagataaaaatatatacatttctctaattgagttgtttagagaaagaactaatgtctcatatgatgtatttacttattttaaaaaaaagaataggaatgagatgtccctgagctgtacttttctattattataaggcctttaggcatcagtgcatctgggttatcaacattttctcaaatgctgtcaatattttactgtaatttatgttcttatatttatgtatatttgttaaaactgtaaaaaaatttcacagatttttttccaatacctgtgcaagatacatgtgtagctcaaaactatttgtgatctactgtttgcatgtaagagaccaggatatgtaactcttatattttaagtgtatacatattgtgtatataacatatggatattaaaaatggggaattgcacattttaccttttggacagtaatttctatcacagttagaaggaaatgatagtcaaatacacgtttagattaaaactagtttaaaaaattataaatgaatctaatcaaaatgtgaatagtagtcaaaaggataatttaataagcattttacgttactaaatttgttcatttcaatattaactaaatttccctcatcaaagcaatctttgtgatattacttcgctattaaataaagaaaattggatgcaagacaatggagaaactttaaaactaaacaggaccaccctttattcttaaatttgtgtgtgtccaacagttgaattgaatgtctataaggtctaaaggtagaatgtgaatattgccacagagttcattgctctcagtataagattttactttattaatgcagaaggaatatggatatatttctttaagtctgcagatttttttattatggtgcagcttttttttaattatgtttttaaaattatacagttgaaaaatatgccatttcataaagtctgaggattttcgtcaaccttactgaaacacactggtgctttcatcatcagaggtcaaattattatgataactattccattaagtttgccaaacatttgtcgtggttaccagtgcagcctgtcaaattctgctatttgacacagctttggaaagatttagttcttggtttttccgttttgtattagaatgactgttacagttttatttggctgtttaaagccaaattcagctatttaattatggtttcatggacactgttgagcaatgtacagtgtatggtgtgcttacctgtccactctagagcattgcttacaggttttttgttttttaagatgctgtgctgtaaaatactgtcatacttgctatttcctggtacagtgtagtttttcccctttcatttgaataaaagcatggcaccaaatg

SEQ ID NO: 4443 - DNA, 2378 bp, Homo sapiens
atgtgtctatgagaatgtgctgggtcataatcagttgctctgtgaccctggcagggttttttttgtgtttttttgttttcggaaacggtataattctgcagtggtgtgatcatagttcactgcggcttcaaactcctgggctcaagcaatcctcccacctcagatcccaagtacctgggactacaggcacaaaccactatgcccagctaattattttattttttggtagacggggtctcgctatgttgcccaggctggagtgcagtggcatgattatagctcactgcggcctgaaactcctgggctcacacaatcctcctgcgtcatcctcctgagtagctgggaccacactcacgcactgccatgcctggctaattttaaagttttttgtagagatggagtctcactgtgttacgctggccgggaactcctgggctccagcgaccctcctacgtcagcctcccaaagtgtcgggattacaggcgtgagccaccgtgcccagccccctgggcaagtttaacttctctgtgccttggactccccagtgttaaatggggtagtagagggagacagccctccgagagccttcctgccctgtgcctggcccagagcagcagtgctccgcacgtgttgcctgtttctccatctgaactgcgctcctggccgcccatggcctcccagtcattctgctccactcctgctccacacaggtcataaagaactcccccgtgaagacgtttgctagtcccaccttcagctccctcctggatgtgtttctgtcgaccacagtgtttctgacgctgtccaccacctgcttcctgaagtacgaggcggccaccgtgcctcccccgcccgccgccctggcggtcttcagtgcagccctgctgctggaggtgctgtccctcgcggtgtccatcaggtaagcgccgcgtggactgggtctccagctctgagccgttagctccctcttctggctccatggcttatggctgagcggttggactggtccccagccagctgtccctgctggctgatttctggagatgggtccccgtgtcctccccgagccctgtgccccagcatcctccctccctgacgttggcccagatgcggggggaccacctcgctggagggggcggtgcctccacagccccaaccgctgccagcttgtccccagatttccaggttcagagactgcaaaggagaaggtgagaagataggaaacaatctggaggaaggaaaggaaaagacatgagcgggggtagtgggcctgggacagcaggcgcctcttcagagtaccggagccaaacagcatctccacgcacttgcctcaggcagtggtctcttggatgtgacgccaacagaagaaagaatagacaagcccaacttcctcagaagttaagctgttgcgctacaaagaacaccatcaagaaagagaaagaacccacagaacgggagggaacacttgcagatcaggcctcggacaaggtctaacatctagaatggataaagagcacacatagcctgataataaaaagacagctcattttaaaggggacagaggctccgaatagaccacaggtgcgtcttgggaaagctgggccctcgggaccagcctggctccctgagggggctcgcagcggctctgtattcctgagcaggaaggtggccctgtgtggtccccgtcctgggcaccacaagccccttgggtggtcctgtcaccctcaacaggatggctgccggcctagcagagtcccactagcaacggtgccccggagctgggcttcaaacagacatggggaggcagccctgaccttgagcgtctgctgcccttatccaacatcccagggcagaaatgaatggctttgagtctggcgtgaggcgccggaatgctggcttctcccatctggggtgggcaggctgggattcctgccccctccttcccacctgcactgtacccaggaccctttcagcttcctccgaggccgccatgggccatgctgtctgtggcgtgtgctcagtgtttcccagaactccctgtgggctcatgccccatcacccccagcgagcagccctcttcctggcacagcctcccctcctgcctcagtgccctcctgtgcttctggggacccctcccaaaggagccgtcgcctgcaaaccctttcagggtccacttccccagaacccaaaccagacatcctcaggcccctggttggtttgtttttcctctttaaaaagatcagctttaggctgggcatggtggctcatgcctgtaatcccagcactttgggaggccaaggcaggtggatcacctgaggctgggagttcgagaccagcctggacagcatggtgaaacctcatctctactaaaaaatacc

SEQ ID NO: 4444 - DNA, 5821 bp, Homo sapiens
gctttgcccagtagttggaaagtgaactcgactcgtgatggttctcctgtcactttggttgatagcagccgctctggtagaggttaggacttcagctgatggacaagctggtaatgaagaaatggtgcaaatagatttaccaataaagagatatagagagtatgagctggtgactccagtcagcacaaatctagaaggacgctatctctcccatactctttctgcgagtcacaaaaagaggtcagcgagggacgtgtcttccaaccctgagcagttgttctttaacatcacggcatttggaaaagattttcatctgcgactaaagcccaacactcaactagtagctcctggggctgttgtggagtggcatgagacatctctggtgcctgggaatataaccgatcccattaacaaccatcaaccaggaagtgctacgtatagaatccggaaaacagagcctttgcagactaactgtgcttatgttggtgacatcgtggacattccaggaacctctgttgccatcagcaactgtgatggtctggctggaatgataaaaagtgataatgaagagtatttcattgaacccttggaaagaggtaaacagatggaggaagaaaaaggaaggattcatgttgtctacaagagatcagctgtagaacaggctcccatagacatgtccaaagacttccactacagagagtcggacctggaaggccttgatgatctaggtactgtttatggcaacatccaccagcagctgaatgaaacaatgagacgccgcagacacgcgggagaaaacgattacaatatcgaggtactgctgggagtggatgactctgtggtccgtttccatggcaaagagcacgtccaaaactacctcctgaccctaatgaacattgtgaatgaaatttaccatgatgagtccctcggagtgcatataaatgtggtcctggtgcgcatgataatgctgggatatgcaaagtccatcagcctcatagaaaggggaaacccatccagaagcttggagaatgtgtgtcgctgggcgtcccaacagcaaagatctgatctcaaccactctgaacaccatgaccatgcaatttttttaaccaggcaagactttggacctgctggaatgcaaggatatgctccagtcaccggcatgtgtcatccagtgagaagttgtaccctgaatcatgaggatggtttttcatctgcttttgtagtagcccatgaaacgggccatgtgttgggaatggagcatgatggacaaggcaacaggtgtggtgatgagactgctatgggaagtgtcatggctcccttggtacaagcagcattccatcgttaccactggtcccgatgcagtggtcaagaactgaaaagatatatccattcctatgactgtctccttgatgacccttttgatcatgattggcctaaactcccagaacttcctggaatcaattattctatggatgagcaatgtcgttttgattttggtgttggctataaaatgtgcaccgcgttccgaacctttgacccatgtaaacagctgtggtgtagccatcctgataatccctacttttgtaagactaaaaagggacctccacttgatgggactgaatgtgctgctggaaaatggtgctataagggtcattgcatgtggaagaatgctaatcagcaaaaacaagatggcaattgggggtcatggactaaatttggctcctgttctcggacatgtggaactggtgttcgtttcagaacacgccagtgcaataatcccatgcccatcaatggtggtcaggattgtcctggtgttaattttgagtaccagctttgtaacacagaagaatgccaaaaacactttgaggacttcagagcacagcagtgtcagcagcgaaactcccactttgaataccagaataccaaacaccactggttgccatatgaacatcctgaccccaagaaaagatgccacctttactgtcagtccaaggagactggagatgttgcttacatgaaacaactggtgcatgatggaacgcactgttcttacaaagatccatatagcatatgtgtgcgaggagagtgtgtgaaagtgggctgtgataaagaaattggttctaataaggttgaggataagtgtggtgtctgtggaggagataattcccactgccgaaccgtgaaggggacatttaccagaactcccaggaagcttgggtaccttaagatgtttgatataccccctggggctagacatgtgttaatccaagaagacgaggcttctcctcatattcttgctattaagaaccaggctacaggccattatattttaaatggcaaaggggaggaagccaagtcgcggaccttcatagatcttggtgtggagtgggattataacattgaagatgacattgaaagtcttcacaccgatggacctttacatgatcctgttattgttttgattatacctcaagaaaatgatacccgctctagcctgacatataagtacatcatccatgaagactctgtacctacaatcaacagcaacaatgtcatccaggaagaattagatacttttgagtgggctttgaagagctggtctcagtgttccaaaccctgtggtggaggtttccagtacactaaatatggatgccgtaggaaaagtgataataaaatggtccatcgcagcttctgtgaggccaacaaaaagccgaaacctattagacgaatgtgcaatattcaagagtgtacacatccactctgggtagcagaagaatgggaacactgcaccaaaacctgtggaagttctggctatcagcttcgcactgtacgctgccttcagccactccttgatggcaccaaccgctctgtgcacagcaaatactgcatgggtgaccgtcccgagagccgccggccctgtaacagagtgccctgccctgcacagtggaaaacaggaccctggagtgagtgttcagtgacctgcggtgaaggaacggaggtgaggcaggtcctctgcagggctggggaccactgtgatggtgaaaagcctgagtcggtcagagcctgtcaactgcctccttgtaatgatgaaccatgtttgggagacaagtccatattctgtcaaatggaagtgttggcacgatactgctccataccaggttataacaagttatgttgtgagtcctgcagcaagcgcagtagcaccctgccaccaccataccttctagaagctgctgaaactcatgatgatgtcatctctaaccctagtgacctccctagatctctagtgatgcctacatctttggttccttatcattcagagacccctgcaaagaagatgtctttgagtagcatctcttcagtgggaggtccaaatgcatatgctgctttcaggccaaacagtaaacctgatggtgctaatttacgccagaggagtgctcagcaagcaggaagtaagactgtgagactggtcaccgtaccatcctccccacccaccaagagggtccacctcagttcagcttcacaaatggctgctgcttccttctttgcagccagtgattcaataggtgcttcttctcaggcaagaacctcaaagaaagatggaaagatcattgacaacagacgtccgacaagatcatccaccttagaaagatgagaaagtgaaccaaaaaggctagaaaccagaggaaaacctggacaacctctctcttcccatggtgcatatgcttgtttaaagtggaaatctctatagatcgtcagctcattttatctgtaattggaagaacagaaagtgctggctcactttctagttgctttcatcctccttttgttctgcattgactcatttaccagaattcattggaagaaatcaccaaagattattacaaaagaaaaatatgttgctaagattgtgttggtcgctctctgaagcagaaaagggactggaaccaattgtgcatatcagctgactttttgtttgttttagaaaagttacagtaaaaattaaaaagagataccaatggtttacactttaacaagaaattttggatatggaacaaagaattcttagacttgtattcctatttatctatattagaaatattgtatgagcaaatttgcagctgttgtgtaaatactgtatattgcaaaaatcagtattattttaagagatgtgttctcaaatgattgtttactatattacatttctggatgttctaggtgcctgtcgttgagtattgccttgtttgacattctataggttaattttcaaagcagagtattacaaaagagaagttagaattacagctactgacaatataaagggttttgttgaatcaacaatgtgatacgtaaattatagaaaaagaaaagaaacacaaaagctatagatatacagatatcagcttacctattgccttctatacttataatttaaaggattggtgtcttagtacacttgtggtcacagggatcaacgaatagtaaataatgaactcgtgcaagacaaaactgaaaccctctttccaggacctcagtaggcaccgttgaggtgtcctttgtttttgtgtgtgtgtgttcttttttaattttcgcattgttgacagatacaaacagttatactcaatgtactgtaataatcgcaaaggaaaaagttttgggataacttatttgtatgttggtagctgagaaaaatatcatcagtctagaattgatatttgagtatagtagagctttggggctttgaaggcaggttcaagaaagcatatgtcgatggttgagatatttattttccatatggttcatgttcaaatgttcacaaccacaatgcatctgactgcaataatgtgctaataatttatgtcagtagtcaccttgctcacagcaaagccagaaatgctctctccagggagtagatgtaaagtacttgtacatagaattcagaactgaagatatttattaaaagttgattttttttcttgatagtatttttatgtactaaatatttacactaatatcaattacatattttggtaaactagagagacataattagagatgcatgctttgttctgtgcatagagacctttaagcaaactactacagccaactcaaaagctaaaactgaacaaatttgatgttatgcaaacatcttgcatttttagtagttgatattaagttgatgacttgtttcccttcaaggaaacattaaattgtatggactcagctagctgttcaatgaaattgtgaattagaaacatttttaaaagtttttgaaagagataagtgcatcatgaattacatgtacatgagaggagatagtgatatcagcataatgattttgaggtcagtacctgagctgtctaaaaatatattatacaaactaaaatgtagatgaattaacctctcaaagcacagaatgtgcaagaacttttgcattttaatcgttgtaaactaacagcttaaactattgactctatacctctaaagaattgctgctactttgtgcaagaactttgaaggtcaaattaggcaaattccagatagtaaaacaatccctaagccttaagtcttttttttttcctaaaaattcccatagaataaaattctctctagtttacttgtgtgtgcatacatctcatccacaggggaagataaagatggtcacacaaacagtttccataaagatgtacatattcattatacttctgacctttgggctttcttttctactaagctaaaaattcctttttatcaaagtgtacactactgatgctgtttgttgtactgagagcacgtaccaataaaaatgttaacaaaatat

SEQ ID NO: 4445 - DNA, 4140 bp, Homo sapiens
ggtaaaagaaataataccataactacaaccagttcaaagaggaaaaacaggaaaaataaaattactccagaaaacgttcaaattatatttgatgatccactaccaatttcatacagtcagccagagaaggtgaatggagagtccaagagcagcagtaccagcgagagtggggacagtgataacatgaggatttccagctgcagcgatgaaagtagtaacagcaacagcagtcgtaagagtgacaatcattcaccagctgtggtcactaccactgtgagcagcaaaaagcagccatcagttcttgttacatttccaaaggaagagagaaaatctgtttctggcaaggcttcaataaaattgtcagaaactatcagtgaagggaccagtaattctctatctacttgtacaaaatctggtccatctcccctttcttctccaaatgggaagttaacagtagcaagtcctaagcgtgggcaaaagagggaagaaggatggaaagaagttgtaagaaggtcaaagaaagtatctgttccatcaactgtgatatccagagtgattggaagaggaggctgtaatatcaatgctattcgggagtttactggtgcacacatagatattgataaacagaaagacaagactggagaccggataatcactataaggggtggcactgaatcaacaagacaagcaactcaattgattaatgctttgatcaaggatccagacaaagaaattgatgaacttattccaaagaatcgtttgaaaagctcctcagcaaattccaaaatagggtcatcagcacctaccaccactgctgctaacacttccttaatgggaattaaaatgacaactgtagctctgtcatcaacatctcaaactgccacagcactcactgtgcctgcaatttcttctgcatccactcacaaaaccattaagaacccagtgaataatgtgaggcctggttttccagtttctcttccattagcatatcctcctccacagtttgcacatgctttgcttgctgctcagactttccagcagatccgtccaccaaggttgcccatgacccactttggaggtacttttccaccagctcaatccacttggggtccgtttcctgtcaggcctttgagccctgccagagctactaactcgcctaagcctcacatggtgcctcgccatagcaatcagaatagcagtggttctcaggtgaattcagcaggttctttaacttcaagcccaacaactacaaccagttcatcagcttcaacggtgcctggtacatctacaaatggcagtccaagttcaccttctgtccgaaggcagctttttgtcacagttgtgaagacatccaatgccaccacaacaacagtcacaaccacggcaagcaacaacaacactgcacccacaaatgccacatatcctatgcctactgccaaagaacactatccagtatcatccccatcttccccatcaccaccagcccagccaggaggggtttctagaaacagccctttggattgtggatcagcatctccaaataaagtggcatcttcctccgaacaggaagcaggtagtccaccagtagtagaaacaacaaacactagacctccaaacagcagcagttcttctgggagttcatcagctcattctaatcagcaacaacctccgggatctgtttctcaggaaccaagaccacctcttcagcagtctcaggttcctcccccggaagttagaatgactgttcctcctttagcaacaagttctgctccagtggcggtgccttctactgccccagtgacttaccctatgcctcagacaccaatgggatgcccccagcctactcctaaaatggaaacccctgctattagaccaccccctcatggcacaactgcccctcacaagaattcagcttcagtgcaaaattcatctgttgcagtcctcagtgtcaatcacattaaaagacctcacagtgttccctcttctgtccagctaccttcgaccttaagtacacaaagtgcttgtcagaattcagtacatccagcaaataagcctattgctcccaatttcagtgcccccttaccatttgggccctttagcacattgtttgaaaacagccctacttctgctcatgccttctggggaggatctgttgtttcatctcagtcaacaccagaatctatgctatcaggaaaatcctcatatttgccaaattcagatcctttacatcagtctgatacttccaaagctccaggttttagaccaccattacagagacctgctccaagtccctcaggtattgtcaatatggactcgccatatggttctgtaacaccttcttcaacacatttgggaaactttgcttcaaacatttcaggaggtcagatgtacggacctggggcaccccttggaggagcacccgcagctgctaactttaacagacaacatttttccccgcttagtttgttgactccgtgttcatcagcatcaaatgattcttctgcacagtcagtatcctcgggagttcgtgcaccatctcctgccccatcatcagtaccgttagggtcagaaaagcccagcaatgtgtctcaggacaggaaagttccagtccctattgggactgaacgttctgcacgtatcaggcaaactggaacgtcagctccatctgttattgggagcaatttgtctacatcagtaggacatagtggcatctggtcctttgaagggattggtggcaatcaagacaaagtagactggtgtaaccctgggatgggaaatcctatgatccacagaccgatgtctgacccaggagtattttcacaacatcaagcaatggagcgagatagtacaggaattgtaactccttctggtacattccatcagcatgttcctgcaggctacatggactttcctaaagttgggggtatgcctttttctgtgtatgggaatgcaatgattcctccagtagcacctatccctgatggtgctggaggacccatatttaatggccctcatgctgcagacccttcttggaactcactgataaagatggtttccagctccacggaaaataatggccctcaaacggtgtggactggaccctgggcacctcacatgaacagtgtgcatatgaaccagcttggctgatgaggatcagcttgttagcctgcagattccttttcatttggaggaaatcacaagtggccgaaaaaaaaaattatgctcccaaatcattctactgatgtgcttgactgaagtgtgtaggctttttgcagaagatcttactaactgacctattttctgtgaacatttgtgactgcccattccccatcatcatccgttttaccttagttagcatttttcttatcatttttctttttttctttccctcttcccctttggacataactttctgttgaagctgttctttggctggttggttttagtactgtaaactgcttctgagcaaacacggaaatttagcaaaattatgtaaacttgatcctgaagttttagaatggcaaataaatgtacaattgtttacataacagaaaaggctaagcagaaagtaaatttcaatatgtcagtatagaggctctactttatgtagacttaaattaatgtgagatatgtaccttcatattcagaaatctggatgtttccttcatacattaaactattaataagcataacttttctactggtgtaatttaagtataaagtaaaataatgggcattatcattggatgtttccccacattggcttttaaaatacccatcttgctttctttttggtttatttgtagcaaggcacatatagaagaagaaatttctggcttttccatgttgttttattaccttttctcacttttaaaactaatacagacttatctcctcactcctttttctctccttacctttaccactaataccagtaaaattatctttctgatagtgaaaaggttctgtcaagattttcactgtaatggctgctacagagatggaccatcttcatcatcaccagtggtttcttctaattataaaatgtttaaactttctgagaatttaaaaagccaccactgttcccagtcagcatatacaagctcttaatattctgtttattaaataattcaatgtact

SEQ ID NO: 4446 - DNA, 934 bp, Homo sapiens
cccttataggcctggttggtttacacaacattggacagacctgctgccttaactccttgattcaggtgtttgtaatgaatgtggacttcgccaggatattgaagaggatcacggtgcccaggggagctgacgagcagaggagaagcgtccctttccagatgcttctgctgctggagaagatgcaggacagccggcagaaagcagtgtggcccctggagctggcctactgcctgcagaagtacaacgtgcccctgtttgtccaacatgatgctgcccaactgtacctcaaactctggaacctgattaaggaccagatcgctgatgtgcacttggtggagagactgcaggccctgtatatgatccggatgaaggactccttgatttgccttgactgtgccatggagagtagcagaaacagcagcatgctcaccctccgactttctttttttgatgtggactcaaagcccctgaagacactggaggacgccctgcactgcttcttccagcccagggagttatcaagcaaaagcaaatgcttctgtgagaactgtgggaagaagacccgtgggaaacaggtcttgaagctgacccatttgccccagaccctgacaatccacctcatgcgattctccatcaggaattcacagacgagaaagatctgccactccctgtacttcccccagagcttggatttcagccagatccttccaatgaagcgagagtcttgtgatgctgaggagcagtctggagggcagtatgagctttttgctgtgattgcgcacgtgggaatggcagactccggtcattactgtgtctacatccggaatgctgtggatggaaaatggttctgcttcaatgactccaatatttgcttggtgtcctgggaagacatccagtgtacctacggaaatcctaactaccactggtaagaaac

SEQ ID NO: 4447 - DNA, 1723 bp, Homo sapiens
ggagaaaaaggcgagcccggcccacgcggccccgagggaggccgaggcgactttggcttgaaaggagaacctgggaggaaaggagagaaaggagagcctgcggatcctggtccccctggtgagccaggccctcggggagtgtgacgtcatgacctacgtgagggagacctgcgggtgctgcgactgtgagaagcgctgtggcgccctggacgtggtcttcgtcatcgacagctccgagagcattgggtacaccaacttcacactggagaagaacttcgtcatcaacgtggtcaacaggctgggtgccatcgctaaggaccccaagtccgagacagggacgcgtgtgggcgtggtgcagtacagccacgagggcacctttgaggccatccagctggacgacgaacgtatcgactccctgtcgagcttcaaggaggctgtcaagaacctcgagtggattgcgggcggcacctggacaccctcagccctcaagtttgcctacgaccgcctcatcaaggagagccggcgccagaagacacgtgtgtttgcggtggtcatcacggacgggcgccacgaccctcgggacgatgacctcaacttgcgggcgctgtgcgaccgcgacgtcacagtgacggccatcggcatcggggacatgttccacgagaagcacgagagtgaaaacctctactccatcgcctgcgacaagccacagcaggtgcgcaacatgacgctgttctccgacctggtcgctgagaagttcatcgatgacatggaggacgtcctctgcccggaccctcagatcgtgtgcccagaccttccctgccaaacagagctgtccgtggcacagtgcacgcagcggcccgtggacatcgtcttcctgctggacggctccgagcggctgggtgagcagaacttccacaaggcccggcgcttcgtggagcaggtggcgcggcggctgacgctggcccggagggacgacgaccctctcaacgcacgcgtggcgctgctgcagtttggtggccccggcgagcagcaggtggccttcccgctgagccacaacctcacggccatccacgaggcgctggagaccacacaatacctgaactccttctcgcacgtgggcgcaggcgtggtgcacgccatcaatgccatcgtgcgcagcccgcgtggcggggcccggaggcacgcagagctgtccttcgtgttcctcacggacggcgtcacgggcaacgacagtctgcacgagtcggcgcactccatgcgcaagcagaacgtggtacccaccgtgctggccttgggcagcgacgtggacatggacgtgctcaccacgctcagcctgggtgaccgcgccgccgtgttccacgagaaggactatgacagcctggcgcaacccggcttcttcgaccgcttcatccgctggatctgctagcgccgccgcccgggccccgcagtcgagggtcgtgagcccaccccgtccatggtgctaagcgggcccgggtcccacacggccagcaccgctgctcactcggacgacgccctgggcctgcacctctccagctcctcccacggggtccccgtagccccggcccccgcccagccccaggtctccccaggccctccgcaggctgcccggcctccctccccctgcagccatcccaaggctcctgacctacctggcccctgagctctggagcaagccctgacccaataaaggctttgaacccat

SEQ ID NO: 4448 - DNA, 2148 bp, Homo sapiens
tgctgtggaaactcttctggggccccggggggactaccctgcctgccgtgtgcattgcaggagtgtgacgtcatgacctacgtgagggagacctgcgggtgctgcggtgaggcactgcccacggcagggtcggggcccatgcaccgggtggagggcgggagtgcagcagggctgggtcatcgctgggtcctgcatgtgcacgtgaccctagggtctgaggtctccccggtaccccccgatgaccctgccacccccccagactgtgagaagcgctgtggcgccctggacgtggtcttcgtcatcgacagctccgagagcattgggtacaccaacttcacactggagaagaacttcgtcatcaacgtggtcaacaggctgggtgccatcgctaaggaccccaagtccgagacaggtcagcggggcaggggcgggtgcagcattgcggggggccgggcggggcgtgggaggcgatgagatgggagaagtccagacgcgtccctccaacgagggcctctgcatggctggggatgccccagaccccgaggcctctggcaacgacctcacgcgtgcggcttgcagggacgcgtgtgggcgtggtgcagtacagccacgagggcacctttgaggccatccagctggacgacgaacgtatcgactccctgtcgagcttcaaggaggctgtcaagaacctcgagtggattgcgggcggcacctggacaccctcagccctcaagtttgcctacgaccgcctcatcaaggagagccggcgccagaagacacgtgtgtttgcggtggtcatcacggacgggcgccacgaccctcgggacgatgacctcaacttgcgggcgctgtgcgaccgcgacgtcacagtgacggccatcggcatcggggacatgttccacgagaagcacgagagtgaaaacctctactccatcgcctgcgacaagccacagcaggtgcgcaacatgacgctgttctccgacctggtcgctgagaagttcatcgatgacatggaggacgtcctctgcccgggtgagcgtgtgggcgcggggcagtcggccgaggagcagcaggccccagccgctgtctagcgtgagccccagggacacccctcacctgagggatgaatgtgcagcccaggatcttgggctgtgggtgggaaggggtcgggccctctcggggctgcagggcagaggccagctgcaccctgagcctgtctaggcagatcagtgaacggccgctgagggttcgctagggactgaccctggcctggcccggcctctctcctctcttccagaccctcagatcgtgtgcccagaccttccctgccaaacaggtaatgcagggcaccctgagccaccaccccagactagcaaagcagccctggtgtccttcctcctcgagggccgggctgggggaggggccgtgcagggacccggggggcggcggagccactgcggaggctgctccttagggagatggccccaggatggcagcacaggggaggaggggcttggggaaggcaggctcccaggaacgcaggaacagcatcacgaggccatgaggtgggtgctgctagcctggcgctgtgctcggcatgtggccactggtcttgaaggcccaccatgggccttgcagtctccctcagctgccgcccagctcccatgggctggccgtgcatgtgccactcggaggaagccctggattcagtgagtgaaaccatcccggggtggaagcactgacaccccccagcaccagcaggtcttgctccaaccctggcctgcctcggagctgcagctgcggctctcacatctctgggagtgggggagcccatgtcccggatgtggcccacgtgggtgtgaagctggagctgggggtgccgtccaggctctgctggacgtggtgctgcccccatggtgcactgctgcaccgtacctgggcccacaggaggtccccgggggcgttaggagctgagtccccctcagtgagccgtcccctccaggagtgtgagggtagggatgccatggagacagggtgggagggtccgacctggaggaccacagggaggaaacctcagggtctgcggtacgaagtcagcgcttcctcagcacgcgggtcgcggtgtgcgttcgggcgttccatggggag

SEQ ID NO: 4449 - DNA, 2134 bp, Homo sapiens
gcagtgaaaatgttattagttttgagggggtttgggaagcccagcggtacctgaggagtttctggacatttaagccggttcctaggtgtggccttaacagggaggctgcccttcctttcactgaatgagctgcgtcactcataagctcactgagggaaccccatctgccagctcgtgcgtgctcagacggcgtccatgtctcaagcgttctgtgaaggctgcggtgcagcgtgaggtcaccctgctgtgttcagagctttgctcactgcctgcggggctggaccgttgcacctccagggcccccagaaaccgagtttcgggtcagggtcctctgtgtgcattcctgggggtccatgtaccagctgtgacgacgtccaggggttgggctgagaagcagacacccttggggaaactggctctgtccctcccctcccccatcccaggagctgaggtcttggtgaggccacagggccaggtccacgcaaggactgtccgtgtcctgtcctgtggtctctggccccacgtgacacccacacgtgtggtaggcagcctggcctgggttgtggctatggccaggcccccaagctgtccccgatgcccagggctggtgaccacccaggcaggtgggggccccacttggtaacagagtcatagggcagaacccacctgggctgccacagaaggtctggctgcccctgtgcccactgctccccaccatggccaatcagaagagtcaggggctcctggtctttccgggagggacgtggcccagccagctctaggtgttctgagcagctctgggacccagcgattgaggggtcaggctgggggtgtcagagccagggtcctccttaagtacctcccacactacacagacagtggcccttttgtgggcagcaaattcttgagccatgaaaggatgctttgggccccttccctcccaggagggcagcctgtgcagggatggtgctcagcaggtggacagggcctggggcctgtgtcagggtctcaggcctgggagcaccagcagaggagatggcggctcccagcagtgccgcctgaaagtgtcttgggctaaggacccacacccagggctgccctgcagaaacgcccccgcagagcccagtggtctgtgaggttgcaggcagggtgcgaatggaagggcacaggtgcggggctggcacctgcccggtcctgcccacctcccctccgcccagcccgcacctgcgtctccccacagagctgtccgtggcacagtgcacgcagcggcccgtggacatcgtcttcctgctggacggctccgagcggctgggtgagcagaacttccacaaggcccggcgcttcgtggagcaggtggcgcggcggctgacgctggcccggagggacgacgaccctctcaacgcacgcgtggcgctgctgcagtttggtggccccggcgagcagcaggtggccttcccgctgagccacaacctcacggccatccacgaggcgctggagaccacacaatacctgaactccttctcgcacgtgggcgcaggcgtggtgcacgccatcaatgccatcgtgcgcagcccgcgtggcggggcccggaggcacgcagagctgtccttcgtgttcctcacggacggcgtcacgggcaacgacagtctgcacgagtcggcgcactccatgcgcaagcagaacgtggtacccaccgtgctggccttgggcagcgacgtggacatggacgtgctcaccacgctcagcctgggtgaccgcgccgccgtgttccacgagaaggactatgacagcctggcgcaacccggcttcttcgaccgcttcatccgctggatctgctagcgccgccgcccgggccccgcagtcgagggtcgtgagcccaccccgtccatggtgctaagcgggcccgggtcccacacggccagcaccgctgctcactcggacgacgccctgggcctgcacctctccagctcctcccacggggtccccgtagccccggcccccgcccagccccaggtctccccaggccctccgcaggctgcccggcctccctccccctgcagccatcccaaggctcctgacctacctggcccctgagctctggagcaagccctgacccaataaaggctttgaaccc

SEQ ID NO: 4450 - DNA, 836 bp, Homo sapiens
gacaaagcggagaacgctggtgggcctgttgtggagtacgctttggactgagaagcatcgaggctataggacgcagctgttgccatgacggcccaggggggcctggtggctaaccgaggccggcgcttcaagtgggccattgagctaagcgggcctggaggaggcagcaggggtcgaagtgaccggggcagtggccagggagactcgctctacccagtcggttacttggacaagcaagtgcctgataccagcgtgcaagagacagaccggatcctggtggagaagcgctgctgggacatcgccttgggtcccctcaaacagattcccatgaatctcttcatcatgtacatggcaggcaatactatctccatcttccctactatgatggtgtgtatgatggcctggcgacccattcaggcacttatggccatttcagccaagaatggagttcagtggtggaggactgcttttgtgaacatgagaaagcagcgcctggtccctatgtatttgggtcttatttacatccttctttaagcccagtggctcctcagcatactcttaaactaatcacttatgttaaaaagaaccaaaagactcttttctccatggtggggtgacaggtcctagaaggacaatgtgcatattacgacaaacacaaagaaactataccataacccaaggctgaaaataatgtagaaaactttatttttgtttccagtacagagcaaaacaacaacaaaaaaacataactatgtaaacaagagaataactgctgctaaatcaagaactgttgcagcatctcctttcaataaattaaatggttgagaacaatgcat

SEQ ID NO: 4451 - DNA, 1802 bp, Homo sapiens
gtgctcttccgtactcggatcgcttcttaggagtatcctaactgccggtggggagaacttcgccctaaacctggggttccgatccaggaactggaagttgacagcttggctgcctggctcctgcatctgccttctccactcaccatctcatttctttctccaggattgtcagtggcttcgccccgaggagagctgactgccctgggctgctgcctccggcagagctgagccaaaatgtccccggaatctaaaaagcttttcaacatcattattttaggagttgcctttatgtttatgttcactgcctttcaaacttgtggaaatgtggcgcaaactgtcatcaggagcttaaataggacagattttcacggcagtggatataccagcatggctattatctatggagtgttctctgcttcaaatttgattacaccgtcagtggttgccattgtaggacctcaactctctatgtttgccagtggtttattttacagcatgtacattgccgttttcatccagcctttcccgtggtccttctacacagcctctgttttcattggaattgctgctgctgtgctttggacagcacaaggaaactgcctgacaatcaattcggatgagcacagcattgggagaaacagtgggattttctgggcacttctgcagtctagcttgttctttggaaatctctacatatattttgcctggcaagggaaaactcagatatcagagagtgaccgaagaacagtgtttattgccctaacggtgattagccttgtggggacagttctattctttctcattcggaaaccagattctgaaaatgtcctaggagaagatgagtcttctgatgaccaggacatggaagtcaacgagtctgcccagaacaatctgacaaaggcagtagatgcttttaaaaagtcttttaagttatgtgtcaccaaggagatgctccttcttagtattacaactgcttatacaggtctggaattaactttcttctctggtgtatatggaacctgtattggtgctacaaataaatttggagcagaagagaaaagccttattggactttctggcattttcatcggcattggagaaattttaggtggaagcctcttcggcctgctgagcaagaacaatcgttttggtagaaatccagttgtgctgttgggcatcctggtgcacttcatagctttttatctaatatttctcaacatgcctggagatgccccgattgctcctgttaaaggaactgacagcagtgcttacatcaaatccagcaaagaagttgccattctctgcagttttctgttgggccttggagacagctgctttaatacccagctgcttagtatcttgggctttctgtattctgaagacagcgccccagcatttgccatcttcaagtttgttcagtctatttgcgcagccgtggcatttttctacagcaactaccttctccttcactggcaactcctggtcatggtgatatttgggttttttggaacaatttctttcttcactgtggaatgggaagctgccgcctttgtagcccgcggctctgactaccgaagtatctgatctggtgtccgtgaggggacacgtatgacctcagaaacacagctggacacagagcttggtggaagaagtcgcctttgatcttcactatatattgggtgatgttcagtatggaaaatcaagggattaagactgttaaatcagccagagttggtgttcaagtttacagatatgagttatttaaagcaagtagaataagggaaagctgttctgtcaactgt

SEQ ID NO: 4452 - DNA, 1986 bp, Homo sapiens
cggcggctgtggtgtgagtccggggggcggccgtagcgcgccatttgcacccgcagctcgcggccgtccagcacggccccgtccatggcatccatagcgtcctcagcgtcgcgcttgtcgtgaaagcgaacgaaggcgaagccgcgggactccttggtgtagcggtcccgcgggatgtacacgtcgccgacgcgcccgtacttctcgaagacgcgcctcagcgtgtcgggcgaggtgcggattgtcagtggcttcgccccgaggagagctgactgccctgggctgctgcctccggcagagctgagccaaaatgtccccggaatctaaaaagcttttcaacatcattattttaggagttgcctttatgtttatgttcactgcctttcaaacttgtggaaatgtggcgcaaactgtcatcaggagcttaaataggacagattttcacggcagtggatataccagcatggctattatctatggagtgttctctgcttcaaatttgattacaccgtcagtggttgccattgtaggacctcaactctctatgtttgccagtggtttattttacagcatgtacattgccgttttcatccagcctttcccgtggtccttctacacagcctctgttttcattggaattgctgctgctgtgctttggacagcacaaggaaactgcctgacaatcaattcggatgagcacagcattgggagaaacagtgggattttctgggcacttctgcagtctagcttgttctttggaaatctctacatatattttgcctggcaagggaaaactcagatatcagagagtgaccgaagaacagtgtttattgccctaacggtgattagccttgtggggacagttctattctttctcattcggaaaccagattctgaaaatgtcctaggagaagatgagtcttctgatgaccaggacatggaagtcaacgagtctgcccagaacaatctgacaaaggcagtagatgcttttaaaaagtcttttaagttatgtgtcaccaaggagatgctccttcttagtattacaactgcttatacaggtctggaattaactttcttctctggtgtatatggaacctgtattggtgctacaaataaatttggagcagaagagaaaagccttattggactttctggcattttcatcggcattggagaaattttaggtggaagcctcttcggcctgctgagcaagaacaatcgttttggtagaaatccagttgtgctgttgggcatcctggtgcacttcatagctttttatctaatatttctcaacatgcctggagatgccccgattgctcctgttaaaggaactgacagcagtgcttacatcaaatccagcaaagaagttgccattctctgcagttttctgttgggccttggagacagctgctttaatacccagctgcttagtatcttgggctttctgtattctgaagacagcgccccagcatttgccatcttcaagtttgttcagtctatttgcgcagccgtggcatttttctacagcaactaccttctccttcactggcaactcctggtcatggtgatatttgggttttttggaacaatttctttcttcactgtggaatgggaagctgccgcctttgtagcccgcggctctgactaccgaagtatctgatctggtgtccgtgaggggacacgtatgacctcagaaacacagctggacacagagcttggtggaagaagtcgcctttgatcttcactatatattgggtgatgttcagtatggaaaatcaagggattaagactgttaaatcagccagagttggtgttcaagtttacagatatgagttatttaaagcaagtagaataagggaaagctgttctgtcaactgtaattgttcaaagatgttgtttttcatttcatctatctcaattcttataatcatgttatagaatgtaaatgttttcttctctctcctgctcttgttggaagatcctgcc

SEQ ID NO: 4453 - DNA, 4701 bp, Homo sapiens
gcagcatgtgttaaccacaacagatggctgtagccaccaggcttgtccttggtgcagtcagcctgggggctgcgggggcttgtggaagcatgtgggaagacggtcccactggtcagcagagcagggtcctcaccgacccacagaggagcatgtcacaggacaggcaggcgtgtcagggaaggccaggctagtgccagccaagggcattgcctcccagactgcccttttcctcacactcccacgacacagccctcaaagcctgtgcccctgtgggtccctggccaaggagcaagggctgccctgcctgggccccccccgccagccccttggtcacctcatgctgtgtgccaggctgggggagtgtgcctgtgtgtatgtccaggtggcatttggatgaagacacaggtgtgtggtgaggctgtgcgggaggatgggcctatgcgtgcggtgggcaggtggtgtggaggcaggcgggcgggcgtgtggcagcgcgccggctgagcccctccacttccaggtcagccagagcagcctccccatgctgtcctcgccgtcaccgggccagcaggtgcagaccccgcagtcgatgccccctcccccccagccgtccccgcagcccggccagcccagctcacagcccaactccaacgtcaggtaggcctggcctggggtgcccctccccacctggccctcgaggctggccctgcctggaccccggctcacatgtttctctcacttggctgcagctctggccctgccccatctcccagtagcttcctgcccagcccctcaccgcagccctcccagagcccagtgacggcgcggaccccacagaacttcagtgtcccctcacctggacctttaaacacacctggtaagttgggcctgaggtgctaaggtcactcctcacctttatgaggcctcagctcatactgggtgtgcgagctctggggccctcagagctcaagttccccacccgagggtcgagggctgtggcctcacccgcctgtgtcctgcagtgaaccccagctctgtcatgagcccagctggctccagccaggctgaggagcagcagtacctggacaagctgaagcagctgtcgaagtacatcgagcccctgcgccgcatgatcaacaagatcgacaagaacgaagacagaaaaaaggacctgagtaagatgaagagccttctggacattctgacagacccctcgaagcggtgagctttgcccacagcccacggagggtccacaagggcacagatagcccagccatggatgggcacttggtgatgatgtgggtttaacaaaggcaccaggcagctctttggaccctggccagaggcctccaaggctccactctggtgtgtgctggggcttcaagcccaggcttcatcttggcccatgcccagcctttgccctattcctggctgctgctgtggccctcatgctgggccatcacagccagacctcatccagtcagcagccaggggcccagcttgcagtggcctgaccatcagctggcccagatgggcctgagcctgacctggagttctgcccctgacttgctggtgaccatgggcaggcgactgcatctcagttaccccatttgtagcccacgtgtgttgtcatgaaaatgaaacaaggtggcgctggtgagaagcaggtggaaggcagggctgctggccacaggctgctgtgaggatcagagctcgggcagtacctccaaactgcatgggcattggcatatacctccctttcacctcaactcaggctatcccccaacccctgtctagaagggtctctctgttctgcttgtctggatagaatgccagtcactattgggtggtcctccaggtcttcatgggttgatcctttgttagggttatagggatgagtggggcagggactggcctgcatgacaatgaggcattcacagcctgatcaggggcctggccactgtcccttctcttgacccatcacctcactctgccaaccagggacaagcagctcctggggttgagggctgcctgccttcaactctgggtctgggaacagctggtcaactggtaggagctcctgcagaggtttctgatggctgaggcccagtggcagtagttgggatcctgagcctgagaactgccatgtcttccactctttcagcccaagtcctctctctctgcaggtgtcccctgaagaccttgcaaaagtgtgagatcgccctggagaaactcaagaatgacatggcggtggtgagtgggatgccagacacccctaggggaaccagggctctcctaagagctcctgggagtgccgctgagagggccttcaaggtcagggcatctgggcgggggccgggcctgaccttggaccctgcccacgaggcttcctggccaggtctgctgtgctgggtgggaacatgggagaagtcaccctctgtctacggcccccgtgggtgcctccttcacccatttcagaggaggcagggactgtagggaggataggctgtgggggtgggggattattcccaggatcagccaacattgtctgcacaagggtggaggctgtgagagaggcctcgggaatctgactgtgagtgaccatgggcctggggtgtgaaggccccctaaatggggaaccctcgggtcccgggctgctgaccatgcccatcctgtctccagcccactcccccaccgcccccggtgccaccgaccaaacagcagtacctatgccagccgctcctggatgccgtcctggccaacatccgctcacctgtcttcaaccattccctgtaccgcacattcgttccagccatgaccgccattcacggcccacccatcacgtatgtccagctgggctgggctttgcggagggcggccagccctgggccgcgtgtgccaggtgtggtcaccatgccgcctccccagggccccagtggtgtgcacccggaagcgcaggcttgaggatgatgagcggcagagcatccccagtgtgctccagggtgaggtggccaggctggaccccaagttcctggtaaacctggacccttctcactgcagcaacaatggcactgtccacctgatctgcaagctgggtgagtgtccagagggccgggactggtgtgggaaagcaggccctgaccgcagccccaggactctgccatccaagccagatggcacagcgcccagaacccaccctgtgttcacgccccgccaggctgtctgctctatcctcacacacaccgggctccagacagcctggccatgcctcagtccccactgccagagcccgcacactctcacctccccaacacagatgtggctttgcttgcctgggccctagggaggtggtaggcaggacctctgggcacccatcaatgcagagcactccaggcttcacgtttggaaatctgagagtcagagagacctcctccaggctttgccacaagcttcaccagaacctccctgggtgtggagtcctgttccagagcagggctgtgaggcagggcaggccggggcttgtccaggtcacagatagagccttctgtgttgcagatgacaaggacctcccaagtgtgccaccactggagctcagtgtgcccgctgactatcctgcccaaagcccgctgtggatagaccggcagtggcagtacgacgccaaccccttcctccagtcggtgcaccgctgcatgacctccaggctgctgcagctcccggacaagcactcggtcaccgccttgctcaacacctgggcccagagcgtccaccaggcctgcctctcagccgcctagccaagactgcagggatggcccgcagcctcatcggggccaaggacacacgcctcctgtcagacacttctaggtgttggcttccttagagagcctggggttaggttagctttcctgcttttatcttctgccttggggacctgccaaacgaaatcccacacctgtacagaactgggataggcgcagtggagcgggttgcttggggggcgttggccgacttcttagagaaggccctccatgtgacttcctcccaggagccagatgcgatcctcaggctgctctcaccgtggcctgtccacggtccaggtccatctcagcagcgtgagggtgcactcagggtgttgttagagcgtctcgtgtgtgctagacgcacccctactcgttcctatagaacacagaggacataggaaacccttaaaacacacatgggattctctggtcacagttttgggttcaggctatgctgctttgggcaggtggagcaccccccgaggaagcctgcaagtccagggcacaggctgccttttggagggagggctggcccataggtgctgctggctccccgccaccagctgggcctcagccctcacggcattcctgctgagcaccgtggggcacccagggagcaggggcgtcagggatcctgctgccggcacccctgtgccgctggcatgagggccgtgtccccactgtgaaggatgaagagcaaggccctcaggacccgtgtcctcagagcaccacacactgagcacccagagacagcgggcctggcagcgggccgggccatgcagggagcgcctccctatgttgcctgccactctgggcaccggccagcaccctctggtgagaagaggtcccccctttttatgtgcactaccccaccatctgtgattataataaatttattattcctgtg

SEQ ID NO: 4454 - DNA, 2070 bp, Homo sapiens
ccaccgctgtgtccgccatcccgtcaagctccatccctttgggcagacagcccatggcacaggtcagccagagcagcctccccatgctgtcctcgccgtcaccgggccagcaggtgcagaccccgcagtcgatgccccctcccccccagccgtccccgcagcccggccagcccagctcacagcccaactccaacgtcagctctggccctgccccatctcccagtagcttcctgcccagcccctcaccgcagccctcccagagcccagtgacggcgcggaccccacagaacttcagtgtcccctcacctggacctttaaacacacctgtgaaccccagctctgtcatgagcccagctggctccagccaggctgaggagcagcagtacctggacaagctgaagcagctgtcgaagtacatcgagcccctgcgccgcatgatcaacaagatcgacaagaacgaagacagaaaaaaggacctgagtaagatgaagagccttctggacattctgacagacccctcgaagcggtgtcccctgaagaccttgcaaaagtgtgagatcgccctggagaaactcaagaatgacatggcggtgcccactcccccaccgcccccggtgccaccgaccaaacagcagtacctatgccagccgctcctggatgccgtcctggccaacatccgctcacctgtcttcaaccattccctgtaccgcacattcgttccagccatgaccgccattcacggcccacccatcacggccccagtggtgtgcacccggaagcgcaggcttgaggatgatgagcggcagagcatccccagtgtgctccagggtgaggtggccaggctggaccccaagttcctggtaaacctggacccttctcactgcagcaacaatggcactgtccacctgatctgcaagctggatgacaaggacctcccaagtgtgccaccactggagctcagtgtgcccgctgactatcctgcccaaagcccgctgtggatagaccggcagtggcagtacgacgccaaccccttcctccagtcggtgcaccgctgcatgacctccaggctgctgcagctcccggacaagcactcggtcaccgccttgctcaacacctgggcccagagcgtccaccaggcctgcctctcagccgcctagccaagactgcagggatggcccgcagcctcatcggggccaaggacacacgcctcctgtcagacacttctaggtgttggcttccttagagagcctggggttaggttagctttcctgcttttatcttctgccttggggacctgccaaacgaaatcccacacctgtacagaactgggataggcgcagtggagcgggttgcttggggggcgttggccgacttcttagagaaggccctccatgtgacttcctcccaggagccagatgcgatcctcaggctgctctcaccgtggcctgtccacggtccaggtccatctcagcagcgtgagggtgcactcagggtgttgttagagcgtctcgtgtgtgctagacgcacccctactcgttcctatagaacacagaggacataggaaacccttaaaacacacatgggattctctggtcacagttttgggttcaggctatgctgctttgggcaggtggagcaccccccgaggaagcctgcaagtccagggcacaggctgccttttggagggagggctggcccataggtgctgctggctccccgccaccagctgggcctcagccctcacggcattcctgctgagcaccgtggggcacccagggagcaggggcgtcagggatcctgctgccggcacccctgtgccgctggcatgagggccgtgtccccactgtgaaggatgaagagcaaggccctcaggacccgtgtcctcagagcaccacacactgagcacccagagacagcgggcctggcagcgggccgggccatgcagggagcgcctccctatgttgcctgccactctgggcaccggccagcaccctctggtgagaagaggtcccccctttttatgtgcactaccccaccatctgtgattataataaatttattattcctgtg

SEQ ID NO: 4455 - DNA, 2128 bp, Homo sapiens
cttggacttggaccttcgtgcggatctggacttggaggtcgaccgagatcgagaacgagtgcgggaccgagacttcgagcggctgtagcgagatcggctgcgagacctggaacgactccgactccgggatcggctgcggcgacgccgcctagggctgcgggcgggacgagcaagcacagcggggttaattccaggcagcggggccggccccgcccgcgcgctcccgcccaggccgccattatctcgccgccagacgccatttccccagtcgcgaggcggggtcctccgccccgcgccgcccacaccccggccactcccgggtcgcagacggcggaagctcgcggggtggccggagggtcgcgagacgcggcgtgcacccccgccccgtccgggcccgcaccacgtgcttcgccgcggacctttgtgaggtcgcccgggcctcccgcgcgccccgccccgcctcccgcggtcccctcagccccgtttacctgcggctccggcgtccgtagccaccgcccccgtacctgcggggtggcggtccccggcggctgtggtgtgagtccggggggcggccgtagcgcgccatttgcacccgcagctcgcggccgtccagcacggccccgtccatggcatccatagcgtcctcagcgtcgcgcttgtcgtgaaagcgaacgaaggcgaagccgcgggactccttggtgtagcggtcccgcgggatgtacacgtcgccgacgcgcccgtacttctcgaagacgcgcctcagcgtgtcgggcgaggtgcggtaggtcaggttgtccaccttgagggaggtcataccctccacatcgggaggggggcggccgtagctcatagctctgagtggcggcccggagccccgcgaactggcgccggcttcctcagctctgggcggtgcgacgccgcgcctctcaggcagttgccttccgcgtggggacactgggaaaggccttgccgcagaacagcacggacgggctccgcaggctagcgcacctgagtaacaactgggcgggcagccggcctctgcgcccgtttatatcgctcctcacaaaatggcgcccgcgccacccggaaatgaaaccttctgattggcccaccgcgccccgcttcgtaacgaccctgccgcgcgccccgcccctacccgaagcgcctgcgcacagcccggcgggcgggccaaaaagcgcggagtcacggctggagggagggggagcggaattagcgggcagttggaaagcccgcgaaacgctttttccgcctgggaggccggacgatcgcgattgggcaggaggaagaggaggtgctccccatctgggcccccacctttttttcatgccaatactccaagttcacgccccttttttgctcagccgtcagccccgtctccgtctgaagagtgcttctgccctcatttgcctctccctgtgaccccggccccctcagactccgctgcgtcgtctctcggccccgtccagccgttcctgactgctcttcgccggagtccgcttcccaaccccctttcgccagagcccgagagctccgtcggctctgcgtcctggcggtggggactccccgcggagcgcttgcgcgtgccaggccacccgggactacgtttcccagcgggccgagcggccggcgccgcggctgcggtcaggtgacccggtcgcctggccgcagtgagtcaggctgggagggcggggccgcgccggctgctgcggctggcacttggccctttaatccccttcgtgggcccctcaacctggagcggataaattcttggcgcttctccgggggttgtgctcttccgtactcggatcgcttcttaggagtatcctaactgccggtggggagaacttcgccctaaacctggggttccgatccaggaactggaagttgacagcttggctgcctggctcctgcatctgccttctccactcaccatctcatttctttctccaggattgtcagtggcttcgccccgaggagagctgactgccctgggctgctgcctccggcagagctgagccaaaatgtccccggaatctaaaaagcttttcaacatcattattttaggagttgcctttatgtttatgttcactgcctttcaaacttgtgg

SEQ ID NO: 4456 - DNA, 1112 bp, Homo sapiens
gggtgggcaccatggctgggatcaccaccatcgaggcggtgaagcgcaagatccaggttctgcagcagcaggcagatgatgcagaggagcgagctgagcgcctccagcgagaagttgagggagaaaggcgggcccgggaacaggctgaggctgaggtggcctccttgaaccgtaggatccagctggttgaagaagagctggaccgtgctcaggagcgcctggccactgccctgcaaaagctggaagaagctgaaaaagctgctgatgagagtgagagaggtatgaaggttattgaaaaccgggccttaaaagatgaagaaaagatggaactccaggaaatccaactcaaagaagctaagcacattgcagaagaggcagataggaagtatgaagaggtggctcgtaagttggtgatcattgaaggagacttggaacgcacagaggaacgagctgagctggcagagtcccgttgccgagagatggatgagcagattagactgatggaccagaacctgaagtgtctgagtgctgctgaagaaaaggtactctcaaaaagaagataaatatgaggaagaaatcaagattcttactgataaactcaaggaggcagagacccgtgctgagtttgctgagagatcggtagccaagctggaaaagacaattgatgacctggaagagcgtctctacagccaacttgagcgaaaccgcctgctttctaatgagctgaagctaacgctgcatgatctgtgtgactgatgggcagggctcaatgatgcccattaaactgagcttactgctcacaccactgacctggaccccaacaaaaagctgattgtctttttaaaagttattattttgccctgagcaaattgcattttaattggggcagttagaatgttgatttcctaacagcattgtgaagttgaccattgtgaagtttctgtccctttagaagagattatgggtgaagaagggaggggcctgagagattatagtgagaaaacttgcgagaattttgttttccacccttatttgctgctctttcacttgggcactgactgtaggatatgttcccttgcatggatgtttttaacaataaaaggactgacttg

SEQ ID NO: 4457 - DNA, 1128 bp, Homo sapiens
actcaggcagcagccccttctttcttgccccagtctccagttctccagtgttcacaggtgagcctaccaacagccactgctcatgatggaggccatcaagaaaaagatgcagatgctgaagttagacaaggagaatgctctggatcgggcagagcaagctgaagctgagcagaagcaggcagaagaaagaagtaaacagctggaggatgagctggcagccatgcagaagaagctgaaagggacagaggatgagctggacaagtattctgaagctttgaaggatgcccaggagaagctggaactggcagagaagaaggctgctgatgctgaggctgaggtggcctccttgaaccgtaggatccagctggttgaagaagagctggaccgtgctcaggagcgcctggccactgccctgcaaaagctggaagaagctgaaaaagctgctgatgagagtgagagaggtatgaaggttattgaaaaccgggccttaaaagatgaagaaaagatggaactccaggaaatccaactcaaagaagctaagcacattgcagaagaggcagataggaagtatgaagaggtggctcgtaagttggtgatcattgaaggagacttggaacgcacagaggaacgagctgagctggcagagtctaagtgttctgagctggaggaggagctgaagaatgtcaccaacaacctcaagtctcttgaggctcaggcggagaagtactctcaaaaagaagataaatatgaggaagaaatcaagattcttactgataaactcaaggaggcagagacccgtgctgagtttgctgagagatcggtagccaagctggaaaagacaattgatgacctggaagatgagctctatgcccagaaactgaagtacaaggccattagcgaggagctggaccacgccctcaatgacatgacctctatataattatcaccgtttctgctctgttctggatctgccccctttactcctcggggaacccaaggccccactctcgctctggattccatttgggtcagcctggctggtccccaaggcattaggatgggggagcaaaaagcaacttatgtattttcttccacccccaccccaaattaaaatgttaagctgctgga

SEQ ID NO: 4458 - DNA, 2367 bp, Homo sapiens
ggtgcgtgcgcgccccggccgccgaacaaaggagcaggggcgccgccgcggggacccgccacccacctcccggggccgcgccgcggcctcccgtccaccgccaccatgaccgccaacggcacagccgaggcggtgcagatccggttcggcctcatcaactgcggcaacaagtacctgagggcggaggcgttcgggttcaaggttaacgcgtcggccagcagcctgaagaagcagcagatctggacgctggagcagccccctgactaggcgggcagcgcggccgtgtgcctgcgcagccacctgggccgctacctggcggcggacaaggacggcaatgtgacctgcgagcgcgaggtgcccggtcccgactgccgcttcctcaccgtggcgcacgacgacggccgctggtcgctgcagtccgaggcgcaccggcgctccttcggcggcacggaggaccgcctgtcgtgcttcgcgcagacggtgtcccccgccgagaagtggagcgtgcacatcgccatgcaccctcaggtcaacatctaccgcgtcacccctaagcgctaggcgcacctgagcgcgccgccggccgacgagatcgcagtggaccgcgacgtgccctggggcgtcgactcgctcgtcaccctcgccttccaggagcagcgctacagcgtgcagaccgcggaccaccgcttcctgcgccatgacaggcgcctggtggcgcgccccgagccggccactggctacacgctgcagttccgctccggcaatgtggccttccgcgactgcgagggccgttacctggcgccgtcggggcccagcggcacgctcaaggcgggcaaggccaccaaggtgggcaaggacgagctctttgccctggagcagagctgcgcccaggtcgtgctgcaggcggccaacgggaggaatgtgtccacgcgccagggtatggacctgtctgccaatccggacgaggagaccgaccaggagaccttccagctggagatcgaccgcgacaacaacaagtgtgccttctgtacccacaggggcaagtactggacgctgacggccactgggggcgtgcagtccaccgcctccaccaagaatgccagctgctacttcgacattgagcggcgtgaccggcgcatcacactgcgggcgtccaatggcaagtttgtgacatctaagaagaatgggcagctggccgcctcggtggagacagcaggggactcagagctcttcctcatgaagttcatcaaccgcgccatcaccgtgttgcgcggggagcacggctttatcggctgccgcaaggtcggggcaccctggacgccaaccgctgcagctatgacgtcttccagctggagttcaacaatggtacctacaacatcaaagactccacaggcaaatactggacggtgggcagtgactccgcggtcaccagcagcggcgacactcctgtggacttcttcttcgagttctgcgactacaacaaggaggccatcaagatggacgggcgctacctgaagggcgaccacgcaggggtcctaagggcctccgcggagaccgtgcaccccgcctcgctctgggagtactagggcccgcccgcccttcccggttcctgcccacgtggcggctccttccaaccctccctgctaaccccttctcctccaggtgggctcccccgggcgggaggcaagcccccttgcctttcaaactggaaaccccagagaaaacggtgcccccacctgtcgcccctatggacttcccagtctcccctccgccctggttccctactcccctcgggtcagcggctgcggcctggccctgggagggatttcagatgcccctgccctcttgtctgccacggggcgagtctggcacctctttcttctgacctcagacggctctgagccttatttctctggaagcggctaagggacggttgggggctgggagccctgggcgtgtagtgtaactggaatctcttgcccctcccagccacctcctcccagccccccaggagctgggcacgtgtcccaagcctgtcagtggccctccctggtgcactgtcccgaaacccctgcttgggaagggaagccgtcaggtgggcgaggactgagcctcggtgtttttttgggtggtggctggaaacagcccctctcccgggtggatgaagccaggcgtcgccccctcggggagccctggggtgagccgccagggcccccctgctgccagtctcccccgtcccgtccccgacatgcatctcactctgggtgtcctggtcttttattttttgtaagtgtcatttgtataactccaaacgcccatgatagtagcttcaaactggaaatagtgaaataaaataactcagtctgc

SEQ ID NO: 4459 - DNA, 760 bp, Homo sapiens
gagctgagagctcgaggtgagctgggctcgcggtcgcccctctcgcgcgccctctttaagaaccacggcgtccaacctccctggaaatggggggaacatggccgaggcgcgtggcgaggccgcctcgtggaggccccggagcggcatcctcagcgccccagcgatccggtgcccattagatttctttagtacagaacctgctaaggccatcaaacctattgatcggaagtcagtccatcagatttgctctgggccggtggtaccgagtctaagcactgcggtgaaggagttagtagaaaacagtctggatgctggtgccactaatattgatctaaagcttaaggactatggagtggatctcattgaagtttcaggcaatggatgtggggtagaagaagaaaacttcgaaggcttaatctctttcagctctgaaacatcacacatctaagattcaagagtttgccgacctacctcaggttgaaacttttggctttcggggggaagctctgagctcactttgtgcactgaggtgatgtcaccatttctacctgccatgtatcggcgaaggttgggactcgactggtgtttgatcactatgggaaaatcatccagaaaaccccctacccccaccccagagggatgacagtcagtgtgaagcagttattttctacgctacctgtgcaccataaagaatttcaaaggaatattaagaagaaacgtgcctgcttccccttcgccttctgccgtgattgtcagtttc

SEQ ID NO: 4460 - DNA, 1748 bp, Homo sapiens
aagaggagaggcataaatttaggatctcacccttcattccacagacacacacagcctctctgcccacctctgcttcctctaggaacacaggagttccagatcacatcgagttcaccatgaattcactcagtgaagccaacaccaagttcatgttcgatctgttccaacagttcagaaaatcaaaagagaacaacatcttctattcccctatcagcatcacatcagcattagggatggtcctcttaggagccaaagacaacactgcacaacaaattagcaaggttcttcactttgatcaagtcacagagaacaccacagaaaaagctgcaacatatcatgttgataggtcaggaaatgttcatcaccagtttcaaaagcttctgactgaattcaacaaatccactgatgcatatgagctgaagatcgccaacaagctcttcggagaaaagacgtatcaatttttacaggaatatttagatgccatcaagaaattttaccagaccagtgtggaatctactgattttgcaaatgctccagaagaaagtcgaaagaagattaactcctgggtggaaagtcaaacgaatgaaaaaattaaaaacctatttcctgatgggactattggcaatgatacgacactggttcttgtgaacgcaatctatttcaaagggcagtgggagaataaatttaaaaaagaaaacactaaagaggaaaaattttggccaaacaagaatacatacaaatctgtacagatgatgaggcaatacaattcctttaattttgccttgctggaggatgtacaggccaaggtcctggaaataccatacaaaggcaaagatctaagcatgattgtgctgctgccaaatgaaatcgatggtctgcagaagcttgaagagaaactcactgctgagaaattgatggaatggacaagtttgcagaatatgagagagacatgtgtcgatttacacttacctcggttcaaaatggaagagagctatgacctcaaggacacgttgagaaccatgggaatggtgaatatcttcaatggggatgcagacctctcaggcatgacctggagccacggtctctcagtatctaaagtcctacacaaggcctttgtggaggtcactgaggagggagtggaagctgcagctgccaccgctgtagtagtagtcgaattatcatctccttcaactaatgaagagttctgttgtaatcaccctttcctattcttcataaggcaaaataagaccaacagcatcctcttctatggcagattctcatccccatagatgcaattagtctgtcactccatttagaaaatgttcacctagaggtgttctggtaaactgattgctggcaacaacagattctcttggctcatatttcttttctatctcatcttgatgatgatagtcatcatcaagaatttaatgattaaaatagcatgcctttctctctttctcttaataagcccacatataaatgtacttttccttccagaaaaatttcccttgaggaaaaatgtccaagataagatgaatcatttaataccgtgtcttctaaatttgaaatataattctgtttctgacctgttttaaatgaaccaaaccaaatcatactttctcttcaaatttagcaacctagaaacacacatttctttgaatttaggtgatacctaaatccttcttatgtttctaaattttgtgattctataaaacacatcatcaataaaataatgacataaaatc

SEQ ID NO: 4461 - DNA, 4497 bp, Homo sapiens
  misc_feature (1007)..(1135): n is a, c, g, or t
  misc_feature (3201)..(3856): n is a, c, g, or t
actcagctgtgcgctctgatttcgtgcgcttcctcgtccttcatgttggatggccagtttttcgtttgtgcgtcatcctctacctgagaaatggtcgcttgcccctagtctagacacgcattaaagggcagtatttaaagtcagttggcaagcagtggaataagatttttgtaaagaaaccttgtgcagcatggattctctaccagatgaattttttgtgaggcatcctgctgtggaggatcagaggaaggaagaaactgagaataagctagaaaaatcatctggtcaactgaacaaacaggaaaatgacatacctactgatcttgtccctgttaacctactattagaagtgaagaagttattaaatgcaattaatactctaccaaaaggtgtggttcctcacattaagaagttcttacaagaagatttttccttccaaactatgcagagagaagttgcagctaacagccagaatggtgaggaaattgttcctgctttgactttacgtttcttgattacacagctagaagcagcacttaggaacattcaagctggcaattataccgcacaccagattaatattggttattatttgacattactgtttttatatggagtagcactcactgaaagaggaaagaaagaggattatacagaagctgacaataaatttctggtgatgaagatgatgatccaagaaaatgaaatttgtgaaaactttatgtctttagtttattttggacgtggtttactgcgatgtgctcaaaagagatataatggaggactgctagaatttcataaaagcttacaagaaattggagacaaaaatgaccattggtttgacatagatcctacagaagatgaagatttacctacaacttttaaagatcttcttaataattttatcaagacaactgaaagcaatataatgaagcagacgatttgtagttacctagattgtgaacgatcttgtgaagctgacattttgaagaacaccagttataagnnnnnnnnnnnnnnnnnnnnnnnnnnnnnnnnnnnnnnnnnnnnnnnnnnnnnnnnnnnnnnnnnnnnnnnnnnnnnnnnnnnnnnnnnnnnnnnnnnnnnnnnnnnnnnnnnnnnnnnnnnnnnnnnngaaggatgtacaggtgacatggtaaggatgctgcaatgtgatgtacctggaattgttaaaattttgtttgaagttgtgagaaaggatgaatatatcaccattgaaaatttaggagcaagttatagaaagttgatatctctgaaaataactgatactgatataagaccgaagatcagtttaaaatttaatacaaaagatgaaatgcctatcttcaagcttgattataattatttctatcatctgcttcatataattattatttctggtactgacattgttcgacaaatatttgatgaggctatgccacctcctcttttgaaaaaagagcttcttatacacaagaatgtgctggaatcctactacaaccatctttggaccaatcatcctttgggtggatcatggcatctgctttatcctcctaacaaggagttaccgcaatccaaacagtttgacttatgcctcctgttagctcttataaaacatttaaatgtgttccctgcacccaaaaaaggatggaatatggaaccgccatcttctgacatctctaaatctgcagacatcctgagactgtgcaaatacagggatatcctccttagtgagattttgatgaatggtctcactgagtcacagttcaattcaatttggaaaaaagtttcagatattcttctgcgccttgggatgatgcaagaggatattgacaaagtgaaggagaatcccattgagaatatctcccttgattaccatcagctatctgtctacctaggcataccagtaccagaaatcatacagaggatgttatcctgctatcaacaaggaattgctctacagtcaataacaggcagtcagcgtattgaaatagaagagttacagaatgaggaagaagaactaagtccacctctcatggagtacaatataaatgtgaaatcacaccctgagatacagtttgcagaaattaataaagatgggacctcaatacccagtgaatcttcaacagaatctcttaaagatctccaggaagtataagagtaaacaaaggaaaaagaagaagactaagaataaaaagaataaagactcaaaagaagaccaagtcccatatgtggtagaaaaggaagagcagttaaggaaagaacaagcaaatccacactcagtcagtagacttataaaagatgatgcaagtgatgttcaagaggattctgcaatggaagacaagttctatagcctggatgaattgcatattctggacatgatagagcagggctcagctggcaaagtaactacagactatggagaaactgaaaaggaaaggcttgctcgtcaaaggcagctttataaattgcactatcagtgtgaagatttcaaaagacagttgagaacagtgacttttcggtggcaagaaaaccaaatgcagattaaaaagaaagacaaaattatcgcatctcttaatcaacaagttgcttttggaatcaataaggtttccaaattacagcgtcaaatccatgctaaagataatgaaatcaagaaccttaaagagcaactttctatgaaaagatctcagtgggaaatggaaaaacataatctggaaagcacaatgaaaacatacgtaagcaaactgaacgcagaaactagcagagctttaacagccgaggtgtatttcttacagtgtcgtagggattttggtttgcttcatctagagcagactgaaaaggaatgtctcaatcagcttgccagggtgactcacatggcagcaagcaacctagaatcacttcaattaaaggctgcggtagacagttggaatgccattgtggcagatgttagaaacaagattgcattcctcaggacacagtacaatgaacaaataaacaaagtcaagcaaggatttgccttgagtaccttgcctccagtccagcttcctcctccaccacccagtcctgagatactgatgcagcagttcttaggaagacctcttgtgaaagaatctttctttagacccatacttactgttcctcaaatgcctgcagtttgcccgggagtcgtctctgcaactggccaacctagagcccccctgnnnnnnnnnnnnnnnnnnnnnnnnnnnnnnnnnnnnnnnnnnnnnnnnnnnnnnnnnnnnnnnnnnnnnnnnnnnnnnnnnnnnnnnnnnnnnnnnnnnnnnnnnnnnnnnnnnnnnnnnnnnnnnnnnnnnnnnnnnnnnnnnnnnnnnnnnnnnnnnnnnnnnnnnnnnnnnnnnnnnnnnnnnnnnnnnnnnnnnnnnnnnnnnnnnnnnnnnnnnnnnnnnnnnnnnnnnnnnnnnnnnnnnnnnnnnnnnnnnnnnnnnnnnnnnnnnnnnnnnnnnnnnnnnnnnnnnnnnnnnnnnnnnnnnnnnnnnnnnnnnnnnnnnnnnnnnnnnnnnnnnnnnnnnnnnnnnnnnnnnnnnnnnnnnnnnnnnnnnnnnnnnnnnnnnnnnnnnnnnnnnnnnnnnnnnnnnnnnnnnnnnnnnnnnnnnnnnnnnnnnnnnnnnnnnnnnnnnnnnnnnnnnnnnnnnnnnnnnnnnnnnnnnnnnnnnnnnnnnnnnnnnnnnnnnnnnnnnnnnnnnnnnnnnnnnnnnnnnnnnnnnnnnnnnnnnnnnnnnnnnnnnnnnnnnnnnnnnnnnnnnnnnnnnnnnnnnnnnnnnnnnnnnnnnnnnnnnnnnnnnnnnnnnnnnnnnnnnnnnnnnnnnnnnnnnnnnnngtggagactgtacggtggtgtgttggagctggcttgtaatgtcttatgagtgacaatcgttagtttgaggaattttgtgagacagttgtcaaattgttgctagcttgaaatctgcggcaattggagtatttacaccatagaaatgctataagtgaagacctacctttcccttaagagctagttgttaaacctttaccagcataccactggaccttgtctaaaatttctttgtgttcccagtgtcttgcccagtagatacaagataaatattgccagaatcagatatcaggaagtagtaagaaaaggagttaatatgcaaactaaatcactcgctcaattgaataattgagatcttctgttcatttgttccttggaccttaatcatttgcattttggagaaaattttttctgctttaaaagtctgtaatttcagtttttgtgtcggggagagggaaaaactatttgtctgtagttgctttttgtgacaaagtgaatacccactgggctaagtttcatatctaaagcttgtcactaagaattttcatttttaggggtcaaaaacctattttgaaaatagtgttgtgtgaatgctgtaagtgttgtacatgtctctggtttcagaattaaaagaattcagagtt

SEQ ID NO: 4462 - DNA, 2993 bp, Homo sapiens
ctcctcgttctgctcctcactccccagcggctggaggccggtaccggcgggcaggaggcgcccgaggatgtgctgctggccgctgctcctgctgtgggggctgctccccgggacggcggcggggggctcgggccgaacctatccgcaccggaccctcctggactcggagggcaagtactggctgggctggagccagcggggcagccagatcgccttccgcctccaggtgcgcactgcaggctacgtgggcttcggcttctcgcccaccggggccatggcgtccgccgacatcgtcgtgggcggggtggcccacgggcggccctacctccaggattattttacaaatgcaaatagagagttgaaaaaagatgctcagcaagattaccatctagaatatgccatggaaaatagcacacacacaataattgaatttaccagagagctgcatacatgtgacataaatgacaagagtataacggatagcactgtgagagtgatctgggcctaccaccatgaagatgcaggagaagctggtcccaagtaccatgactccaataggggcaccaagagtttgcggttattgaatcctgagaaaactagtgtgctatctacagccttaccatactttgatctggtaaatcaggacgtccccatcccaaacaaagatacaacatattggtgccaaatgtttaagattcctgtgttccaagaaaagcatcatgtaataaaggttgagccagtgatacagagaggccatgagagtctggtgcaccacatcctgctctatcagtgcagcaacaactttaacgacagcgttctggagtccggccacgagtgctatcaccccaacatgcccgatgcattcctcacctgtgaaactgtgatttttgcctgggctattggtggagagggcttttcttatccacctcatgttggattatcccttggcactccattagatccgcattatgtgctcctagaagtccattatgataatcccacttatgaggaaggcttaatagataattctggactgaggttattttacacaatggatataaggaaatatgatgctggggtgattgaggctggcctctgggtgagcctcttccataccatccctccagggatgcctgagttccagtctgagggtcactgcactttggagtgcctggaagaggctctggaagccgaaaagccaagtggaattcatgtgtttgctgttcttctccatgctcacctggctggcagaggcatcaggctgcgtcattttcgaaaagggaaggaaatgaaattacttgcctatgatgatgattttgacttcaatttccaggagtttcagtatctaaaggaagaacaaacaatcttaccaggagataacctaattactgagtgtcgctacaacacgaaagatagagctgagatgacttggggaggactaagcaccaggagtgaaatgtgtctctcataccttctttattacccaagaattaatcttactcgatgtgcaagtattccagacattatggaacaacttcagttcattggggttaaggagatctacagaccagtcacgacctggcctttcattatcaaaagtcccaagcaatataaaaacctttctttcatggatgctatgaataagtttaaatggactaaaaaggaaggtctctccttcaacaagctggtcctcagcctgccagtgaatgtgagatgttccaagacagacaatgctgagtggtcgattcaaggaatgacagcattacctccagatatagaaagaccctataaagcagaacctttggtgtgtggcacgtcttcttcctcttccctgcacagagatttctccatcaacttgcttgtttgccttctgctactcagctgcacgctgagcaccaagagcttgtgatcaaaattctgttggacttgacaatgttttctatgatctgaacctgtcatttgaagtacaggttaaagactgtgtccactttgggcatgaagagtgtggagacttttcttccccattttccctccctcctttttcctttccatgttacatgagagacatcaatcaggttctcttctctttcttagaaatatctgatgttatatatacatggtcaataaaataaaactggcctgacttaagataaccattttaaaaaattgggctgtcatgtgggaataaaagaattctttctttcctactacattctgttttatttaaatactcattgttgctatttcactttttgacttgacttttatatttctttaaaaaattccttccttttaaaaaatataaaagggactactgttcattccagttttcttcttctttgttgttcttctagtgtgacttttcaagtgtaacagccattcttcctgactttaatattgtccagttctggtcttttctgtgaattaccactgggccccttacctcaatgctttttgttgatgcccactctggttcccttgtttatctgagtctgttggtaccccaaatgaccccacacccatcttaaagtactttttttcaccttccctgtttagtactggccagatgagttttttctagagctctgtcactatctgaaaagaaagaggctatgggaaacatagaaatggtatgtattaataactgatcataggctgaggagaaaaaatgtagctggctgcaaacccagtgctgtgaggtgacttatatgaggttccagatcaaagacaggccgtgtgagccagtccaggagggtgtaagttctgaatggttccttgctgactttgggtgacacatgtaccacatactggctcagtttaagtcatggttctattgtagatttatttttatattagttaataaatgactttaaattgtcaccaattgaaaatcttgtcactcttttggttttctttatatagctcagccaaatcttgttttatgtcctgtcctcatctcttaagctaaatctgtttggatcatattaataaac

SEQ ID NO: 4463 - DNA, 1898 bp, Homo sapiens
gctcaaatatattatgctctctcttgactctgtgcctttgcaagtgacattcacttggcctgaacactgttccagctccctctgttctttccaggtgatgccttctcgccttccaaatctcagtttagacgtgctcttctctgggaagtttattcatttactgtgtgttagatgttgttctaggccctggggatgtagcagagaagaagacaaagtcactgcatttggtgaggagctgtcatcttcagaatcaaaacttccccctagtgcagtgtccacctccagatactgcttcatttctctgctctctttgttcatgaaactttttcaataattgctttttcatttcttcatctccagtttttatctaattccaatttagtttctctctccatgactctgctcacactgatttttctcagacaccaacttttttttgccgcctaatacaatcgccatgttttttcttcatgttatttgatccttttagtggcactgggcataaatgaccacacgtttcttttcgaaacattatcatgacttttctgatgccacattctcctggcttttcttttgccccacaggaattcctgtagacatccactgccttactagatgtagggagcacctcagggcccagccctgtgcccactcctctctttagccctcatacttttcctaagtggtaccatctggtcccttgcttgaaatgccaaatgtgcattaaatgccaaaatgtatatcttcagcccaacctctgctttaaccccagcaactgtatgtccagatcctttttctcccttaatggataaggataaagaatcatatgaggatgcttaaacaaagtaggagccaatgcaacatgtctttaaatggagggaacagatttcaggttcctaaggacagcattgatgattctacccaagtgtactgaagatttctagcaggcgtgagatgctttcctttaccattccaaagtgttgttgctgggactttgctaacttgcctctaattttttttttaaatgaatatatcccttgttcattagctacctattgaacataaataacataaatgagatatcatgtcacaccagttagaatggcgatcattaaaaagtcaggaaacaacaagtgctggagaggatgtggagaaataggaacacttttacactgttgatgggactgtaaactagttcaaccattgtggaagacagtgtggtgattcctcagggatctataactagaaataccacttgacccagccatcccattactgggtatatacccaaaggaatataaatcatgcttctataaagacacatgcacacatatgtttattgcggcactactcacaatagcaaagacttggaaccaacccaaatgtccaacaatgatagactggattaagaaaatgtggcacatatacaccatggaatactatgcagccataaaaaatgatgagttcatgtcctttgtagggacatggatgaagctggaaaccatcattctcagcaaactatcgcaaggacagaaaaccaaacattgcatgttatcactcataggtgggacttgaacaatgagaacacttggacacagaagggggaatatcacacaccggggcctgttgtggggttgggggagtggggagggttagcattaggagatatacctaatgtaaatgacgagttaatgggtgcagcacaccaacatggcacatgtatacatatataacaaacctacacgttgtgcacatgtaccctagaacttaaagtataataaaaatatatataaataaatgtaaagagactaatgtaaaaaataaataaattttaagaagagaattagctacaaataagaaaactaaagttccttagaacttaaaaaataaatcttcat

SEQ ID NO: 4464 - DNA, 2291 bp, Homo sapiens
ggggccgcccggatcgccgccgccgccgccgcacgtacgtggcatgcctggatgtccctgccctggctgtggcatggcgggcccaaggctcctcttcctcactgcccttgccctggagctcttggaaagggctgggggttcccagccggccctccggagccgggggactgcgacggcctgtcgcctggacaacaaggaaagcgagtcctggggggctctgctgagcggagagcggctggacacctggatctgctccctcctgggttccctcatggtggggctcagtggggtcttcccgttgcttgtcattcccctagagatggggaccatgctgcgctcagaagctggggcctggcgcctgaagcagctgctcagcttcgccctggggggactcttgggcaatgtgtttctgcatctgctgcccgaagcctgggcctacacgtgcagcgccagccctggtggtgaggggcagagcctgcagcagcagcaacagctggggctgtgggtcattgctggcatcctgaccttcctggcgttggagaagatgttcctggacagcaaggaggaggggaccagccaggcccccaacaaagaccccactgctgctgccgccgcgctcaatggaggccactgtctggcccagccggctgcagagcccggcctcggtgccgtggtccggagcatcaaagtcagcggctacctcaacctgctggccaacaccatcgataacttcacccacgggctggctgtggctgccagcttccttgtgagcaagaagatcgggctcctgacaaccatggccatcctcctgcatgagatcccccatgaggtgggcgactttgccatcctgctccgggccggctttgaccgatggagcgcagccaagctgcaactctcaacagcgctggggggcctactgggcgctggcttcgccatctgtacccagtcccccaagggagtagttgggtgttctcccgctgcagaggagacggcagcctgggtcctgcccttcacctctggcggctttctctacatcgccttggtgaacgtgctccctgacctcttggaagaagaggacccgtggcgctccctgcagcagctgcttctgctctgtgcgggcatcgtggtaatggtgctgttctcgctcttcgtggattaactttccctgatgccgacgcccctgccccctgcagcaataagatgctcggattcactctgtgaccgcatatgtgagaggcagagagggcgagtggctgcgagagagaatgagcctcccgccagacaggagggaggtgcgtgtggatgtatgtggtgtgcacatgtggccagaggtgtgtgcgcgagaccgacactgtgatccctgtgctgggtccggggcccagtgtagcgcctgtccccagccatgctgtggttacctctccttgccgccctgtcaccttcacctcccggagtaagcagcgaggaagagcagcactggtcccaagcagaggccttgccctgctgggaccccgggagtgagagcagcccaaggatccagggtgcagggaactccagagctgcccacctcccactgccccctcagcacacacacagtccccaggcggcctaggggccaaggctggggcggctttggtcccttttcctggcccttccttccccacttctaagccaaagaaaggagaggcaggtgctcctgtaccccagccccactcagcactgacagtccccagctcctagtagtgagctgggaggcgcttcctaagaccctttcctcagggctgccctgggagctcattcctggccaacacgccctggcagcaccagcagctcttgccacctccagctgccaaacagcagcctgccgggcagggagcagccccaggccagagaggcctcccggtccagctcagggatgctcctgccagcacaggggccagggactcctggagcaggcacatagtgagcccgggcagccctgcccagctcaggcccctttccttccccattgaggttggggtaggtgggggcggtgagggctccacgttgtcagcgctcaggaatgtgctccggcagagtgctgaagccataatccccaaccatttcccttggctgacgcccaggtactcagctggcccactccacagccaggcctggccctgcccttcaccgtggatgttttcagaagtggccatcgagaggtctggatggttttatagcaactttgctgtgattccgtttgtatctgtaaatatttgttctatagataagatacaaataaatattatccacat

SEQ ID NO: 4465 - DNA, 1666 bp, Homo sapiens
agaagaaaccaagtgtccgggattcagacctctctgcggccccaagtgttcgtggtgcttccagaggcagggctatgctcacattcatggcctctgacagcgaggaagaagtgtgtgatgagcggacgtccctaatgtcggccgagagccccacgccgcgctcctgccaggagggcaggcagggcccagaggatggagagaatactgcccagtggagaagccaggagaacgaggaggacggtgaggaggaccctgaccgctatgtctgtagtggggttcccgggcggccgccaggcctggaggaagagctgaccctcaaatacggagcgaagcatgtgatcatgctgtttgtgcctgtcactctgtgcatgatcgtggtggtagccaccatcaagtctgtgcgcttctacacagagaagaatggacagctcatctacacgccattcactgaggacacaccctcggtgggccagcgcctcctcaactccgtgctgaacaccctcatcatgatcagcgtcatcgtggttatgaccatcttcttggtggtgctctacaagtaccgctgctacaagttcatccatggctggttgatcatgtcttcactgatgctgctgttcctcttcacctatatctaccttggggaagtgctcaagacctacaatgtggccatggactaccccaccctcttgctgactgtctggaacttcggggcagtgggcatggtgtgcatccactggaagggccctctggtgctgcagcaggcctacctcatcatgatcagtgcgctcatggccctagtgttcatcaagtacctcccagagtggtccgcgtgggtcatcctgggcgccatctctgtgtatgatctcgtggctgtgctgtgtcccaaagggcctctgagaatgctggtagaaactgcccaggagagaaatgagcccatattccctgccctgatatactcatctgccatggtgtggacggttggcatggcgaagctggacccctcctctcagggtgccctccagctcccctacgacccggagatggaagactcctatgacagttttggggagccttcataccccgaagtctttgagcctcccttgactggctacccaggggaggagctggaggaagaggaggaaagtaagggggcgtgaagcttggcctcggggacttcatcttctacagtgtgctggtgggcaaggcggctgccacgggcagcggggactggaataccacgctggcctgcttcgtggccatcctcattggcttgtgtctgaccctcctgctgcttgctgtgttcaagaaggcgctgcccgccctccccatctccatcacgttcgggctcatcttttacttctccacggacaggaagcacagcaggtttatccagatgaactgagaaggtcagattagggtggggagaagagcatccggcatgagggctgagatgcgcaaagagtgtgctcgggagtggcccctggcacctgggtgctctggctggagaggaaaagccagttccctacgaggagtgttcccaatgctttgtccatgatgtccttgttattttattgcctttagaaactgagtcctgttcttgttacggcagtcacactgctgggaagtggcttaatagtaatatcaataaatagatgagtcctgttag

SEQ ID NO: 4466 - DNA, 1016 bp, Homo sapiens
tgttcgcagccgccgccgcgccgccgtcgctctccaacgccagcgccgcctctcgctcgcgtaagtaaggaggtctctgtaccatggctcgtacaaagcagactgcccgcaaatcgaccggtggtaaagcacccaggaagcaactggctacaaaagccgctcgcaagagtgcgccctctactggaggggtgaagaaacctcatcgttacaggcctggtactgtggcgctccgtgaaattagacgttatcagaagtccactgaacttctgattcgcaaacttcccttccagcgtctggtgcgagaaattgctcaggactttaaaacagatctgcgcttccagagcgcagctatcggtgctttgcaggaggcaagtgaggcctatctggttggcctttttgaagacaccaacctgtgtgctatccatgccaaacgtgtaacaattatgccaaaagacatccagctagcacgccgcatacgtggagaacgtgcttaagaatccactatgatgggaaacatttcattctcaaaaaaaaaaaaaaaaatttctcttcttcctgttattggtagttctgaacgttagatattttttttccatggggtcaaaaggtacctaagtatatgattgcgagtggaaaaataggggacagaaatcaggtattggcagtttttccattttcatttgtgtgtgaatttttaatataaatgcggagacgtaaagcattaatgcaagttaaaatgtttcagtgaacaagtttcagcggttcaactttataataattataaataaacctgttaaatttttctggacaatgccagcatttggatttttttaaaacaagtaaatttcttattgatggcaactaaatggtgtttgtagcatttttatcatacagtagattccatccattcactatacttttctaactgagttgtcctacatgcaagtacatgtttttaatgttgtctgtcttctgtgctgttcctgtaagtttgctattaaaatacattaaactat

SEQ ID NO: 4467 - DNA, 1531 bp, Homo sapiens
actaatagggatgccaaaggaaaaatatgatcctccagatcctcgcagaatttataccatcatgtcagcagaggaggtagccaatgggaaaaaatctcactgggcagaattagaaatctcgggtagagtgcggagcctaagtacatcactttggtcattgacacacttgacagcgctgcacctaaatgacaattaccttagtcgcattccacctgatattgccaagcttcataatctggtttacctggatctgtcatccaataaactcagaagtttaccagcagaactaggaaacatggtgtctctcagggaattgcttttaaataacaatctgttacgggttttgccttatgaacttggtcggctcttccagctactgaacttcatgcttgacaatctcgcagttcatccagagcagcttcctccgaggccatggattacattaaaagaacgagaccaaattctgccgtcagcatcattcacggttatgtgttacaatgtgttatgtgataaatacgctacccggcagctatatggctattgcccatcctgggcattaaactgggaatacaggaaaaagggaattatggaagaaattgttaactgtgacgcagatatcattagtcttcaggaagtggaaacagagcaatacttcactctctttctgccagcattgaaggagcgtggatatgatggatttttttctccaaagtcacgtgccaaaatcatgtctgagcaggagagaaagcatgtagatggttgtgcaatattcttcaaaacagaaaaatttacattggtgcagaagcatacagtggaatttaaccaagtggcgatggctaattcagatggatccgaagctatgctgaacagagtgatgacaaaagataacattggtgtcgctgtggtattagaggtccacaaagaactatttggagcaggtatgaagcctattcatgctgcagacaaacagctgcttatagtggcaaatgcccacatgcattgggacccagagtattctgatgtgaagctcatccagaccatgatgtttgtctcagaggttaaaaacattctggagaaagcctctagtaggcctggaagcccaactgcagatcctaattccatcccgctggtgctatgtgcagatcttaactcattgccagattcaggtgttgtggaatacttaagcaatggaggagtagctgacaaccataaagacttcaaggaactaaggtacaatgagtgtcttatgaacttcagctgcaatggaaagaatggaagctcagaagggagaatcacacatggcttccaacttaagagcgcctatgaaaataacttgatgccttacaccaattacacctttgatttcaaagtgagtggcagcctttgggcaggtgtagaaattatttcagatacaagcatgtaacaaaaaaggtgtaaattctttatgattaattgtataatcttcaggaatttttagattcttaaaatgtctaggctaagtatgcacctaaatataagtaggtttattggg

SEQ ID NO: 4468 - DNA, 4460 bp, Homo sapiens
tggctattgcccatcctgggcattaaactgggaatacaggaaaaagggaattatggaagaaattgttaactgtgacgcagatatcattagtcttcaggaagtggaaacagagcaatacttcactctctttctgccagcattgaaggagcgtggatatgatggatttttttctccaaagtcacgtgccaaaatcatgtctgagcaggagagaaagcatgtagatggttgtgcaatattcttcaaaacagaaaaatttacattggtgcagaagcatacagtggaatttaaccaagtggcgatggctaattcagatggatccgaagctatgctgaacagagtgatgacaaaagataacattggtgtcgctgtggtattagaggtccacaaagaactatttggagcaggtatgaagcctattcatgctgcagacaaacagctgcttatagtggcaaatgcccacatgcattgggacccagagtattctgatgtgaagctcatccagaccatgatgtttgtctcagaggttaaaaacattctggagaaagcctctagtaggcctggaagcccaactgcagatcctaattccatcccgctggtgctatgtgcagatcttaactcattgccagattcaggtgttgtggaatacttaagcaatggaggagtagctgacaaccataaagacttcaaggaactaaggtacaatgagtgtcttatgaacttcagctgcaatggaaagaatggaagctcagaagggagaatcacacatggcttccaacttaagagcgcctatgaaaataacttgatgccttacaccaattacacctttgatttcaaaggcgtgattgactacattttctattccaagactcatatgaacgtgcttggtgtcctggggcctttagatcctcaatggctggttgagaacaacatcactgggtgtccacaccctcacatcccttcagaccacttctcactgttaacacaacttgaactccaccctccactcctgcctcttgtcaatggtgttcacttgcctaatcggaggtagtggagtactgccccgccaagacggggatctgttgctatggacctgtacagttgtaaatcaaagtatgtaggagtgaagtatggccatccttaagctgcttcttcaggtttctttcattatgtgtttgctgtaagactttgtacatttttgtgcatattggtatcatttggcagtagggctggaaccaaagtattactctctttacaaaattttaatttaacatgtttttaaattggaccttctttatattgtattaacagccagcattcaaaattgataaattaccaatttgaggcccaataacagtgtatttgtttttccaaaacaaatactttcttttgaatggtttcagtgagccaaccattttataaaaggcaatttttaaaaactataaatacagtattttaaactgaatgatgatatgccttccagggaaaaccttgaatttttcctttataactgacttttggattccaaagtcatttgcacattaacagagtacttaaatttacttgttcagtccataaactatgatatagcctctatacatggtaagaaaatttgaaaaattaaagatggttgcacagtatacttttataatccagcatgtaacaccacatgacaatttgttggccaaatgctggtttggagtttttttgaggaatcactttggtttttttgtcctttatatataaccttattggaagtattaattctaagcctgtctctcaagtttatttatagagaaaaagtaagtaatctgtattgccacataccttgaaaatagaatgtggtatgtttaggatgcccacggaatgaatttttccttattccaattcaaccttctgtctggttgtgccaggaaaacagatgttatatgacctatgtcatttttgccattatagtcaaatgttaaaagaagaaaaaagtctgctgaataaaaaggccttgatcaaagtttcagatggggaaaatcatacagatattttatgtgtttccaacatagattatgtggctgttggtttcttgagatgacagtgcaaaggatttgggagagagaacaaatttggggcagtagttgaaaacgttgggtcattttcctgactctagctgccaaatggccatcatatgcttttaatctttgtttcagttgtctgtcagggttgaattaagaagctactggtttattcccaattgttgatgcctttaggtatgttggaatcttttttttgcctaggaggggccagttgaaaatctgtgactcaagaggcagtgaacagaatactgttttctggggaaaaattggttggctacttgatgttaattatggcacagtaacaggaaaaggttgtgtctgtgtttttaagtttttctttattctgcttttttgctgctataagagttttctgaaatttatattttaaacttttcatgcactttactgtttctagtctcaaaatgtgatatttttaataaacaagaaattttccattatgtgaatgaaattttaaaagacaatagcctatatttgtgtctcactaatatataaagtataggtcaaatttaaattatttaattagttttaaatatacacaatttgtctcctctttcaaacctgacatcttcggctgttttattagtcttaaatgatgcatttactttggtcattttatgctaatttcttccatagtaaattaatcaggctatataaggtaatatttccccagagggtaattttagtgggacgagggtggtgggatgatgtcatatcatacatgggattgcatcagaagggttctgtaaagcctgaactcccttttaaaagtgcctagtgatagaggcgttgtttgtcatctattataattggaatgtcattgtagttcagtgaattttgatgtaaataaaatatcttttaaaaatgttaaagtaccaggataaacaaacaaaaagaaacaacccttaagatgacagattttcctcaacatgcaggtttcccttcttatatacctcaagtatccaacatctagccatgcaaattgattacctgaagcatagtactggaaagtagaatagcatgaaaaacttaattttgtggacattacctttttttgtaatcagctactgtatgttttattttagatcttttgttttgggtgggttttctgctctggaggtatatgcactaacaaaacattttcctcctttcatatacgcatgttaattagcaatgtgagcaatatttcctaccatacttcactcccaatattttttgagatgtttgtataaaatggaatttaaagttcacttatgattgtatatgaaccacagaggagcccatttattaataaaaaacttttttaatagttaaatgtagagggaaaaaataaaaaaaaatgggaaacattgtaaacagcttaagtttattttgtgtatgatcgaggcactctgttgcaggaaggtgtgtaattgggttctctctgcttcaaatgcgctctttcaaaccattcattatcctgtgtatttttaatgtggttttagtaaatgttggtagtagctctgttgaagtaggtaattgtgttatgttttgggtggtacacacttggggcatggtaacccaaatttcatgtgcacggtttccctttagcccactgcccaaatttcacatacccttcaccctttgttccctttgtaaaaggagtggtatctgttttgagctgccaattcagatgatcagaaatgctgctttcctcagcattgtcttgttaaaccgcatgccatttggaactttggcagtgagaagccaaaaggaagaggtgaatgacatatatatatatatattcaatgaaagtaaaatatatatgctcatatactttctagttatcagaatgagttaagctttatgccattgggctgctgcatattttaatcagaagataaaagaaaatctgggcatttttagaatgtgatacatgtttttttaaaactgttaaatattatttcgatatttgtctaagaaccggaatgttcttaaaatttactaaaacagtattgtttgaggaagagaaaactgtactgtttgccattattacagtcatacaagtgcatgtcaagtcacccactctctcaggcatcagtatccacctcatagctttacacattttgatggggaatattgcagcatcctcaggcctgacatctgggaaaggctcagatccacctactgctccttgctcgttgattttgttttaaaatattgtgcctggtgtcaacttttaagcaacagcactgcctaaaagcaagcagagaacagaatcccagcaccattctataggcaactttttagaattcagatatagtaaatctgttccagatttatgatgttttatgtaaaaaaaattttgtataataacat

SEQ ID NO: 4469 - DNA, 4792 bp, Homo sapiens
  misc_feature (899)..(976): n is a, c, g, or t
gagaggacgaggtgccgctgcctggagaatcctccgctgccgtcggctcccggagcccagccctttcctaacccaacccaacctagcccagtcccagccgccagcgcctgtccctgtcacggaccccagcgttaccatgcatcctgccgtcttcctatccttacccgacctcagatgctcccttctgctcctggtaacttgggtttttactcctgtaacaactgaaataacaagtcttgatacagagaatatagatgaaattttaaacaatgctgatgttgctttagtaaatttttatgctgactggtgtcgtttcagtcagatgttgcatccaatttttgaggaagcttccgatgtcattaaggaagaatttccaaatgaaaatcaagtagtgtttgccagagttgattgtgatcagcactctgacatagcccagagatacaggataagcaaatacccaaccctcaaattgtttcgtaatgggatgatgatgaagagagaatacaggggtcagcgatcagtgaaagcattggcagattacatcaggcaacaaaaaagtgaccccattcaagaaattcgggacttagcagaaatcaccactcttgatcgcagcaaaagaaatatcattggatattttgagcaaaaggactcggacaactatagagtttttgaacgagtagcgaatattttgcatgatgactgtgcctttctttctgcatttggggatgtttcaaaaccggaaagatatagtggcgacaacataatctacaaaccaccagggcattctgctccggatatggtgtacttgggagctatgacaaattttgatgtgacttacaattggattcaagataaatgtgttcctcttgtccgagaaataacatttgaaaatggagagnnnnnnnnnnnnnnnnnnnnnnnnnnnnnnnnnnnnnnnnnnnnnnnnnnnnnnnnnnnnnnnnnnnnnnnnnnnnnnaatgaagtagctcggcaattaataagtgaaaaaggtacaataaactttttacatgccgattgtgacaaatttagacatcctcttctgcacatacagaaaactccagcagattgtcctgtaatcgctattgacagctttaggcatatgtatgtgtttggagacttcaaagatgtattaattcctggaaaactcaagcaattcgtatttgacttacattctggaaaactgcacagagagaattccatcatggacctgacccaactgatacagccccaggagagcaagcccaagatgtagcaagcagtccacctgagagctccttccagaaactagcacccagtgaatataggtatactctattgagggatcgagatgagctttaaaaacttgaaaaacagtttgtaagcctttcaacagcagcatcaacctacgtggtggaaatagtaaacctatattttcataattctatgtgtatttttattttgaataaacagaaagaaattttgggtttttaatttttttctccccgactcaaaatgcattgtcatttaatatagtagcctcttaaaaaaaaaaaacctgctaggatttaaaaataaaaatcagaggcctatctccactttaaatctgtcctgtaaaagttttataaatcaaatgaaaggtgacattgccagaaacttaccattaacttgcactactagggtagggaggacttagggatgtttcctgtgtcgtatgtgcttttctttctttcatatgatcaattctgttggtattttcagtatctcatttctcaaagctaaagagatatacattctggatacttgggaggggaataaattaaagttttcacactgtgtactgtgttttactgattggttggatattgcttatgaaaattccatagtggtatttttttggattcttaatgtgtaacttaaacatactttgaagtggaggagagtcataagacagaacatttggcaggaattgtccttatgaaacaagaaaaagaaaatgaaaagtattattaagcttctgtgtttgtctaaaaatgtggcatatggatggcatttaaaactttgaatgaattatacctaaatctgggacagggaggtgacagtggaacaggctaccaatcagaactagatgacttttaaggctcctcctattatgagacttcaatttccaaagagaagaactagcagagaaattgtatttcagtaattttaagctccttctgtcttgtagagtcttgttatagttgtataaatcaaaaacacagaataaggaacatatttaactttttttcattataaaatggttagaggaccctaccccctctagattccctgatttccccaggcctgcagcatacagtaagatgggtccctgtgccaggcctcaatactgccagggaataaaaccagagggagaggaccctcagtgtcatatcaggaagcccagtgccagaggacagacaggttcaaaactggcttttcctctgggcctgggttggtgctataggccaagggtcattttatacttgggtataaatcaatcccagtttgggaaaagattatttttaagcttaaaaggctgacatgtgccattatatgtagtatgtaatatatgtaacatcttccaattcttttaaaataaaattaatatttataatggatatttaatgattgttatttttaaaaaccagcttataattcctcgttatgcatgatttatccaaagtttccatagttttattcaaaataataaatgttaataaggtgataaggggtatatttaatgtattgtatcaaattgtgaataagaaagtaggatggagctttctagaggttgggccttagttctgttatcctcattgcttttaaccaataagttaaatgaagttagagttatggtcttcaggttagattatggaccagatctgtgagggtcagcatggaaattcacattcaacaaggtagcacacaggaccaagagcagcacatgcaatcaactggaataatatagtaatcctgtaactgggtttgaaaaaataatcaacaaaagatacaattcaagggttaggttgcagagagctggcttgagagtagttattatgaaaaaggcctcaaggagtacgtgttcagtatgctctaagatgataaagtggctgttaaaaagggagttgatttgaggaagtattacttagcattcatgcatattgggcttaggctctagccctgccactatcattgtcttctctggactgtgaagtcactgaggacaaggaaactaaatttaatgtctgtatcactagtgcctagaatttctggacacttagtagtcaccatcaggcgtttatttaatgaatgagaagcaaagtgaccttggttacttttttaccctgaggggctcagcactcattaggacttggtgcctaattttataaaaagtcactaagctcaagtgcttggatgaaaggacagcgtggataaaaaggtttttaaaacatggatgttaaggctgttttgcttggagaagacttgggactgggacagtctttagatattatttgaaatgctggcactgtctatctggatcccagggcttgaactaggatttgaggaagtcacagggaagcagatttcagtctgacatttattcagtgcaagttttttggtgctgtagtatatgatgaaagatgtaaagctgaataaagcattatttctgccctagagttgttcacagcctagtcaggcatatggatatgtaaacaatgactgtaacgtgttatagatgtaaagacaaaataaaggttaaagagggcataaaggagcactcaattgcagagatttgaggacattatttttattttgagctttaaaaagatgaataggtgttctcaggaggtagggatctggctgagagggaataatctgagcaaaggtatgaaacagcctaatgcattagagaaaaaagttcttttagtaaggcatttggggttggggaagctagaaaaagaaatgggagctggtcacacagggccttgtgtgccagactaaggggtttgtagtatatattgtaggcagaagagatccatcaacagattgcaagcaaggaagtatgttcactttaaagtttgagaaagaatagtgtggaagcacgtctcaaatttagacttgttccccctctgaaccgtgaatcagaccatttcaggtagaagtcttccccggtttatctgatctactcggggcctcaggcttctcagctgggaagagaggatgcaagaccagactgaagaacacggttgagtccccagaaccaaaagggggcctttctgcttcttagccagctacctcttcgagtttttcaaattgtgagggggaccataaaaggatggaaacttttagatgacattctacaaattatttttttctttaaattaaaagaacctagccaataagatagagaatgggcatctaaggcatctcagagctctctgatgaagccaggttgtcaaagatcatttgcaaaagaagggaaaactggcatgacaaaagctacagagaggagagtgaaatatagaagtgtttgaaatgttcaagctcacaataagcttaaatttatagaaaatgctaaggttgtcaagaaggcttttttttttttcttttttaaacctgagggcaaaaaggaatggataaagtagtgtaatggattgacaatcaggaagaacagaataactcagttttttttctcctacaaggagatatggctggaccaaaataaaatgacatgaaactgcaaaaatgaaaa

SEQ ID NO: 4470 - DNA, 5545 bp, Homo sapiens
  misc_feature (1641)..(1806): n is a, c, g, or t
ctgactgcactggtgatggtccctggcaatccaacctggcaccatcgcagttggagtactatgcatcttcaccagatgaaaaggctctagtagaagctgctgcaaggattggtattgtgtttattggcaattctgaagaaactatggaggttaaaactcttggaaaactggaacggtacaaactgcttcatattctggaatttgattcagatcgtaggagaatgagtgtaattgttcaggcaccttcaggtgagaagttattatttgctaaaggagctgagtcatcaattctccctaaatgtataggtggagaaatagaaaaaaccagaattcatgtagatgaatttgctttgaaagggctaagaactctgtgtatagcatatagaaaatttacatcaaaagagtatgaggaaatagataaacgcatatttgaagccaggactgccttgcagcagcgggaagagaaattggcagctgttttccagttcatagagaaagacctgatattacttggagccacagcagtagaagacagactacaagataaagttcgagaaactattgaagcattgagaatggctggtatcaaagtatgggtacttactggggataaacatgaaacagctgttagtgtgagtttatcatgtggccattttcatagaaccatgaacatccttgaacttataaaccagaaatcagacagcgagtgtgctgaacaattgaggcagcttgccagaagaattacagaggatcatgtgattcagcatgggctggtagtggatgggaccagcctatctcttgcactcagggagcatgaaaaactatttatggaagtttgcagaaattgttcagctgtattatgctgtcgtatggctccactgcagaaagcaaaagtaataagactaataaaaatatcacctgagaaacctataacattggctgttggtgatggtgctaatgacgtaagcatgatacaagaagcccatgttggcataggaatcatgggtaaagaaggaagacaggctgcaagaaacagtgactatgcaatagccagatttaagttcctctccaaattgctttttgttcatggtcatttttattatattagaatagctacccttgtacagtattttttttataagaatgtgtgctttatcacaccccagtttttatatcagttctactgtttgttttctcagcaaacattgtatgacagcgtgtacctgactttatacaatatttgttttacttccctacctattctgatatatagtcttttggaacagcatgtagaccctcatgtgttacaaaataagcccaccctttatcgagacattagtaaaaaccgcctcttaagtattaaaacatttctttattggaccatcctgggcttcagtcatgcctttattttcttttttggatcctatttactaatagggaaagatacatctctgcttggaaatggccagatgtttggaaactggacatttggcactttggtcttcacagtcatggttattacagtcacagtaaagatggctctggaaactcatttttggacttggatcaaccatctcgttacctggggatctattatattttattttgtattttcccttgttttatggagggattctctgnnnnnnnnnnnnnnnnnnnnnnnnnnnnnnnnnnnnnnnnnnnnnnnnnnnnnnnnnnnnnnnnnnnnnnnnnnnnnnnnnnnnnnnnnnnnnnnnnnnnnnnnnnnnnnnnnnnnnnnnnnnnnnnnnnnnnnnnnnnnnnnnnnnnnnnnnnnnnnnnnnnnnncttactgaaacaaatgcaggtatcaagtgcttggactccatgtgctgtttcccggaaggagaagcagcgtgtgcatctgttggaagaatgctggaacgagttataggaagatgtagtccaacccacatcagcagatcatggagtgcatcggatcctttctataccaacgacaggagcatcttgactctctccacaatggactcatctacttgttaaaggggcagtagtactttgtgggagccagttcacctcctttcctaaaattcagtgtgatcaccctgttaatggccacactagctctgaaattaatttccaaaatctttgtagtagttcatacccactcagagttataatggcaaacaaacagaaagcattagtacaagcccctcccaacacccttaatttgaatctgaacatgttaaaatttgagaataaagagacatttttcatctctttgtctggtttgtcccttgtgcttatgggactcctaatggcatttcagtctgttgctgaggccattatattttaatataaatgtagaaaaaagagagaaatcttagtaaagagtattttttagtattagcttgattattgactcttctatttaaatctgcttctgtaaattatgctgaaagtttgccttgagaactctatttttttattagagttatatttaaagcttttcatgggaaaagttaatgtgaatactgaggaattttggtccctcagtgacctgtgttgttaattcattaatgcattctgagttcacagagcaaattaggagaatcatttccaaccattatttactgcagtatggggagtaaatttataccaattcctctaactgtactgtaacacagcctgtaaagttagccatataaatgcaagggtatatcatatatacaaatcaggaatcaggtccgttcaccgaacttcaaattgatgtttactaatatttttgtgacagagtataaagaccctatagtgggtaaattagatactattagcatattattaatttaatgtctttatcattggatcttttgcatgctttaatctggttaacatatttaaatttgctttttttctctttacctgaaggctctgtgtatagtatttcatgacatcgttgtacagtttaactatatcaataaaaagtttggacagtatttaaatattgcaaatatgtttaattatacaaatcagaatagtatgggtaattaaatgaatacaaaaagaagagcctctttctgcagccgacttagacatgctcttccctttctataagctagattttagaataaagggtttcagttaataatcttattttcaggttatgtcatctaacttatagcaaactaccacaatacagtgagttctgccagtgtcccagtacaaggcatatttcaggtgtggctgtggaatgtaaaaatgctcaacttgtatcaggtaatgttagcaataaattaaatgctaagaatgattaatcgggtacatgttactgtaattaactcattgcacttcaaaacctaacttccatcctgaatttatcaagtagttcagtattgtcatttgtttttgttttattgaaaagtaatgttgtcttaagatttagaagtgattattagcttgagaactattacccagctctaagcaaataatgattgtatacatattaagataatggttaaatgcggttttaccaagttttcccttgaaaatgtaattcctttatggagatttattgtgcagccctaagcttccttcccatttcatgaatataaggcttctagaattggactggcaggggaaagaatggtagagacagaaattaagactttatccttgtttgcttgtaaactattattttcttgctaatgtaacatttgtctgttccagtgatgtaaggatattaagttattaagctaaatattaattttcaaaaatagtccttctttaacttagatatttcatagctggatttaggaagatctgttattctggaagtactaaaaagaataatacaacgtacaatgtctgcattcactaattcatgttccagaagaggaaataatgaagatatactcagtagagtactaggtgggaggatatggaaatttgctcataaaatctcttataaaacgtgcatataacaaaatgacacccagtaggcctgcattacatttacatgaccgtgtttatttgccatcaaataaactgagtactgacaccagacaaagactccaaagtcataaaatagcctatgaccaactgcagcaagacaggaggtcagctcgcctataatggtgcttaaagtgtgattgatgtaattttctgtactcaccatttgaagttagttaaggagaactttatttttttaaaaaaagtaaatggcaaccactagtgtgctcatcctgaactgttactccaaatccactccgtttttaaagcaaaattatcttgtgattttaagaaaagagttttctatttatttaagaaagtaacaatgcagtctgcaagctttcagtagttttctagtgctatattcatcctgtaaaactcttactacgtaaccagtaatcacaaggaaagtgtcccctttgcatatttctttaaaattctttctttggaaagtatgatgttgataattaacttacccttatctgccaaaaccagagcaaaatgctaaatacgttattgctaatcagtggtctcaaatcgatttgcctccctttgcctcgtctgagggctgtaagcctgaagatagtggcaagcaccaagtcagtttccaaaattgcccctcagctgctttaagtgactcagcaccctgcctcagcttcagcaggcgtaggctcaccctgggcggagcaaagtatgggccagggagaactacagctacgaagacctgctgtcgagttgagaaaaggggagaatttatggtctgaattttctaactgtcctctttcttgggtctaaagctcataatacacaaaggcttccagacctgagccacacccaggccctatcctgaacaggagactaaacagaggcaaatcaaccctaggaaatacttgcattctgccctacggttagtaccaggactgaggtcatttctactggaaaagattgtgagattgaacttatctgatcgcttgagactcctaataggcaggagtcaaggccactagaaaattgacagttaagagccaaaagtttttaaaatatgctactctgaaaaatctcgtgaaggctgtaggaaaagggagaatcttccatgttggtgtttttcctgtaaagatcagtttggggtatgatataagcaggtattaataaaaataacacaccaaagagttacgtaaaacatgttttattaattttggtccccacgtacagacattttatttctattttgaaatgagttatctattttcataaaagtaaaacactattaaagtgctgttttatgtgaaataacttgaatgttgttcctataaaaaatagatcataactcatgatatgtttgtaatcatggtaatttagatttttatgaggaatgagtatctggaaatattgtagcaatacttggtttaaaattttggacctgagacactgtggctgtctaatgtaatcctttaaaaattctctgcattgtcagtaaatgtagtatattattgtacagctactcataattttttaaagtttatgaagttatatttatcaaataaaaactttcctatat

SEQ ID NO: 4471 - DNA, 2593 bp, Homo sapiens
gccctgctctagcgggccgcgtagcggacatggcgggctcccggctcccgcggcagctcttcctccagggcgtggcggccgtcttcatgtttgctttcgcttccctctacacgcaaatcccaggcctgtatggccccgagggcatcctacctgcaaggaggacgctgcggcctcagggcaaggggcgctggcagcagctgtgggagaccccgacgctgctgtgggaagcgccgagactggggctggacacggcccagggcctggagctgctgagcctgctgggtgcactagtggccctgggagccctgctgctgagcccactgcgccaccctgtcatctacttgctgctttgggccgcctacctgtcagcctgccaggtgggccaggtgttcctttatttccagtgggactccctgctgctagagactggcttcctggccgtgctggtggccccgctgaggccagcctcccaccgcaaggaggccccccagggcaggcaggcaggggccctgccccacgaagacctccccttctggctggtgcgatggctgctgttccgcctcatgttcgcctcaggcgtggtcaagctgaccagccgctgccctgcgtggtgggggctcactgccctcacctaccactacgagacccagtgcctgcccacgcccgccgcctggttcgcacaccacctgccggtctggctgcacaagctcagcgtggtggccaccttcctaattgagatcgctgtgccgcccctgttcttcgcccccattcgacgcctgcgcttggctgctttctactcgcaggtgctgctgcaggtcctgattatcatcaccggcaactacaacttcttcaacctgatgacgctggtgcttaccactgcgctgctggacgaccagcacctggctgctgagcctggccacggcagccgcaagaagacggccacctcctggcccaaggccctgctggccaccctgtcgctgctgctggaactagccgtctacgggcttctggcctatggcactgtgcactactttggcctggaggttgactggcagcagcgcaccatccactccagaaccactttcaccttccaccagttttctcagtggctgaagacactgacgctgcccactgtgtggctgggtgtggcctccctggtctgggagctgctgagtgccctgtggaggtggacccaggtgcggggctggctacggaagctcagtgctgtagtccaactgtcccttgtgggcactgcgaccgtggccttgttcctgattagcctggtgccgtactcctacgtggagcccgggacccacgggcgcctctggaccggggcccaccgcctgtttggtgccgtggagcacctacagctggccaactcctacggcctcttccgccgcatgactgggcttggtggacggcctgaggtggtgctggagggcagttacgacggccaccactggacggagatcgagttcatgtacaagcctgggaacctgagccggccgcccccggttgtggtgccccaccagccacgcctggactggcagatgtggtttgcagccctgggcccacacacgcacagcccgtggttcacaagcctggtcttgcgcctgctgcagggcaaggagccagtgatccgccttgtccagagccaagtggccaggtatcccttccacaagcagccgcccacctacgtccgagcccagcgctacaagtactggttctcccagcctggggagcagggccagtggtggcggcgccagtgggtggaggagttcttcccatccgtgtccctgggggaccccacgctggagacgctgctcaggcagtttggactacaggagaaaagcccacctcgcacccgcagcgccaacagcaccctggcccaggccctccactggactcgctctcagctgtctcccctggaggcccccgccctgctctgggggctcctcatggccgtgggggctgtcagatttgtgcaagccctgctagcaccctgttctctccggtcctccccgctggcaccagtcagcggggagaagcgcaggccagcctcccagaaagactccggagctgcctccgaacaggccaccgcagcccccaacccctgctccagtagttcgaggaccacccggcgaaagaagtagctgtgttctcccagctgcacgtcctgagagggccaggtcgccgggagtgctctggcctccggcaggacaggacccagccactgtgccttagctgaccctgcagggccaggcacaggttggggggctgcccctggggtttgcagggtgctgcattgagggctccaggccccacccccacgccagccatgcccctccccaggactcccactattgcctctgtgattggcccaggaggaaaacacgaccaagctcaagacccttcccctgccctgggctgtgggggtctgagtctagagcccccaaccctaggccccgtgccagaggggaagaggctgactcccaggggaagaggggaagcactgtcatcttccacgtcatcttcacaccagcccatcctgccctttagatctgggcaccaataaaggcgtcttttgtgcttg

SEQ ID NO: 4472 - DNA, 408 bp, Homo sapiens
gccatggttgcttgttatccgggcaatggaacgggttatgtacgtcatgttgataatccaaatggagatggaagatgtgtgacatgtatatattatcttaataaagactgggatgccaaatttgatagactgctgtttttctggtctgaccgtcgcaaccctcatgaagtacaaccagcatatgctacaaggtacgcaataactgtttggtattttgatgcagatgagagagcacgagctaaagtaaaatatctaacaggtgaaaaaggtgtgagggttgaactcaataaaccttcagattcggtcggtaaagacgtcttctagagcctttgatccagcaataccccacttcacctacaatattgttaactatttgttaacttgtgaatacgaataaatgggataaag

SEQ ID NO: 4473 - DNA, 2310 bp, Homo sapiens
gcatgggcggagcctagttacggtcgactggggcgtcgtccctagcccgggagccgggtctctggagtcgcggcccggggttcacgatgtccgacgaggaagcgaggcagagcggaggctcctcgcaggccggcgtcgtgactgtcagcgacgtccaggagctgatgcggcgcaaggaggagatagaagcgcagatcaaggccaactatgacgtgctggaaagccaaaaaggcattgggatgaacgagccgctggtggactgtgagggctacccccggtcagacgtggacctgtaccaagtccgcaccgccaggcacaacatcatatgcctgcagaatgatcacaaggcagtgatgaagcaggtggaggaggccctgcaccagctgcacgctcgcgacaaggagaagcaggcccgggacatggctgaggcccacaaagaggccatgagccgcaaactgggtcagagtgagagccagggccctccatgggccttcgccaaagtgaacagcatcagccccggctccccagccagcatcgcgggtctgcaagtggatgatgagattgtggagttcggctctgtgaacacccagaacttccagtcactgcataacattggcagtgtggtgcagcacagtgaggggaagcccctgaatgtgacagtgatccgcaggggggaaaaacaccagcttagacttgttccaacacgctgggcaggaaaaggactgctgggctgcaacattattcctctgcaaagatgattgtccctggggaacagtaacaggaaagcatcttcccttgccctggacttgggtctagggatttccaacttgtcttctctccctgaagcataaggatctggaagaggcttgtaacctgaacttctgtgtggtggcagtactgtggcccaccagtgtaatctccctggattaaggcattcttaaaaacttaggcttggcctctttcacaaattaggccacggccctaaataggaattccctggattgtgggcaagtgggcggaagttattctggcaggtactggtgtgattattattattatttttaataaagagttttacagtgctgatatgaccctgttgtcaccccagctgaatttcttatgaccctcccaaaccaaagctcagatggggtcagaagagcttcatagaaagttgggcaaaacaggctagcaattgcaaagtcaggctttgaccaacatatttctttgcactgaggccttgctgctgtggatacggaaatggttaagtactgtgcttcctcagcagctgggctgtcagggccatagtagctccctttggagaacagggaaagcctggaggcttcccaggtggcccagcgtggtgtcctgtcagcttcctctttaggaacccaccagagggcagcaagctcctttcacttcgctagtaagaacccctccgtttttgtgtgtttttgtttttgttttctggagacaaggtcttgctttgtcacccaggctggagtgcagtgtcgtgatcaaggttcactgaagccttgacgctgtgggcactgcctcagccgcccaagtatctgggaccacaggcgtgcaccaccatgcatagctaatttattttttgtagagacagggtctccctgtgttgaccaggttggtctcgaactcctgggctcaagcagtcctcctgccttggcctcctaaagtgctgggatcacaggcgtgagccactgcgcccagcccactgctagtttgactttttataattgaacctcctggctatgccctgagatcagcgctattttgtaaaccgctgaggtatggataggaacgagtagatcagacctcttgaaaatgcttattcttcctcccttttattttttgtctcttttaagatggtaaaatggttctcagggattcctgccaatactttgaattattttttcctctccatggtatcagtgttcatttccccagttcttgcacaccgctttctgttttggcagttctgccaggcaagccctgtgttccttgggactggttttgctgtggttggatacagataccagcttgccttgatgggattggtattgctgtgtgcttccagccacaggttctcacactcaattccaaagccttcctattgggcgaattccctcaaactctatttgacctgacagccatacgtattcccctctggtagccacagacatgctgtgtttaccaatgtttgctgtttaaattgcatgttctaattccacgtatcttccagtctcttttataaagtctcagactataataaacacagcttgcccagtt

SEQ ID NO: 4474 - DNA, 653 bp, Homo sapiens
gtttaaagctgagaacgcatctttagctaaacttcgcattgaacgagaaagtgccttggaaaaactcaggaaagaaattgcagacttcgaacaacagaaagcaaaagaattagctcgaatagaagagtttaaaaaggaggagatgaggaagctacaaaaggaacgtaaagtttttgaaaagtatactacagctgcaagaacttttccagataaaaaggaacgtgaagaaatacagactttaaaacagcaaatagcagatttacgggaagatttgaaaagaaaggaaaccaaatggtcaagtacacacagccgtctcagaagccagatacaaatgttagtcagagagaacacagacctccgggaagaaataaaagtgatggaaagattccgactggatgcctggaagagagcagaagccatagagagcagcctcgaggtggagaagaaggacaagcttgcgaacacatctgttcgatttcaaaacagtcagatttcttcaggaacccaggtagaaaaatacaagaaaaattatcttccaatgcaaggtaagaggctgcatgatctttttataaaacatttcagaatgtaaggaataaacaatttatacccaacttaataaaacatttcttaataaatgtttttgaacatttgaa

SEQ ID NO: 4475 - DNA, 1790 bp, Homo sapiens
ccctggccttccacgacggcagcgtccacatcgtgcaccggctctcactgcagaccatggccgtcttctacagctccgcggccccgaggcctgtggatgagccggccatgaagcgcccccgcaccgcgggccccgccgtccacttaaaggctatgcagctatcgtggacgtcactggccctggtggggattgacagccacgggaagctgagcgtgctccgcctctcaccttccatgggccacccgctggaggtggggctggcgctgcggcacctgctcttcctgctggagtactgcatggtgaccggctacgactggtgggacatcctgctgcacgtgcagcccagtatggtacagagcctggtggagaagctgcacgaggagtacacgcgccagaccgctgccctgcagcaggtcctctccacccggatcctggccatgaaggcctcgctctgcaagctgtcgccctgcacggtgactcgcgtgtgcgactaccacaccaagctcttcctcatcgccatcagctccaccctgaagtcgctgctgcgcccccactttctcaacacgcctgacaagagccccggcgaccggctgaccgagatctgcaccaagatcaccgacgtcgacattgacaaggtcatgatcaacctcaagacggaggaatttgtgctggacatgaacacactgcaggcgctgcagcagctcttgcagtgggtgggcgacttcgtgctgtacctgctggccagcctacccaaccagggttccctgctgaggccgggccacagctttctgcgggacggcacctcgctgggcatgcttcgggaattgatggtggtcatccgcatctggggccttctgaagcccagctgcctgcccgtgtatacggccacttcggatacccaggacagcatgtccctgctcttccgcctgctcaccaagctctggatctgctgtcgcgatgagggcccagcgagcgagccggacgaggcgctggtggatgaatgctgcctgctgcccagccagctgcttatccccagcctggactggctgccagccagcgacggcctggtcagccgcctgcagcccaagcagccccttcgtctgcagtttggccgggcgcccacgctgcctggcagtgctgccaccctgcagctcgacggcctcgccagggccccaggccagcccaagatcgaccacctgcggaggctgcaccttggcgcttgccccacggaggaatgcaaggcctgcaccaggtgcggctgtgtcaccatgctcaagtcgcccaacagaaccacggcggtgaagcagtgggagcagcgctggatcaagaactgcctgtgcggtgggctctggtggcgggtgcccctcagctacccctgagcccagctgcccctcagctactcctcagctacccctcagctgcccctgagcccggctgctgcaagagccaccgctcgccctggactctcctcggcgcggttaacctcagcccgccctgcagggctgttgaaggccgtgggccggacgcctgcgtgaccagcagagcttctgaggaagcccctgcctttgtccagctgggcccgcagtccacacaccactctcccaggacccccagatccctggaccatctgcatccaaaggaccgtccgtgacggccgggggtccaggcggaccttgtggtgacccggctcgggcgtctcctcggtttccttgcctcacccgcggagagcgctgaacctggacaagcagcggctgggaaggacaggtccaataaacgccctctgcgcccag

SEQ ID NO: 4476 - DNA, 3165 bp, Homo sapiens
ggccccacgcctcaggcgactggttgttaccgaggaagatggcggcgccagacccgaggcgctagggaagatcgcaccgcggacgcccgctgagcttggcgcacgggccgaccaggagctggtgactgccctcatgtgtgatttgcggcggccagcggcaggtgggatgatggacttggcctacgtctgtgagtgggagaaatggtccaagagcacccactgcccatcggtgcccctggcctgcgcctggtcctgccgaaatctcatcgccttcaccatggacctgcgcagcgatgaccaggacctgacccgcatgatccacatcctggacacggagcacccctgggacctgcactcgatcccctcagagcaccacgaggctatcacctgcctggagtgggaccagtcaggctcccggctcctgtcagcagatgccgacgggcagatcaagtgctggagcatggcggaccacctggctaatagctgggagagctcagtgggcagcctagtggagggggaccccattgtggccctgtcctggctgcacaatggtgtgaaactggccctgcacgtggagaagtcgggcgcctccagcttcggggagaagttctcccgagtcaagttctcaccgtcgctcacgctgttcggcggcaagcccatggagggctggatcgcggtgacggtcagcggcctggtcaccgtgtccctgctgaagcccagcgggcaggtgctgacgtccaccgagagcctgtgccggctgcgcggccgcgtggccctggccgacatcgccttcaccggcggcggcaacatcgtggtggccacggcggacggcagcagcgcgtcgcccgtgcagttctacaaggtgtgcgtgaacgtggtgagcgagaagtgccgtatcgacacggagatcctgccctccctgttcatgcgctgcaccaccgacctcaaccgcaaggacaagttccccgccatcacccacctcaagttcctggcccgggacatgtcggagcaggtgcttttgtgcgcgtccagccagaccagcagcatcgtggagtgctggtccctgcgcaaggagggactccccgtgaacaacatcttccagcagatctcccccgtggttggcgacaaacagcccacaattctcaaatggcggatcctatcggccaccaacgatctggaccgtgtgtcggccgtggcgctgcccaagctgcccatctcgctcaccaacaccgacctcaaggtggccagcgacacacagttctaccctggcctcgggctggccctggccttccacgacggcagcgtccacatcgtgcaccggctctcactgcagaccatggccgtcttctacagctccgcggccccgaggcctgtggatgagccggccatgaagcgcccccgcaccgcgggccccgccgtccacttaaaggctatgcagctatcgtggacgtcactggccctggtggggattgacagccacgggaagctgagcgtgctccgcctctcaccttccatgggccacccgctggaggtggggctggcgctgcggcacctgctcttcctgctggagtactgcatggtgaccggctacgactggtgggacatcctgctgcacgtgcagcccagtatggtacagagcctggtggagaagctgcacgaggagtacacgcgccagaccgctgccctgcagcaggtcctctccacccggatcctggccatgaaggcctcgctctgcaagctgtcgccctgcacggtgactcgcgtgtgcgactaccacaccaagctcttcctcatcgccatcagctccaccctgaagtcgctgctgcgcccccactttctcaacacgcctgacaagagccccggcgaccggctgaccgagatctgcaccaagatcaccgacgtcgacattgacaaggtcatgatcaacctcaagacggaggaatttgtgctggacatgaacacactgcaggcgctgcagcagctcttgcagtgggtgggcgacttcgtgctgtacctgctggccagcctacccaaccagccctcccccacctcggagccctgccccacctcggagccctcccctccctcggagccctcccccacctcggagccctcctctccatgaagcctctgctggttccctgctgaggccgggccacagctttctgcgggacggcacctcgctgggcatgcttcgggaattgatggtggtcatccgcatctggggccttctgaagcccagctgcctgcccgtgtatacggccacttcggatacccaggacagcatgtccctgctcttccgcctgctcaccaagctctggatctgctgtcgcgatgagggcccagcgagcgagccggacgaggcgctggtggatgaatgctgcctgctgcccagccagctgcttatccccagcctggactggctgccagccagcgacggcctggtcagccgcctgcagcccaagcagccccttcgtctgcagtttggccgggcgcccacgctgcctggcagtgctgccaccctgcagctcgacggcctcgccagggccccaggccagcccaagatcgaccacctgcggaggctgcaccttggcgcttgccccacggaggaatgcaaggcctgcaccaggtgcggctgtgtcaccatgctcaagtcgcccaacagaaccacggcggtgaagcagtgggagcagcgctggatcaagaactgcctgtgcggtgggctctggtggcgggtgcccctcagctacccctgagcccagctgcccctcagctactcctcagctacccctcagctgcccctgagcccggctgctgcaagagccaccgctcgccctggactctcctcggcgcggttaacctcagcccgccctgcagggctgttgaaggccgtgggccggacgcctgcgtgaccagcagagcttctgaggaagcccctgcctttgtccagctgggcccgcagtccacacaccactctcccaggacccccagatccctggaccatctgcatccaaaggaccgtccgtgacggccgggggtccaggcggaccttgtggtgacccggctcgggcgtctcctcggtttccttgcctcacccgcggagagcgctgaacctggacaagcagcggctgggaaggacaggtccaataaacgccctctgcgccc

SEQ ID NO: 4477 - DNA, 1304 bp, Homo sapiens
tatttaataaatggtgctgggaaaactggctagccaaatgtagaaagctgaaactggatcccttccttacaccttatacaaaaattaattcaagatggattaaagacttaaatgttagacctaaaaccataaacaccctagaagaaaacctaggcaataccattcaggacataggcatgggcaaggacttcatggctgaaacaccaaaggcaatgggaacaaaagtcaaaattgacagatgggatctaattaaactaaagagcttctgcacagcaaaagaaactaccatcagagtgaacaggcagcctacaaaatgggagaaaatttttgcaatctacttatctaacaaagggctaatacccagaatctacaatgaactcaaacagatttacaagaaaaaaccccatcaacaagtgggtgaaggatatgaacagacacttctcaaaagaagacatttgtgcagccaacagacacatgaaaaaatgctcatcatcactggccatcagagaaatgcaaatcaaaaccacaatgagataccatctcacaccagttagaatggcgatcattaaaaagtcaggaaacaacaggtgctggagagaatgtggagaaataggaatacttttacactgttggtgggactgtaaactagttcaaccattgtggaagtcagtgtggcgattccttagggatctagaactagaaataccatttgacccagccatcccattactgggtatataccgaaaggattataaatcatgctgctataaagacacatgcacacgtatgtttattgcggcactattcacagtagcaaagacttagaaccaacccaaatgtccaacaatgatagactggattaagaaaatgtggcacatatacaccgtgcaatactatgcagccataaaaaaaatgatgagtttatgtcctctgtcgggacatggatgaagctggaaaccatcattctcagcaaactatcgcaaggacaaaaaaccaaacagtgcatgttctcactcataggtgggaattgaacaatgagaacacatggacacaggaaggggaatgtcacacaccagggcctgttgtggggtggagggaggcggggagggatagcattaggagagatacctaatattaaatgatgagttcatgggtgcagcacaccagcatggcacatgtatacatatgtaacaaacctgcacgttgtgcacatgtaccctaaaacttaaaagtataatataaaaaataaattcttacttgaattgtgcaatttgtagaactttaataaaaaaatgatacatctt

SEQ ID NO: 4478 - DNA, 1562 bp, Homo sapiens
taggaaacagaaattttccctggctattttctacccacagctgtgcatgatcaacagatgttagccctttctgagcagaaaagaatcaaacactggaagatggcatctaaactcatcctgcctgagtccctggtgagctgttatttctggcttttttcaggtgacttgactgtggccttgcctctgcttgtccctattgcctaggactcatagtgtccagcaggtgctttgaggcattttagccccagttattctctaggcaactaggcttggcacagtgggaactgggcacctcccaggtgatttactgatcctctttgctccttcctttctgccttctcacttttttcccctaaatcttgtactgttcacatcttcagcacctggcctaccatgtaattcagaaatgggtggtaggacagcttctgaagtggcaagtactaaactatagcccattctcttctttagagtttgttgacatttgaagatgtggctgtgtatttttctgaggaagagtggcaattattgaatcctcttgagaagactctctacaatgatgtaatgcaggatatctatgagactgtcatctctctagggttaaagctaaaaaatgacactggaaatgatcatcctatatctgtttctacatcagaaatacaaacatcaggatgcgaagtatcaaaaaagaccagaatgaaaattgcccagaaaacaatgggcagggaaaatcctggtgatacacacagtgtacagaaatggcatcgagcttttccaaggaagaaaagaaagaaacctgcaacttgtaaacaagagcttccaaaacttatggatcttcatgggaaaggccccacaggggagaaaccttttaagtgtcaggaatgtgggaaaagcttcagagttagctctgatcttattaaacaccacagaattcacactggagagaaaccctataaatgtcaacaatgtgacaggaggtttagatggagttcagatcttaataagcacttcatgacccatcaaggaataaaaccatatagatgctcatggtgtgggaaaagctttagtcataacacaaatctacacacacaccaaagaattcacacaggagagaagccctttaaatgtgatgaatgtggaaaaagattcattcagaactcccaccttattaaacaccagagaactcacacaggtgagcagccttatacgtgtagcttatgcaagagaaactttagtaggcgatcgagccttcttagacaccagaaactccacagaagaagggaagcatgtctagtgtctccaaactgaggaaagttaccatgtagagcttgactttagaagtggtgaaagaatacaaaattatgaggcacccaatgataggaatctgtgattaataaaacatttgggaagggtacatgttacacttcacaaaaaggaatctaagctgtctgttttattcagcattgcatcttctgtgcctagcacaagagttgatacataaggagtactttataaataaaaaaatgaaagtgtagtgatgagattcctttagctatctatctata

SEQ ID NO: 4479 - DNA, 1953 bp, Homo sapiens
agtctgggttggactggcggccgtggagtttgtgacatacgaggtgacacccctcgagtcacttcccttcaactccagctggagcgcctgcttggctttgggttcgttctgcagccttcgccccgctcctagcctcagggccggactccagcgcagagcccagcccagcgcagcctgccagcagccacccagccgcccagccgcccagccccgcacgaaacccggccagagcttcctagcagcccgagccatgaacaccgaaatgtatcagacccccatggaggtggcggtctaccagctgcacaatttctccatctccttcttctcttctctgcttggaggggatgtggtttccgttaagctggacaacagtgcctccggagccagcgtggtggccatagacaacaagatcgaacaggccatggatctggtgaagaatcatctgatgtatgctgtgagagaggaggtggagatcctgaaggagcagatccgagagctggtggagaagaactcccagctagagcgtgagaacaccctgttgaagaccctggcaagcccagagcagctggagaagttccagtcctgtctgagccctgaagagccagctcccgaatccccacaagtgcccgaggcccctggtggttctgcggtgtaagtggctctgtcctcagggtgggcagagccactaaacttgttttacctagttctttccagtttgtttttggctccccaagcatcatctcacgaggagaactttacacctagcacagctggtgccaagagatgtcctaaggacatggccacctgggtccactccagcgacagacccctgacaagagcaggtctctggaggctgagttgcatggggcctagtaacaccaagccagtgagcctctaatgctactgcgccctgggggctcccagggcctgggcaacttagctgcaactggcaaaggagaagggtagtttgaggtgtgacaccagtttgctccagaaagtttaaggggtctgtttctcatctccatggacatcttcaacagcttcacctgacaacgactgttcctatgaagaagccacttgtgttttaagcagaggcaacctctctcttctcctctgtttcgtgaaggcaggggacacagatgggagagattgagccaagtcagccttctgttggttaatatggtataatgcatggctttgtgcacagcccagtgtgggattacagctttgggatgaccgcttacaaagttctgtttggttagtattggcatagtttttctatatagccataaatgcgtatatatacccatagggctagatctgtatcttagtgtagcgatgtatacatatacacatccacctacatgttgaagggcctaaccagccttgggagtattgactggtcccttacctcttatggctaagtctttgactgtgttcatttaccaagttgacccagtttgtcttttaggttaagtaagactcgagagtaaaggcaaggaggggggccagcctctgaatgcggccacggatgccttgctgctgcaaccctttccccagctgtccactgaaacgtgaagtcctgttttgaatgccaaacccaccattcactggtgctgactacatagaatggggttgagagaagatcagtttgggcttcacagtgtcatttgaaaacgttttttgttttgttttgtaattattgtggaaaactttcaagtgaacagaaggatggtgtcctactgtggatgagggatgaacaaggggatggctttgatccaatggagcctgggaggtgtgcccagaaagcttgtctgtagcgggttttgtgagagtgaacactttccactttttgacaccttatcctgatgtatggttccaggatttggattttgattttccaaatgtagcttgaaatttcaataaactttgctctgtttttctaaaaataaa

SEQ ID NO: 4480 - DNA, 5162 bp, Homo sapiens
agaattttcaaatcctgaaactcagaatctggatgccatggaacaagttggtctggaatccttacagtttgactatcctggtaatcaggtaccaatggactcttcaggagctactgtaggcctttttgactacaattcccagcagcagctctttcagaggactaatgcactaacagttcaacagttaactgcagctcaacagcagcaatatgcattagcagcagctcagcagccacatatagctggtgtattctcagcaggccttgctccagctgcatttgtgccaaatccatacattattagtgctgctcctccagggaccgatccgtatactgcagcaggattggctgcagcagctacattagcaggtccagcagtggttccacctcagtattacggcgttccatggggggtgtatccagccaacttatttcagcagcaagctgcagctgcggcaaataacacagccagtcagcaagcagcatcacaagctcagcctggacagcaacaggttctccgtgctggagcaggtcagcgtcctcttactcccaatcagggtcagcaagggcagcaagcagaatcacttgcggcagctgcagcagcaaatccaacattggcttttggtcagggtcttgctactggcatgccaggctatcaagtactagctccaactgcctattatgatcagactggtgccttagtggttggccctggagcaaggactggccttggagctccagttcggttaatggctccaacacctgttttaattagttcagcagcagcacaagctgcagcagcagcagcagctggaggaactgcaagtagccttacaggcagcacaaatggtctgtttcggccaattggcactcagccaccacagcagcagcaacagcagccaagcactaatctgcaatctaattcattttatggaagcagttctttgactaatagctcccagagtagttctttattttctcatggacctggtcaacctggaagtacatctcttggctttggaagtggtaactctttgggtgctgctataggctcagccctcagtggatttggttcatcaggaggactgacaaatggtagtggtcgatatatctctgcagcacctggagcagaagcaaaatatcgaagtgcttcaagcacttccagtctatttagctccagcagccagctctttcctccttcccggcttcggtataataggtctgatattatgccttctggccgcagtagattattggaagatttcagaaacaaccgcttcccaaaccttcagcttagagacttgattggacatatagttgagttttctcaagaccagcatggttctagattcatacagcaaaaactagagagagctactccagctgagcgacagatggtatttaatgaaattctgcaagcagcctatcaattaatgactgatgtttttggcaactatgttatacagaagttttttgagtttgggagtctggatcaaaaattagccctggctactcgtattcgtggtcatgttctacccttagccttgcagatgtatggctgccgcgttattcagaaagcattagaatctatttcttctgaccagcagagtgaaatggtaaaggagctggatggtcatgtgctcaaatgtgtgaaagatcagaatggaaaccatgttgtacaaaaatgtatcgaatgtgttcagccacagtcactacagttcatcattgatgctttcaagggacaagtatttgtgctttcaactcatccttatggctgcagagtaattcagcgcatcctagagcattgcactgcagaacagaccttacctatcttagaagaactccaccaacatacagagcagttggtacaggatcagtatggcaattatgttattcagcatgtactggaacacggtcgacctgaagacaagagcaaaattgtttccgaaatcaggggaaaggttttagccctgagtcaacacaaatttgccagcaatgtagtagaaaagtgtgttactcatgcctcccgtgctgagagagctttactgattgacgaggtttgctgccagaatgatggtcctcacagtgccttatacaccatgatgaaggaccagtatgccaattacgtggttcaaaagatgattgatatggctgaacctgctcagagaaagataatcatgcacaagattcgacctcacattactactttgcgcaaatacacatacgggaagcatatactggccaagttggaaaagtattatttgaagaatagcccggacctaggacctattggaggaccaccaaatggaatgctgtaaattacaggagcaagagaaagaagataatttaaccatgtgaaaagaatttttttgtgtgtgaattatcaaaacacaactcaactatgaatcttcaatttttttttaaagcaaaactatttattgactttattcatccatttgtaaattttttaaggttcttgtgtatatttggggggtgggggatgaattataaattatattcagccctgagtggagacctatcagattggattgctggcaaagcacagaatgcctgtatatgatgtaactgtatcaaaaataaaaagctgtcacatattttgtaaatttttaccttgtaaagtcacaaaaatagtttttaaaggaaaaagtacagtattcttttaataaactggctcacagtctggtaggtctacaaccccatagcacaacaggtttatagagatgtatatagaattatagtccttatttttttcctttgcgtgaaaccttttataacagattaacaatcaactgcataaatattattaatattttaaaaagagttaagttgtattttgataattcacaaactatcatgcaaataacgagtaagtagacaagaataaagtggtttgagatgaaaagaacctaacattatttacagtagatgtggttttaatacaattactgccctaaaatgtctctggcaatgtacagaaatattgtatatacttacatatgtaattgttgtaagagttaaatacaaaatcatggtgacacttccaattaagtgcactaaatgaaaagttaagtcacttattaacttttcagtttggtttgcaatgagaaagagtggaaatttgtattttgttttgcttatagaattacagacatgttgaggaagtgttgagctttattttgctttttcatagaggcagaaagtaggaaccagatagagatgaaaaggggccactgaaaagtgaatttgatagctcagcatttaagcatgattacatattcagatagctctttttgctttctataaatatatgcattgtgtgtgtagtaatagatgtaagtttacactttgaaaggaaatcttgtttcaatgtttattataaaagccttgctaatttagtagtgatgctttccttggttgtacaggtgtacatttgtaaaccttcatgctgtaaatggaatttgttttatctctttgggatacatttgcattttagtgtacatttacgtccctgccctctttgacctggcaatatagtgttgtataatgtaaatttatttctccaaatcgagagtgattttttaaaaattttttatctttatatggtttcagaagtatgaaccagctttctttttattattgtgagatcattttgttttataacatagttgttgactgttaatatggacctgctagaatttggatcactttcaattgaagtcagggtattgtgcataatagaaagtattggactgagatatttggttaccatggaggccaatgcttttttcatcttattaaatgtgatgtgacttttttctttgtacagaagagtactgtatttttgaatagcctactcccaagtaagagcaaatctgtatgataacattttttcctctggacataagacataacagtaacacgatgtacatttacaagcggccttatgtacatttcccaacaatctttttaaggcaaaattgtgaccatatgtgtataattaaaatcgtttttaatcctttgcctatgaaaatattttggaaaaaaacttgctgtgtatattcagtttctgaaagataaagaaagtgctttgtattttgttgaagtcagtattttgtataaacatttatgttgacccacttatgttcagtgctgaaaactaaaatgaacatgctattctgtcagctgaatatggaagagatctttttttactagagatctgcagaagaaacgcaatcttctgagcacaatatggaatctaaaggttttatcacttagttgttcatattatgaacctaaaaataatggcataaagtttggggatgccaggcatactttttcatgtttggtgttgagttattttacttttctaacccaacattccttggtgagaccattaaatccaaacacttgtcaccgttccttctcatagtcactctgggtcatcagcatgtcccagtcactgcagcaacgccttgtgtttgtttcatttttttaaaacccacacaaagccgctgtctcactttttcctactttaccaacctcagagtatttcggcccgtatcgaacttttgttctcagtatcagcccatggtttcaggatcaaagctgtcatgttggagattggtaatggctttcctgtctttgtacagttgaattcctagtcttccttcatccttgccctctgttggcacaggcattatctctgcaattttagaaaatgacaagtagagaatactacattgagaaactaaaccctcttcttggggtcctgatactcattcccatttgtcccagtgctgacaacccaatcttcccaatactttcaggcctgctctacaaaagtacctgttcttgtagaaattttacagtctgccattttgggtgcccaccccaatttttaccttttagtaagttggcatgaaattttggtaaaatctgaaaatcacatttcagaataaaacaattgggcaaaactacctaggctttactcttgagtgtctccttttgatagggattgtttctggaccagtttgtctaagtcctggctcttattggttcatatgaaataatgttaacttcacttctttgtatattatgtataaattagaaaatgaaaaatgtgtgaataacattgtatgaaat

SEQ ID NO: 4481 - DNA, 2523 bp, Homo sapiens
gggcctgcgggagcgcggccttgcggttcccaggactcttctccgggcgcctcgtctccttacgccacccgcaacccaagccagggccccggtgacagcggcggggtgggccaggaccggggagggggtgcccagcagcgacccccggctccccctaaggccgggcgcagctcggagccaggagctggcccggcgcgtggcttcccggaaggcccggcgcagccggaaggtgggacggagggcggggccagcgccggggccgccaccaaggcctgcgcgaccctccgcggggctggggagctgggcggggagcccggggcctgccaggcccgggctgcagccgcgtctgatcgccgagcgcgccgcgtagacctccgctcccccagccaccgtctggatgctgtctgtcatacaggcgcttggagctgctgagctttcctgaaaagggggacccttccttaaaactctaggaactagagtggcattgtgatggaaatactcttatgctcattgaaactgtccctctgaacttctccctcgaaggcccgccacgatgactatcatggtggaggacatcatgaagctgctgtgctccctttctggggagaggaagatgaaggcggctgtcaagcactctgggaagggtgccctggtcacaggggccatggccttcgtcgggggtttggtgggcggcccaccgggactcgccgttgggggggctgtcggggggctgttaggtgcctggatgacaagtggacagtttaagccggttcctcagatcctaatggagctgccccctgccgagcaacagaggctctttaacgaagccgcagccatcatcaggcacctggagtggacggacgccgtgcagctgaccgcgctggtcatgggcagcgaggccctgcagcagcagctgctggccatgctggtgaactacgtcaccaaggagctgcgggccgagatccagtatgatgactaggccgcacctccggggaggtggggggcccctttaaatgactctgtgattctgaagaggtggcttgggagttgggagaagcccagcggatgccccctggggaatctccacatcatcagtgtattactagtaatgtcccgctggagaggccaccgctgtgcagtgtcatgttccagaaattactgatgaagcagcatgtgttggtggcatgtgcactggcctgccatgacagccctctgactggccccccagtgaagagtaaaggcctgcctgccgcaggcttcggaggcgtctgctgagtcctctcacccgcatgggtctggggaagtgatcacgctcagccgacggtctgaccacacttcatcctccccccggggccttctcatcttgggagatgactcctcttcagagcacctgctgcaggactggatcccacccccctgcaggtcctggggtctcagggccttggagcagcccatgctggaatcatgtttacctcctagtgcaaccgtcccctacccagggactgtcgaatggccccacggaggggacgggcggcctgctgagtgaagccacaaataccgagtggacttgaccccggcccccactaggctgcacacctagactcgccctgccagggcctcgctcttcccatctgaaaagtcctggtagttcttgaggtttacttctcaaatgaaatatttttagtaaaaagtacaggtatatctcggagatattgtgggttcagttccagaccacctcggtaaagccaacatcacaataaagcaaggaagcgcattgttttagtttcccagtgcatctaagtcatgtttactgcatattgcagtccactaaatgtgcaatagcattatgtctaacaaatgtacaaaccttaatttaaaaatatttactgttcaaaatgctgacacagaaacgcaaagtgagcacatgctgttggaaaatggtgccaaatagacttgcctgatgccaggctgctacaaaccttcaatttaaaaaaaaaacacagtattcacaaagcatagtagaatgaggtatgcctgtattgctctttctgaagtggtgtgatataaaccatctctaagaaatgtttctaccctaaagatttccccagtacagtcagctctccgtaactgtggtctccacatttagatccaaccagccttggataggaaatatttgaaaaaagaaattgcattggtactgaacacgtacagacctttttttcttgccattattccctaaacaatatggtgtagcatatttacatagcatttatattgtatttggtattataagaaatctagagatgatttaaattatacaggaaggtgtgcgtaggttacgtgcaaacgctatgccattgcccatcagggacttgagcatcctcagatgtcggtgtctgagggttgaggttgcagtcctggaacccatcccccatggatactgaggcatagctgtactgtgtgttttcactttgctttcagaactacgacttgaatgtgatcgattacaataaatgtttttct

SEQ ID NO: 4482 - DNA, 1995 bp, Homo sapiens
tcccgctgctcctcctccgcctccttcccctgcccgcgcccgccctactgccccgtgccgagtttcctgtttaagatggcgtcccccgtagcagcgcaggccgggaagcttctgcgagccctagcgctgcggccccgcttcctggcggccgggtcccaggcagttcaattaacctccagaagatggctgaacctgcaggaataccagagcaagaaactgatgtctgacaacggagtgagagttcaaagattctttgtagcagacactgcaaatgaagctctcgaggctgctaagagactaaatgcaaaagaaattgttttaaaagcccagatcttagctggaggaagaggaaaaggtgtcttcaatagtggtttgaaaggaggtgttcatttaacaaaagaccctaatgttgtgggacagctggctaaacagatgattgggtacaatctagcgacaaaacaaactccaaaagaaggtgtgaaagttaacaaggtgatggttgctgaagccttggatatttccagagaaacctacctggcaattctgatggaccggtcctgcaatggccccgtgctggtgggcagcccccaggggggcgtcgacattgaagaggtggctgcttcaaacccggagctcatttttaaggagcaaattgacatttttgaaggaataaaggacagccaagctcagcggatggccgaaaatctaggcttcgttgggcctttgaaaagccaggttgaagccatccttgtcaatatatttggtggtatcgtcaactgtgccatcattgccaatgggatcaccaaagcctgccgggagctagaactcaaggtgcccctggtggtccggcttgaaggaaccaacgtccaagaggcccagaagatactcaacaacagcggactccccattacttcagccattgacctggaggatgcagccaagaaggctgtggccagtgtggccaagaagtgatgtctttgtcctgatccaatggagaaagaaagccatttttccgtaaaaagggatggttcatcattgtgaaagaaatggttatctcattggggaagaaaaggggagggggaaggcaagaatcactgaaaaatcttaaatctgtgttttctggaataagatatctagacagcctaaatctgattttggtctttataaaaataatatcttgtgttctcatacttttctgtcactgtaagcctgcccagtaggcagtgttttgcagactttggggagtggtctatgtggccaaatattgtgtgtatagacagaatttgaaatcaagtcctgcttcatttacaagaattttggtgggcatctaatcctacataatgaaaaagaaaaacagaccatttaaaaactcagacaagattatatttaatatattaattactaaaaaggcataagattacactgaacatattagctactaaaaaggcactgctaagacattcaagcaaatagctattacacactactgcagattttacaggtttctaattctaacatatgtttgaaaaatccgtgagtattccaaaatatatttaataatggaatatctgcattaatataccatccatgtgtttttaccatttgccttaatattgaatatactgtttacctcacactaaaaagaaaaccagaagccttatttgtgattttgggagtggaagcttccatttttgtgtcaaaaatgaatcctgattcttatggaaatctctgttattaagatatttcaagatgagacaacactgaagatcaaattgtgtttagtatcactatcttctctcctcgtttctctcttactcctcatcctcccagaatctaccagtttatggtagaaagatgggaaccttatttgaatgtgttttttttttccatgatgtccaattttgttgtgggaaaggatttggataaaatttttgtttaaattttggtagatttttatctatacaaatttaaataaaattatgttttgtaagctgt

SEQ ID NO: 4483 - DNA, 2321 bp, Homo sapiens
gtttaagatagcgtcccccatggcagcgcaggcctggaagcttctgcaagccctagcgctgctgccccgcttcctggtggccaggtcccgggcagttcaattaacctccagaagatggctgagcctgcaggaatgccagagcaagaaactgatgtctgataacagagtgacagttcaaagattctttgtagcagacactgcgaatgaagctcttgaggccgctaagagactaaatgcaaaagaaattgttttaaaagcccagatcttagctggaggaagaggaaaaggtgtcttcaatagtggtttgaaaagaggtgttcatttaacaaaagaccctaatgttgtgggacagctggctaaacagatgattgggtacaatctagcgacaaaacaaactccaaaagaaggtgtgaaagttaacaaggtgatggttgctgaagccttggacatttccagagaaacctacctggcaattctgatggaccagtcctgcaatggccccatgctggtgggcagcccccaggagggcatcgacattgaagaggtggctgcttcaaacccagagctcatttttaaggagcaaattgacatttttgaaggaataaaggacagccaagctcagcggatggcagaaaatctaggcttcgttgggcctttgaaaagccaggctgcagatcaaatttcgaagctggataatctcttccctgaaaattgatgctatcaaggtgggagtgaatccccttggtgaaactccagaaggacaagttgtctgttttgattccaagataaactttgatgccaatgcagaattccaacaaaaagacatatttgctatggacggcaaatcagagaatgagcccattgaaaatgaagctgccaaatatgatctaaaatacataggactagatgggaacattgcctgctttgtgaatggtgctgggctcgccatggctacttgtgatatcattttccttaatggtagaagcccagccagcttcttggatcttggaggtggtgtaaaggaagctcaagtatatcaagcattcacattgcccacagctgatcctaaggttgaagccatccttgtcaatatttttggtggtatcgtcaactgtgccatcattgccaatgggatcaccaaagcctgccaggagctagaactcaaggtgccccttgtggtttggcttgaaggaaccaacgtccaagaggcccaggaaatactcaacagcagactccccattacttcagccgttgacctggaggatgcagccaagaaggctgtggccagtgtggccaagaagtgatgtctttgtcctgatccgatggagaaacaaagccatttttccataaaaagggatggttcatcattgtgaaagaaatggttatctcgttggggaggaaaagggggggtgaaggcaagaatcactgaaaaatcttaaatctgtgttttctggaataagctatctagacagcctaaatctgattttagtctttataaaaataatatctcgtattctcatacttttctgtcactgtaagcctgcccagtaggcagtgttttgcagactttggggagcggtctatgtgaccaaatattgtgtgtatagacagaatttgaaatcgggtcctgcttcatttacaagaattttggtgggcatctaatcctacataatgaaaaagaagaacagaccatttaaaaactcagacaagattatatttaatatattaattactaaaaaggcacaagattacactgaacattagctactaaaaaggcactgccaagacattcaaacaaatagctattacacactgcagcagattttacaggtttctaattccaacatatgtttgaaaaatccatgagtgttccaaaatatacttaataatggaaggtctgcattaatataccatccatgtgtttttaccatttggtttaatattgaatatactgtttacctcacactaaaaataaaaccagaaaccttatttgtgactttggagtggaagcttccatttttgggtcaaaaatgaatcctgattcttatggaaatctctgttattaagtcatttcaagatgagacaacactgaagatcaaattgtgttgggtatcagtatcttctctcctcgtttatctcttacacctcatcctcccaggatctaccagttgatggtagaaagatgggaaccttatctgaatgttttttttttccatgatgtccaattttgttgtgggaaaggatttggataaagtttttgtttaaattttggtagatttttatctatacaagtttaaataaaattatgttttgtaagttgt

SEQ ID NO: 4484 - DNA, 1288 bp, Homo sapiens
cgagagggagacggacgttgagagaacgaggaggaaggagagaaaatggcgtccacggattacagtacctatagccaagctgcagcgcagcagggctacagtgcttacaccgcccagcccactcaaggatatgcacagaccacccaggcatatgggcaacaaagctatggaacctatggacagcccactgatgtcagctatacccaggctcagaccactgcaacctatgggcagaccgcctatgcaacttcttatggacagcctcccactggttatactactccaactgccccccaggcatacagccagcctgtccaggggtatggcactggtgcttatgataccaccactgctacagtcaccaccacccaggcctcctatgcagctcagtctgcatatggcactcagcctgcttatccagcctatgggcagcagccagcagccactgcacctacaagaccgcaggatggaaacaagcccactgagactagtcaacctcaatctagcacagggggttacaaccagcccagcctaggatatggacagagtaactacagttatccccaggtacctgggagctaccccatgcagccagtcactgcacctccatcctaccctcctaccagctattcctctacacagccgactagttatgatcagagcagttactctcagcagaacacctatgggcaaccgagcagctatggacagcagagtagctatggtcaacaaagcagctatgggcagcagcctcccactagttacccaccccaaactggatcctacagccaagctccaagtcaatatagccaacagagcagcagctacgggcagcagagttcattccgacaggaccaccccagtagcatgggtgtttatgggcaggagtctggaggattttccggaccaggagagaaccggagcatgagtggccctgataaccggggcaggggaagagggggatttgatcgtggaggcatgagcagaggtgggcggggaggaggacgcggtggaatggggttacaaagtgagagccttgtatacacttcaatacttaaaaagtacccgtactcagtactcagccggcagcataatgaaaagtgggactagacacggtgtccatatggagaggaaaaatatacatagaatatttttaacaaaatgtattcattgtataaatggaatccttctgtaactttggtaactgcatacttgttgtttggtaatgaaccagaggaggtataatactctagaattgtgtaacattaaagtgtaaacttttgtgttt

SEQ ID NO: 4485 - DNA, 2441 bp, Homo sapiens
tttaaagaaaacaaaatctaacccaaaaagtccaattcatatttccctctcccctctttaagtaattttacatggccatagtcattattctaactgatatgtctataaagttgcacccccagtccgttgagccttggtatttgttgtaaattctcctttcacagcgattgttaaatctattcgtgccctgagatgtatggctttatgctgaagattggctggatgcgtcctctgatgtgtgttgtaggaatttaatgtggttgtctcctgcttttattatactgtgacttgttaggaaaccctgggcctcatttggctctcccttgggagaggttgagggtgcacctttatgaacatggaaaggtttatcacagcagttaacccccacttgctcctcccctctataccaagctcttctggtttttcacctgacggggtgggtgtttgggatctattttttcttgctaatttgccaagtattgcactattaataccagcccccgaaatgaaaggaaccaaccacactggtgtgtacaatcagacaagcaaggttgtatattgaggaaatttgagcaagctgccctgaagaaaggcatagtgacaagatgagagagatgcattgtttggagatgtgtttagccagtgcccttcttccccacgagcccccccaaggctcagagcggtactggcttttaaagggaaaggccttcatttcttcgtttatccccccagcagcgctggagagcgaggtggcttcaataagcctggtggtaagtttttgagtattaccatagatagtgtttaaaaaaaaatgcagtcagtttttagaaaactataatttttttattagtttcataagtggtttaaaaatgatctatacaaaagagactaatgggtactgccggcattgtcttaggggttaataaggttaacctatggttacaaaacaaagggtaacttgaagtattgagtaactgcttctgtaatatgggggagaataaatttttaaatttggtttatttagaggaaaaattttgacttaaatttaacactgatttggcacataagcattgagagtgtatttggttaatggtttagaagcaaaccagcaaaggaaaaaagcaaaccctagcaaacctttcacaaatgttaaagagacactgctccattttagcagtgcgggtcattttgagtttaatgaatccccatcaaatggtggtatagtagatagctatgtgtgtttgtaaggtttgtagcttgcaagacgtgcactaataatattttatatgatctttcctggttggcaggacccatggatgaaggaccagatcttgatctaggcccacctgtagatccagatgaagactctgacaacagtgcaatttatgtacaaggattaaatgacagtgtgactctagatgatctggcagacttctttaagcagtgtggggttgttaagatgaacaagagaactgggcaacccatgatccacatctacctggacaaggaaacaggaaagcccaaaggcgatgccacagtgtcctatgaagacccacccactgccaaggctgccgtggaatggtttgatgggaaagattttcaagggagcaaacttaaagtctcccttgctcggaagaagcctccaatgaacagtatgcggggtggtctgccaccccgtgagggcagaggcatgccaccaccactccgtggaggtccaggaggcccaggaggtcctgggggacccatgggtcgcatgggaggccgtggaggagatagaggaggcttccctccaagaggaccccggggttcccgagggaacccctctggaggaggaaacgtccagcaccgagctggagactggcagtgtcccaatccgggttgtggaaaccagaacttcgcctggagaacagagtgcaaccagtgtaaggccccaaagcctgaaggcttcctcccgccaccctttccgcccccggggtggtgatcgtggcagaggtggccctggtggcatgcggggaggaagaggtggcctcatggatcgtggtggtcccggtggaatgttcagaggtggccgtggtggagacagaggtggcttccgtggtggccggggcatggaccgaggtggctttggtggaggaagacgaggtggccctggggggccccctggacctttgatggaacagatgggaggaagaagaggaggacgtggaggacctggaaaaatggataaaggcgagcaccgtcaggagcgcagagatcggccctactagatgcagagaccccgcagagctgcattgactaccagatttattttttaaaccagaaaatgttttaaatttataattccatatttataatgttggccacaacattatgattattccttgtctgtactttagtatttttcaccatttgtgaagaaacattaaaacaagttaaatggt

SEQ ID NO: 4486 - DNA, 2163 bp, Homo sapiens
gcagtcgctgcagccgccgcgggaggcgtccgtgacaagatgaagctcatcatcctggagcactattctcaggcgagcgagtgggcggctaaatacatcaggaaccgcatcatccagtttaacccagggccagagaagtacttcaccctggggctccccactggccttcctcgagaccacccggagagttaccactccttcatgtggaacaacttcttcaagcacattgacatccacccagaaaacacccacattctggatgggaatgcagtcgacctacaggcagaatgtgatgcctttgaagagaagatcaaggctgcaggtgggatcgagctatttgttggaggcatcggccctgatggacacattgccttcaacgagccaggctccagtctggtgtccaggacccgtgtgaagacgctggccatggataccatcctggccaatgctaggttcttcgatggagaactcaccaaggtgcccaccatggccttgacggtgggggtgggcactgtcatggatgctagagaggtgatgatccttatcacaggtgctcacaaggcatttgctctgtacaaggccatcgaggagggagtgaaccacatgtggaccgtgtctgccttccagcagcatccccgcaccgtgtttgtgtgtgacgaggatgccaccttggagctgaaagtgaagactgtcaagtatttcaaaggtttaatgcttgttcataacaagttggtggaccccttgtacagtatcaaagagaaagaaactgagaaaagccaatcttcgaagaaaccatacagcgattagcctgtgctgggacctagtgtcaagtacccatagggaaaggcaggtctttctggaaattgtctttagaagaaagaattgtatttctttaatctagtatggttactccagataagtgggtgaacttattgttcttggccatgaggctgggagcctagtcacggagtttagctatagggagaatgtttgtaacttaatcagaaaaaaaatatctgcaaaatgtactccatcattttgatgtctgccaaacccaggttgggagttttaaactttttgttctgcttcagccatggttcacacatatgacacactcccgtcaggaatttctctccttacacgcactgattttcaagtgggagggaattaggggcttatgtatattggataccacctctttgaagagtcttgagagtccttcttgcacaggcctgccccttggttgagaaccattgttccaagtgaaggcacaaactctcaatatctaaaataagtgcaaggaagcagtctctttggtcagtaacaagtgcaatggaaagaaaacgatcccttccttcttccactttcacagcttttctctgaactaggagaacctgggggtggatttgggtgggtggggccaaagaggaggcttctattgataaatccagagcctcaaggggcccagccacgtcaaacttctctccctcagggactctccagcaccaaaaggcagaaggtggaagccgtttttcccccagagccctgtgtttttgtgaaagcctcactgtggctcctctgttttacatactcattagtaagtgggaggtccactggggcaacagacactgccacaatttcagtgttgtgttcagccaaggggacggtctgggcaggcagcttaagtgtgagtttagtcacaactcctgagtgtcccgctctcctgcttacctaggaggtgagtgccaggaaaatacaccaaatgcttctagtattgtttccccacttaaaatagtcctgcttaaattcacatggtgtggtctgatgttctgagagcatcaggaaatacaacccttttgcccatttacccttctccccggatcccaaggtggtctgttgctctggcttcctttcattgtcttaggccttcatggagtggatgctgcctcctcctggctgtttttgtgcctgtttgaagctactgctgcctccatttctgggaaagacctttgagagcctagcccaggcctaagggctatgtttggtaccagtgttttgtctttagcttttctatgtgattgtgccgtcattctgttttaagctcatggatcaatggatttgtttacaatgtgatattttctattaaatccagtattttcaaat

SEQ ID NO: 4487 - DNA, 4570 bp, Homo sapiens
gcggccgccgcccccggctgcgcgctgagccgccggccccccgagcgccacggccggagctgcggcggcggcatcatggccccgaccctgctccagaagctcttcaacaaaaggggcagcagcggcagctccgcggcggcgtctgcccagggcagggctcctaaggaaggacccgcctttagttggtcatgttcggagtttgacctgaatgagattcgcctgatagtttaccaggactgtgacaggagaggcagacaagtcttgtttgactctaaagctgttcaaaagattgaggaggtgacagctcagaaaacagaggatgttcctattaaaatatcagccaagtgctgccagggaagcagcagtgtcagcagcagtagcagcagcagcatctcttcccacagttcttctgggggatcttcacatcatgctaaggaacagcttccaaagtaccagtacacaagaccagcttccgatgtcaacatgttaggggaaatgatgtttggctcagttgccatgagttacaaaggctccaccttaaagatacactacatacgttctcctccacaactgatgattagtaaagtcttctctgctagaatgggcagcttctgtggaagtacaaataacttgcaagacagctttgagtacatcaaccaagatcctaatttgggaaaactgaacacaaatcaaaatagtttgggtccttgtcgtactggaagtaacctagcacacagcacaccagttgatatgccaagcagaggacagaatgaagacagggacagtggcattgctcgatcagcctcactaagcagtcttttgatcacacctttcccatctccaagctcctctacatcttcttccagcagttaccagcgccgctggcttcgaagtcagacaacaagtttggaaaatggcatcatcccaagaaggtcaactgatgagacattcagcttggctgaagaaacctgtagctctaatccagctatggttaggaggaagaaaattgccataagcatcatcttttccctatgtgagaaagaagaagcacaaaggaatttccaggacttcttcttttctcattttcccctgtttgaatctcacatgaacaggctgaagagtgcaattgaaaaggctatgatctcctgtaggaaaatagcagaatcaagtctccgagtccagttttatgtcagccgtttgatggaagctctgggagaattcagaggaactatctggaacttatattctgttccaaggatagctgaacctgtatggcttactatgatgtccggcactttggaaaaaaaccagctctgccagcgctttctcaaggagtttacacttctgatagaacagataaataaaaaccagttttttgctgccttactgactgcggtgttaacctaccacctggcctgggtcccaactgtcatgcctgtggatcaccctcccatcaaagccttctcagagaaacgtacctcccagtcagtgaacatgctggccaaaacacatccgtataatcctctttgggcacagctgggtgatctttacggagccataggctctccagtgagactgactcgcaccgtagtggtagggaagcagaaggacttagtccagcgaatactttatgtcctgacctactttctccgttgctctgagctacaagagaaccagctgacctggagtggcaatcatggtgaaggtgaccaagttttaaatgggagcaagatcataacagccttggagaaaggagaggtggaggagtctgagtatgtggtcattacggtgaggaacgagcccgctcttgtaccccccatcctaccaccaacagcagcagagagacacaacccctggccgacagggtttcctgagtgcccagagggcactgacagtagagacctgggtcttaaacctgacaaagaagctaacaggaggccagagcagggttctgaggcttgcagcgcagggtgcctggggccagcatcagacgcttcctggaaacctcagaatgcattttgtggggatgagaaaaataaagaggcaccgcaagatggctcttcaagacttcccagctgtgaagttttgggggcaggaatgaagatggaccagcaagctgtctgtgagctgttgaaagtggagatgcctacaagactgccagaccggtcagtggcctggccttgccctgacagacatctccgggagaaaccttccttagaaaaggtcactttccagattggaagctttgcatctccagagtctgactttgaaagccgcatgaaaaaaatggaggaacgggtgaaggcctgtggcccctccttggaggccagtgaggctgctgatgtggctcaggacccgcaggtttctaggagcccttttaaacctggctttcaggagaatgtttgctgtcctcagaatcggctttcagagggggatgaaggcgagtctgacaagggttttgcagaggacagaggcagcagaaacgacatggcagcagatattgctgggcagctcagccacgctgctgacttgggcacagcctcccacggtgcaggaggaacgggagggaggaggctggaggccactagaggtttgtatgtgaaggctgcggaaggacctgtgctggagcctgttgcccccaggtgtgtccagcggggccctggcctcgtggctggtgcgaatatcccctgtggggatgacaacaagaaggccaacttcaggactgaaggagacattccccgaaatgaaagctcagatagcgccctgggagacagtgacgacgaagcctgcgcttcagccatgctagatctgggtcacggtggtgacaggactggagggtccttggaagtggagctgcctctgccaaggtctcagagcatcagcacccagaatgtaaggaactttggccgctcacttctggcgggctactgccccacatacatgcctgatcttgtgcttcatgggaccggcagtgatgagaagctgaagcagtgcctggtggccgaccttgtccacacagtccatcatccagtcctggatgagccaatagctgaagctgtctgtattatcgcagacacggataaatggagtgtgcaggtagctacaagtcagaggaaagtgacggacaacatgaaactaggccaggatgtcctggtctctagtcaggtgtccagtttgcttcagtccattttacagctctataagcttcacctccctgctgatttttgcatcatgcatcttgaagatagactacaggagatgtaccttaaaagtaaaatgctatctgaatatctccggggacacacacgagtccatgtgaaagaattaggtgtcgtactggggattgaatccaacgacctgcctctgttgactgctattgccagtactcattctccttatgtggctcaaatactcttataagctaaagctcaggacagttcttccttggaagaaaaaaatcaaattctcaactgaaggagaaaggaataagctctctgtgatgtcaaaagcatgagaagagcaaacagaaacagtcattccacctttttgttttgtgtttttgctgtcaagctgatgcttcattgaagacttaggtttacttgacataatagcatttgtgattgtcgtgaacactttaggccatttgttacccatgaatcaacaaagaaactgacctttttggtaggaggaaacataagcactaaacactaagctgttgcaacagattgccttgtgctgtttgggcagaataaagacaagtgacttgagcggggtggtcagcagtgtacataatattccagtaggaaactgcttccaagtttaagcatgagctccccaaactggagaaaacatattttgctattctgagacaacaatcagaatacagactttggattccaggtcacagtttgctttttagacaaggtaaagcaaagaaagccacattgtgccatcttcagctccagtggctttagcagtgactgtttgacataaaacatgtaagaattgcttgttgggaagagtgctttagggacccactgttttcatttcttcttggagtttaccttgtttcagatgcagccatgggtaggtcagagatggattgttggtgcaataaacccaagaatcaatgtagcctcttaatcccatcaagatgtagtttgtagcagcaaagtgtacagtctgaaaccgtatgttttatccttatattttagagctttcagcagcctttttaagagaggccacttaccaaagttatttctataagctcaagagtgtttcggttggtaagttcttccagctgaagccactttttccttatagttaatacaaatgactatttttactttaaaaggcacagctgtcctggtgggaaatgaaacctgcagcagttcaggatgactaatgaaagcaattagcttgaacatttagaaaaaattcatatatgatctaaatttttatattatcatttctgtgccttctaattcctgcatccttttcaaaacatctttccagacattaacttacacattgtataaaaccgaccaaaatgatttcctaaagttcatgc

SEQ ID NO: 4488 - DNA, 1191 bp, Homo sapiens
aaagcgagagtgagtgggaccggaggggcggggcatcatatgggcggggctgaggcgaggccccggcggccatcttgagccccgccttttacttcggcccgcttcttctggtcactccgccaccgtagaatcgcctaccatttggtgcaagcaaaaagcaatcagcaattggacaggaaaagaatggcattgaagcagatttccagcaacaagtgctttgggggattgcagaaagtttttgaacatgacagtgttgaactaaactgcaaaatgaaatttgctgtctacttaccaccaaaggcagaaacaggaaagtgccctgcactgtattggctctcaggtttaacttgcacagagcaaaattttatatcaaaatctggttatcatcagtctgcttcagaacatggtcttgttgtcattgctccagataccagccctcgtggctgcaatattaaaggtgaagatgagagctgggactttggcactggtgctggattttatgttgatgccactgaagatccttggaaaaccaactacagaatgtactcttatgtcacagaggagcttccccaactcataaatgccaattttccagtggatccccaaaggatgtctatttttggccactccatgggaggtcatggagctctgatctgtgctttgaaaaatcctggaaaatacaaatctgtgtcagcatttgctccaatttgcaaccctgtactctgtccctggggcaaaaaagcctttagtggatatttgggaacagatcaaagtaaatggaaggcttatgatgctacccaccttgtgaaatcctatccaggatctcagctggacatactaattgatcaagggaaagatgaccagtttcttttagatggacagttactccctgataacttcatagctgcctgtacagaaaagaaaatccccgttgtttttcgattgcaagagggttatgatcatagctactacttcattgcaacctttattactgaccacatcagacatcatgctaaatacctgaatgcatgaaaaaactccaaataagagaatctcttcaggattataaaagttgtaaaatgcaactgtattgctgagcaaaaaaaaaaaaaattcaaaacattggattttatagtgctaaaagggctttattctatagttgaatcacctctgaataaagatataaaacct

SEQ ID NO: 4489 - DNA, 2281 bp, Homo sapiens
ggccctgaaaaggagcctttaaaagtcaattctactccatttggcaaagagggaactgaaatctggaaagtaaggacttgcccaaggtcactgacttagtggcagactagagacttgaactcaggtctccattcccagcagaaaaatatggctcaggagactaaccagaccccggggcccatgctgtgtagcacaggatgtggcttttatggaaatcctaggacaaatggaatgtgttcagtttgctacaaagaacatcttcagaggcagcaaaatagtggcagaatgagcccaatgggaacagctagtggttccaacagtcctacctcagattctgcatctgtacagagagcagacactagcttaaacaactgtgaaggtgctgctggcagcacatctgaaaaatcaagaaatgtgcctgtggctgccttgcctgtaactcagcaaatgacagaaatgagcatttcaagagaggacaaaataactaccccgaaaacagaggtgtcagagccagttgtcactcagcccagtccatcagtttctcagcccagtacttctcagagtgaagaaaaagctcctgaattgcccaaaccaaagaaaaacagatgtttcatgtgcagaaagaaagttggtcttacagggtttgactgccgatgtggaaatttgttttgtggacttcaccgttactctgacaagcacaactgtccgtatgattacaaagcagaagctgcagcaaaaatcagaaaagagaatccagttgttgtggctgaaaaaattcagagaatataaattacttcttgtgaagagactgaaactttgtttttattttaatatatcgtaggaaaacattaaagagcagatgcatggccatttttctttgatgttctccagagttttacattacacttgtctgtcttataattgatattttaggatgtttgggtgtttgttacaggcagaattggatagatacagccctacaaatgtatatgccctcccctgaaaaaaattggatgaaaatctgcacagcaaagtgaaacacacagataataggaacaaaatgtagttcccatgtgccaaacaaaataaatgaaatctctgcatgtttgcagcatatctgccttttgggaatgtaatcaaggtataatctttggctagtgttatgtgcctgtatttttttaaaatggtacaccagaaaaggactggcagtctacttctaccatagttaaacttcaccctctttaatttcacaacatattctttggaagcaggaagaaatgctcataaagaggatcagaccttctttcccgtgaaaccagtatttggcgccatatataagcctggttaaattggtcatctaaagctgtcaaataagacattctgtgaaaggtaaacatcgaaactggttataagtaaaaccatcaagccaacaacagggtcttgagataacctttgaagcttattgtactggcctgcaccagaagatgtctgcattactcattgctaaaaatgtgtagcacagaactgcactaggattaatttgtttacaagaagaaatttaaactctacgtttggttttcacatacagcagctctattgaataacatgcatctgaattttaagttgcaaaggtatctgaataatttttcatgtgcatcttttgtcgaatgttttggttcaagaaagaatgtttaaagctttttaaaagacttcagttcttaatgtaactgtacccttctgcatggaaaatcataaccaacatggctgcagtagacttcttagtggtatccagcaccacttgcagagggctgctttatcatattgtacttgggtgtaggactctagtgttcttgggtgtattgcatgggctgcattatctacagcattgtacaataacaactagaaaaggcagtatacttcactgatgcttgtctggtaataatcacttctgtgttataatggaaggttttttgtgatgtatgaaacttgtgttttttatatataaatgagtatagttagtgttgtggtaatgcctgttttcatctgtaaatagttaagtatgtacacgaggcactacttctgatttattgcaatgttcagtcctagtttttacttttattcttaaagcattcagttttgctttcaattttatgtaccttagttctgagttagacctgcagatgtgtacagatagttcatatttatgtattgcacataatcatgctattcagcattgatgctatattgtattatgtaaataataaaagccatgtacagaggg

SEQ ID NO: 4490 - DNA, 3537 bp, Homo sapiens
gaaatgactgctgtccatgcaggcaacataaacttcaagtgggatcctaaaagtctagagatcaggactctggcagttgagagactgttggagcctcttgttacacaggttacaacccttgtaaacaccaatagtaaagggccctctaataagaagagaggtcgttctaagaaggcccatgttttggctgcatctgttgaacaagcaactgagaatttcttggagaagggggataaaattgcgaaggagagccagtttctcaaggaggagcttgtggctgctgtagaagatgttcgaaaacaaggtgatttgatgaaggctgctgcaggagagttcgcagatgatccctgctcttctgtgaagcgaggcaacatggttcgggcagctcgagctttgctctctgctgttacccggttgctgattttggctgacatggcagatgtctacaaattacttgttcagctgaaagttgtggaagatggtatcttgaagttgaggaatgctggcaatgaacaagacttaggaatccagtataaagccctaaaacctgaagtggataagctgaacattatggcagccaaaagacaacaggaattgaaagatgttggccatcgtgatcagatggctgcagctagaggaatcctgcagaagaacgttccgatcctctatactgcatcccaggcatgcctacagcaccctgatgtcgcagcctataaggccaacagggacctgatatacaagcagctgcagcaggcggtcacaggcatttccaatgcagcccaggccactgcctcagacgatgcctcacagcaccagggtggaggaggaggagaactggcatatgcactcaataactttgacaaacaaatcattgtggaccccttgagcttcagcgaggagcgctttaggccttccctggaggagcgtctggaaagcatcattagtggggctgccttgatggccgactcgtcctgcacgcgtgatgaccgtcgtgagcgaattgtggcagagtgtaatgctgtccgccaggccctgcaggacctgctttcggagtacatgggcaatgctggacgtaaagaaagaagtgatgcactcaattctgcaatagataaaatgaccaagaagaccagggacttgcgtagacagctccgcaaagctgtcatggaccacgtttcagattctttcctggaaaccaatgttccacttttggtattgattgaagctgcaaagaatggaaatgagaaagaagttaaggagtatgcccaagttttccgtgaacatgccaacaaattgattgaggttgccaacttggcctgttccatctcaaataatgaagaaggtgtaaagcttgttcgaatgtctgcaagccagttagaagccctctgtcctcaggttattaatgctgcactggctttagcagcaaaaccacagagtaaactggcccaagagaacatggatctttttaaagaacaatgggaaaaacaagtccgtgttctcacagatgctgtcgatgacattacttccattgatgacttcttggctgtctcagagaatcacattttggaagatgtgaacaaatgtgtcattgctctccaagagaaggatgtggatggcctggaccgcacagctggtgcaattcgaggccgggcagcccgggtcattcacgtagtcacctcagagatggacaactatgagccaggagtctacacagagaaggttctggaagccactaagctgctctccaacacagtcatgccacgttttactgagcaagtagaagcagccgtggaagccctcagctcggaccctgcccagcccatggatgagaatgagtttatcgatgcttcccgcctggtatatgatggcatccgggacatcaggaaagcagtgctgatgataaggacccctgaggagttggatgactctgactttgagacagaagattttgatgtcagaagcaggacgagcgtccagacagaagacgatcagctgatagctggccagagtgcccgggcgatcatggctcagcttccccaggagcaaaaagcgaagattgcggaacaggtggccagcttccaggaagaaaagagcaagctggatgctgaagtgtccaaatgggacgacagtggcaatgacatcattgtgctggccaagcagatgtgcatgattatgatggagatgacagactttacccgaggtaaaggaccactcaaaaatacatcggatgtcatcagtgctgccaagaaaattgctgaggcaggatccaggatggacaagcttggccgcaccattgcagaccattgccccgactcggcttgcaagcaggacctgctggcctacctgcaacgcatcgccctctactgccaccagctgaacatctgcagcaaggtcaaggccgaggtgcagaatctcggcggggagcttgttgtctctgggaactgtgacacctgcggggcactgcaagggctgaaaggctggcctcctcccctttgctggccactcactgggtggacagcgccatgtccctgatccaggcagccaagaacttgatgaatgctgtggtgcagacagtgaaggcatcctacgtcgcctctaccaaataccaaaagtcacagggtatggcttccctcaaccttcctgctgtgtcatggaagatgaaggcaccagagaaaaagccattggtgaagagagagaaacaggatgagacacagaccaagattaaacgggcatctcagaagaagcacgtgaacccggtgcaggccctcagcgagttcaaagctatggacagcatctaagtctgcccaggccggccgcccccacccctcggggctcctgaatatcagtcactgttcgtcactcaaatgaatttgctaaatacaacactgatactagattccacagggaaatgggcagactgaaccagtccaggtggtgaattttccaagaacatagtttaagttgattaaaaatgcttttagaatgcaggagcctacttctagctgtattttttgtatgcttaaataaaaataaaaattcataaccaaagagaatcccacattagcttgttagtaatgctctgaccaagccgagatgcccattctcttagtgatggcggcgttagggtttgagagaagggaatttggctcaacttcagttgagagggtgcagtccagacagcttgactgcttttaaatgaccaaagatgacctgtggtaagcaacctgggcatcttaggaagcagtccctggagaaggcatgttcccagaaaggtctctggagggacaaactcactcagtaaaacataatgtatcatgaagaaaactgattctctatgacatgaaatgaaaattttaatgcattgttataattactaatgtacgctgctgcaggacattaataaagttgcttttttaggctacagtgtctcgatgccataatcagaacacactttttttcctctttctcccagcttcaaatgcaaattcatcattgggctcacttctaataactgcagtgtttcccgccttgggcttgcag

SEQ ID NO: 4491 - DNA, 2931 bp, Homo sapiens
gccctccggccttcccgccgccgtagccgggaccagcagctccgggccgggctgatacagccgcttcaccgtgcccccgcccgcgaccatggctccgaggtggcgcggcacctgctctttcagtctcacatggcaacgaaaacaacttgtatgtcttcacaaggatctgatgatgaacagagaaaaagagaaaacattcgttccttgactgtgtctggccatgttggttttgagaatttgcctgatcagctggtgaacagatccattcagcaaggtttctgctttaatattctgtgtgggggaaactggaattggaaaatcaacactgattgacacattgtttaatactaatttggaagactatgaatcctcacatttttgcccaaatgttaaacttaaagttcagacatatgaactccaggaaagtaatgttcgattgaaattgatcattgtgaatacagtgggatttggtgaccaaataaataaagaagagagctaccaaccgatagttgactacatagatgctcagtttgaggcctgtctccaagaataactgaagattaaacgttctctctttacctaccctgattctcgcatccgtgtgtgcctctacttcatttcactgacaggccactctctgaagacacttgatctcttaaccatgaagaaccttgacagcaaggtaaacattataccagtgattgccaaagcagatacggtttctaaaactgaattacataagtttaagatcaagttcatgagtgaactggtcagcaatggcgtccagatataccagtttccaacggatgatgacactattgctaaggtcaacgctgcaatgaatggacagttgccgtttgctgttgtgggaagtatggatgagataaaagtcggaaacaagatggttaaagctcgccagtacccttggggtgttgtacaggtggaaaatgaaaaccactgtgactttgtaaagctgcgggaaatgttcatttgtacaaatatggaggacctgcgatagcagacccataccaggcactatgagctttacaggcgctgcaaactggaggaaatgggctttacagatgtgggcccagaaaacaagccggtcagtcttcaagagacctatgaagccaaaagacatgagttccatggtgaacgtcagaggaaggaagaagaaatgaaacagatgtttgtgcagccagtgaaggagaaagaagccatattgaaagaagctgagagaaagctacaggccaaatttgagcaccttaagagacttcaccaagaagagagaatgaagcttgaagaacaaagaagacttttggaagaagaaataattgctttctctaaaaagaaagctacctccgagatatttcacagccagtcctttctggcaacaggcagcaacctgagtaaggacaaggaccataagaactccaattttttgtaaaacagaagttccagagcacagaaggtcatcatcacaagcaaaatttattaaaaacaaaaacaaaaacaaaactagaagtgtgctttgattttgctgtttttgtttgttttatcacttctatatttggtgaacggccacagttactgatatttatggaaaagtactttcaagtatgaggtcaatacgtaagccagagtgaatgatactacaagttgagcatctctaattcaaaaatctgaaatccagaagcttcaaaatctgaatctttttgaacaatgacttgaccccacaagtggaaaattccccacctgacacctttgctttctgatggttcagtttaaacagattttgtttctcgcacaaaattattaaaaatgttgtataaattactttcaggctatatgtataaggtggatgtgaaacatgaattatgcaattagagtcgggtcccattgtgtatacacagatattccagaacctgaaatccaaaacacttctggtccctagcattttggataagggatactcagcttgtacctatatattcgtatatattcactgttgttagaaatttttaagttgctgttttgtgatggatctaaatcttttctcttgctaccaagctattgtcactgcagtgcattataccaaagagcaaagtgtcagtgccactgaaaataaagaacccattaatatcgtggctaactgattacatttatatccaagatgaaccttttttatatataataaaaatttgagggaatatgttttgggatgtattatagagctaaaactctaacctcttaatagttttatagaacttaaaaatttttgatagttacccaattggtgatacgatcttaagcttttgtgtcagattatttaatatgatgacttcatgctttattatgccttattatggctgatgtattactgtgatgaaacaaaatatctttaaaagttaaaacatccagacatagaaactcttttttcctaaggataaagtacctttgagcatgagtgtatcacagctttccttaggaaaacttttcattacatacttgtttaaactctgtcttccaggggaaaaataataaggttgaatcattttattaaaaatactttttaagaaaataactatgaacatctgaatattaaagatataaaaatgcacataattcatatttcaggtggtatttgcattcagtgccttactagtattctcagaacattttaatgatttctaacatttcttaacagtcatagatatataaattttcattttttgtacttgaatattctaagtaaaactgacatttactcttgacaaataaaacatatatatatttactaaaatgtgtttaattttactttttgaaaactgtcattttaaaaatattcaattaattatgtatttgaattattttggagatgaggtattttatgagtattttcagacaataaaacttaattagtctgtgtca

SEQ ID NO: 4492 - DNA, 2185 bp, Homo sapiens
tctacttcatttcactgacaggccactctctgaagacacttgatctcttaaccatgaagaaccttgacagcaaggtaaacattataccagtgattgccaaagcagatacggtttctaaaactgaattacataagtttaagatcaagttcatgagtgaattggtcagcaatggcgtccagatataccagtttccaacggatgatgacactattgctaaggtcaacgctgcaatgaatggacagttgccgtttgctgttgtgggaagtatggatgagataaaagtcggaaacaagatggttaaagctcgccagtacccttggggtgttgtacaggtggaaaatgaaaaccactgtgactttgtaaagctgcgggaaatgttcatttgtacaaatatggaggacctgcgatagcagacccataccaggcactatgagctttacaggcgctgcaaactggaggaaatgggctttacagatgtgggcccagaaaacaagccggtcagctacaggccaaatttgaggaccttaagagacttcaccaagaagagagaatgaagcttgaagaacaaagaagacttttggaagaagaaataattgctttctctaaaaagaaagctacctccgagatatttcacagccagtcctttctggcaacaggcagcaacctgagtaaggacaaggaccataagaactccaattttttgtaaaacagaagttccagagcacagaaggtcatcatcacaagcaaaatttattaaaaaaaaaaaacaaaactagaagtgtgctttgattttgctgtttttgtttgttttatcacttctatatttggtgaacggccacagttactgatatttatggaaaagtactttcaagtatgaggtcaatacgtaagccagagtgaatgatactacaagttgagcatctctaattcaaaaatctgaaatccagaagcttcaaaatctgaatctttttgaacaatgacttgaccccacaagtggaaaattccccacctgacacctttgctttctgatggttcagtttaaacagattttgtttctcgcacaaaattattaaaaatgttgtataaattactttcaggctatatgtataaggtggatgtgaaacatgaattatgcaattagagtcgggtcccattgtgtatacacagatattccagaacctgaaatccaaaacacttctggtccctagcattttggataagggatactcagcttgtacctatatattcgtatatattcactgttgttagaaatttttaagttgctgttttgtgatggatctaaatcttttctcttgctaccaagctattgtcactgcagtgcattataccaaagagcaaagtgtcagtgccactgaaaataaagaacccattaatatcgtggctaactgattacatttatatccaagatgaaccttttttatatataataaaaatttgagggaatatgttttgggatgtattatagagctaaaactctaacctcttaatagttttatagaacttaaaaatttttgatagttacccaattggtgatacgatcttaagcttttgtgtcagattatttaatatgatgacttcatgctttattatgccttattatggctgatgtattactgtgatgaaacaaaatatctttaaaagttaaaacatccagatatagaaactcttttttcctaaggataaagtacctttgagcatgagtgtatcacagctttccttaggaaaacttttcattacatacttgtttaaactctgtcttccaggggaaaaataataaggttgaatcattttattaaaaatactttttaagaaaataactatgaacatctgaatattaaagatataaaaatgcacataattcatatttcaggtggtatttgcattcagtgccttactagtattctcagaacattttaatgatttctaacatttcttaacagtcatagatatataaattttcattttttgtacttgaatattctaagtaaaactgacatttactcttgacaaataaaacatatatatatttactaaaatgtgtttaattttactttttgaaaactgtcattttaaaaatattcaattaattatgtatttgaattattttggagatgaggtattttatgagtattttcagacaataaaacttaattagtctgtgtca

SEQ ID NO: 4493 - DNA, 6404 bp, Homo sapiens
tacgctcctagcttgagggaaagaggccgaggcctgggccaagcccggagccgccgctcgccggagcctcctggagcctccgcgccggctcagcctgggggcgggctccggtccggcccgccgccgcacccaggacggaggctgcatgcccgaggaccaggccggcgcagccatggaggaggcgtctccctattccttacttgatatctgcttgaatttcttgactactcaccttgagaagttctgttcagccagacaagatggaacattgtgtctgcaggaacctggagtattcccacaggaggtggctgatcgactgcttcggaccatggcttttcatggtctattgaatgatggaactgtgggtatttttaggggcaaccagatgcgcttaaagcgagcctgcattcgcaaagcaaagatctctgctgttgctttccggaaagctttctgccaccacaagttagtggaacttgatgccacaggtgtgaatgctgatatcacgattacagacattatcagtgggcttggcagtaacaaatggatccagcagaatctccagtgcctggtgctgaattcattaactctctccctcgaggatccttacgagcgctgcttcagccggctttctggccttcgagctttaagcatcacgaatgttctcttttacaatgaagacctggctgaagttgcctcattgccaagattagagagcttggatatttctaacacctcaatcacagacatcactgctctactggcctgcaaagaccgactcaagtctctaaccatgcaccacttgaaatgtttaaaaatgacaactacccagatactggatgtagttcgggaactcaaacatctgaatcatcttgatatctcagatgataaacagtttacatcagacatagctcttcgcttactagaacaaaaagacatcctacctaaccttgtttctctggatgtttctgggagaaagcacgtgacagataaagccgttgaagcctttatacaacaacgtccaagcatgcaatttgtaggtttgctggctactgatgctggttactctgaattcctcacaggcgaaggacatttgaaggtgtctggggaagccaatgaaactcagattgcagaagcactgaagcgttacagtgaacgggcattctttgttcgggaagctctatttcatctttttagtctgactcatgtgatggaaaaaacaaagccagaaattttaaagcttgtggttactgggatgagaaaccaccctatgaatttgccagtgcaactggctgcaagcgcctgtgtatttaacttaaccaagcaggatcttgctgcagggatgcctgtccgactcctggctgatgtgacccatttgctgctcaaagccatggaacattttcccaatcaccagcagttacagaagaattgcctcctttcactttgcagtgaccggatccttcaagatgttccatttaacaggtttgaagcagccaagcttgtcatgcagtggctttgcaaccatgaggatcaaaacatgcaaaggatggcagttgctatcatttctatcctggctgccaagctttctacagaacaaactgcacagcttggtactgagctcttcattgtcaggcaacttcttcaaatagtgaagcagaaaaccaatcaaaattcagtggacactacattgaaatttactttgagtgcactttggaacctcacagatgaatctccaaccacttgtagacactttattgaaaaccaagggttagaactcttcatgagggttctagagtctttcccaactgagtcatccattcagcagaaagttctaggacttttgaacaatatagctgaagtacaagaattacattctgaattaatgtggaaagattttatagaccacatcagtagtctcctacacagtgtggaagtggaagtcagttactttgcagctggaattattgcccatttaatatccagaggtgaacaagcttggacattgagtcgtagccagaggaattctctgctggatgatttgcattcagctattttgaaatggccaactccagagtgtgagatggtagcatacaggtcctttaatccatttttcccattacttggctgtttcacaacaccaggagttcagctatgggcagtttgggccatgcaacatgtctgcagcaagaatccttcaaggtattgcagcatgctgattgaagaaggaggattgcagcatttatacaacatcaaagatcatgaacatactgatccccatgtccaacagattgctgtggccattctggatagcttagaaaaacacattgtgcgccatgggaggccacctccctgtaaaaaacagccccaagccagactaaattgatagccataagtattggatagttgaatcacaggaatcctttttgtgattggtccatttggaatatcttaccctccctgatgttttgggggtttctatgacaagagtcataaaatcagtttgggattgataatgtgtagtactgcccatgtgaacagtctctaatttgtcttgtgattttaaacttatgagtcaagaagggtctcttcctttatcattgccttttaggaaattttccacatctttcagtgtttgaacttacttgtgcttgagattctacagttttatggtaaagtttgcacgaacccttaggccagacttttctgatctcagagtcccttccaatcaatttgcagcttcacataagctgttgacctgatttctgacactgcttcagttgtaaattttatactgcttctgtataaaatgcctttcttctctatctgtgtatattttataagatgtccttcttagtgtgaaagaagggaaatgtggatcatcttgtggaagctaatcactggcaggagcctggatggctggcggaaagatatatgagaaagaaaaattatgaaggtagaacagagtgtaggaactgggaattggtttcatggtataggttttaaaatgagacaggctacccttcgggagtccacctctcttgaggcggtgagcagaagcttgtcctccatatttatacctagaagtgtggactgctggttcctgcacagactgccggttattcactaggaatatttccccaagcaccacagtataaaatactacagcactctgtgttaaagactaactgtctacatctccatatgttgtagtgttgtgaaaatgtgattttaaaaaattatcgccagttaaaactggctattcttttcctctatttcaaagtcatttttgttcagtggaatagagacagcaacatggtgttaacctctcaattaaaatacaattgacaccagtaaattttgccataaaaagttaaaatctcttgttcaaaatatgtgtatcttcttaatgtgttcatgttagagaaagtgtccccatctcactgccaaaaatgaaagaaaataattaaactctttaaatgattaaatgtaatgattctactcgcagtgcataacagcacatatttttgacagattattttttaggcaattacctttccttaaggtatctgatacagtatagtaaagaatcacttatatcagtaatagcacttgagagatagcaagtcaccaagaaacttaattttcatttaaaattttattttgtgaataaggtcaatctacaatcccagataactacattttttttcatagatggccagtgttttcaacagagatttaaaatggaatattaaaattatagtgattattcagaagcattttaatttagaaaggagctggtttgttagttcactgatgacattttttgacaaacattttataccattatcacaataatcagacttgaattttttttggagttccttcatgtgaatgaaaactgagttaaaagaaagtaggcatttaggtctggatgcagtggctcatgcttgtaatcccagcactttgggaagctgaagcaggaggattgcttgagcccagaagttcaagactagcctgggcaacatagtgagactcggtctctaccaaaaaaaaaaattttttttttttaaattagctgggtgtggtggcacctgggaaacagagcgagacgctgactcaaataaatatctaaatagatatttagaatcactgaaaaccatattaaatgctgggttaatgctgacttaattggcttaaggaatttttataggcgtaagataaattttcacagactaagtttatttcagacaaaatagagaattcttttaaaagttttttttttttttttcctttttcgaatgttaatgtctaagacaaagttcagaaaacgagatggcctgtggtagtttggaaattgctagatatgttgaccgtttccaggtcttttatctagtgtagttaagggaaagcctatttaagaagtttggcttcaagtttctgttttataagacaaaagtgcatatttctttacaggctaatgctaggtttttgtctttacaaattattttcagaaatggctaaaagtgtacagaaaacagtaaatcccttctttactcagaataacttcttaatagttgaagcatccaaaatatgtaaaagcaagggtgggcgtagtggctcttgcctgtaatcccagcattctgggaggccgaggcgggcagatcacttgagatcaggagttcgagaccaccctggccaacgtggtgaaaccccgtctctactaaaaatacaaaaactagctgggcatggtggcttttttgcacgcctatagtcccagctactcgggaggctgaggcacgagaatcacttgaacccaggaagtggaggttgcagtgagctaagatcgtgccactgcactccagcctggacaacggagtgagactctggggaaaaaaaaaattaaacttcctactttttttctttttgtagagacagagtttcactctgtcgcccaagctggagtgcagtggcacaatcatacctcactgcagcctcttgggcttatgtgatcttaccccctcagcctctggagtagctggaactacaggctaaatttcctactttgtaaacatcagtagtggccagatacttctgagtcttaaaagcataataggccgggcgcggtggctcacgcctgtaatcccagcactttgggaggccgaggtgggtggatcacaaggtcaggagttcaagaccagcctggcccaaatggtgaaaccctgtctctactaaatatacaaaaattagctgggtgtggtggcgggcacctgtaatcccagctactcaggaggctgaggcaggagaatcgcttgaacctgggaggtggaggttgtggtgagccaatatcatgccactgcactccagcctgggtgacagagtaagactccgtctcaaaaaaaaaaaaagcataataatttattacatcccaaatatataaaaatttgagtgcctttgcagttgggatggttcctaaaattgcgtatagaattaaggcacagaattgtgtgtaaggtcctgaatctggctaaaatacagtggatgtatgtattggaattatgaggcataagtagccagtatctatagttagaatctacaaggcctcctttttgcacctgtagactagaatataactgttattggtgcctttgagtgttatctctcagtggctagaggtgctgtttcaagcacaatttagactagggttgaaccactcattgttcaaatcattggtgggctccaatgtaaaatatcactacatcagtccacaagcaacattaaggaaatctaaaggaaatggaatttgactttttagagtataatgatgttctagggcataatgaggaaaatttttaaaaaatagattataatgatacatattggtatcattaagacaacagatttgagcaaatacaattaaggtgtcttattttttgcatcaagtaattattgctgtggtctttctactccacaaaataattttttctttttgcagttgaaaattaactgcattattaactaattaataaaataaatcaagtggtataagggattagtttaccctcaagccgatgactccatggctactgatattagttagtttaggatttttaaaaagcatatcagacccccagtttcaggaattgagtataaatattgcttcttgtcaccctgggacagtaatgccttatagtggcactagtcaccttaagtagattacacatggttgaggtgaataaagctgcatgggaatttgctttcgtgatatatttcatttgcaaacttctacataatcaagttttatgtttaaaaccatcggttctatatatctagctttaggaagttgcccttacaggtgggaccttttgtgttaatctgttttctccccagtcatcttatttggctatgtt

SEQ ID NO: 4494 - DNA, 1890 bp, Homo sapiens
tctacagaacaaactgcacagcttggtactgagctcttcattgtcaggcaacttcttcaaatagtgaagcagaaaaccaatcaaaattcagtggacactacattgaaatttactttgagtgcactttggaacctcacagatgaatctccaaccacttgtagacactttattgaaaaccaagggttagaactcttcatgagggttctagagtctttcccaactgagtcatccattcagcagaaagttctaggacttttgtgtggatctgctgatgatgaattcttcagcttttgtctgactgaaaacatctttacttaacctttgtttttgaaagatacttttaccagaacaatatagctgaagtacaagaattacattctgaattaatgtggaaagattttatagaccacatcagtagtctcctacacagtgtggaagtggaagtcagttactttgcagctggaattattgcccatttaatatccagaggtgaacaagcttggacattgagtcgtagccagaggaattctctgctggatgatttgcattcagctattttgaaatggccaactccagagtgtgagatggtagcatacaggtcctttaatccatttttcccattacttggctgtttcacaacaccaggagttcagctatgggcagtttgggccatgcaacatgtctgcagcaagaatccttcaaggtattgcagcatgctgattgaagaaggaggattgcagcatttatacaacatcaaagatcatgaacatactgatccccatgtccaacagattgctgtggccattctggatagcttagaaaaacacattgtgcgccatgggaggccacctccctgtaaaaaacagccccaagccagactaaattgatagccataagtattggatagttgaatcacaggaatcctttttgtgattggtccatttggaatatcttaccctccctgatgttttgggggtttctatgacaagagtcataaaatcagtttgggattgataatgtgtagtactgcccatgtgaacagtctctaatttgtcttgtgattttaaacttatgagtcaagaagggtctcttcctttatcattgccttttaggaaattttccacatctttcagtgtttgaacttacttgtgcttgagattctacagttttatggtaaagtttgcacgaacccttaggccagacttttctgatctcagagtcccttccaatcaatttgcagcttcacataagctgttgacctgatttctgacactgcttcagttgtaaattttatactgcttctgtataaaatgcctttcttctctatctgtgtatattttataagatgtccttcttagtgtgaaagaagggaaatgtggatcatcttgtggaagctaatcactggcaggagcctggatggctggcggaaagatatatgagaaagaaaaattatgaaggtagaacagagtgtaggaactgggaattggtttcatggtataggttttaaaatgagacaggctacccttcgggagtccacctctcttgaggcggtgagcagaagcttgtcctccatatttatacctagaagtgtggactgctggttcctgcacagactgccggttattcactaggaatatttccccaagcaccacagtataaaatactacagcactctgtgttaaagactaactgtctacatctccatatgttgtagtgttgtgaaaatgtgattttaaaaaattatcgccagttaaaactggctattcttttcctctatttcaaagtcatttttgttcagtggaatagagacagcaacatggtgttaacctctcaattaaaatacaattgacaccagtaaattttgccataaaaagttaaaatctcttgttc

SEQ ID NO: 4495 - DNA, 2078 bp, Homo sapiens
agtgtatcccctactccgtgttgctgaaagacctggagatgcggaatctccgggaactagaagaccttatcattgaggctgtctacactgacatcatccagggcaagctggaccagcgaaaccagctgctggaagtggatttctgcattggccgtgacatccgaaagaaggatatcaataatattgtcaagaccctgcatgaatggtgtgatggctgtgaagcagttctactgggcatcgagcagcaagttctgagagccaaccagtacaaagagaaccacaaccgaactcagcagcaggtagaagcagaggttaccaacatcaagaagacactcaaagccaccgcatcctcctcggctcaggagatggagcagcagctggctgaacgggagtgtccccctcacgctgagcagaggcagcccaccaagaagatgtccaaagtgaaaggtctggtctccagccgccactagggccggctggggcagctggcactcaccaggcctgggtcaggtggggaggggacaccaagggcccatttcctcccctctctacctgcagtgagttccagacctgcccgtcccctcaccagcgcctccccaccctgttggtactgttccagaaaaactgttactccccctcacccactccctccttccccagttgttcccttcagactcaggggctccaccaatgccatcccaaaacagggtcagacactgcccagcttccctccaggaggttcttgtctctgtgtaagggcttgtctccctcccagtttttcttttgctccacgtcattttgtcaggctggttataagccggaggcagctttaaccagcccccagggatgattgtgaaggaggcccctccccttgtgaggagggggcactcctctccagcccctggtaccacagtcctcacgatggtgcagtgatttctagccaggcgtcaagatgcgctgctttccctctcctgcctcatcccttgttggcagctccagttcaggccgtggagggacgtgatgctgggctgtgtttactaaacccatgggttttcagcctcttaagcccagctccgatctccaattagttgagagcgctgggttgactaacctctggtatctgagcacagacagagggtgctgtgggtctgctgggtggcagaaatggttccttccggcttggcgttctctcctggccactcttcctgctgcctctgactactcagccttgttttcggtgtgtaggccccagctgcccactggaactgccggctaatgcttgctctcccaagatctttaactcctcctggctgcacctgggtagggatggtggcatcgatgcccctctgtctgctgaaggacctgttgctgcttctgtcttttcacccctccttggctgatgacccagagccctctgatgatggcattctcctggcaagagaaaaagacttaactagacttctgaacttgaacagtttcaggttatattttaatttttttttttttgtacaggttctgattctaatacatttcaacatgcttttgtcccccctcgtgtcaatatttgttatagactaatcgccggggatttttcacctggttggagggtgggggtggggtggggtgtgtgtgtgtgtgtgtgtgtgtgtgtgtgtgtgtgtgtgtgtgtgtgtttgtaggtcctggactgattaaagttcattgaggaaaaagcacattttacaacaaaaaaataaaagtgtagatttaatgtatgtgactggggtttggggttgcatacctggtggatcttgaggggctgggattagggtggttcaggaaaatgtgatgctgtttccccatgtttagccatggtcaaaaaatggatttctcctttttctaaaatgtccagcaactgcctactgttgatcaaatgttgaagtattcttgtttcccttttaagccaatccatgtgcccacataacattatgcccaagtggagagttcactttaatttccaaagtatgtttcatgcagccccctgtcagctgctctgtggaaaaggggttctgttatgaaataaatgttgcactccctgc

SEQ ID NO: 4496 - DNA, 5724 bp, Homo sapiens
attgaatttaagttctaaggaggtggctgggtttcttattgtcaccttttgtcttgtctcatttagctatatcgagaagtttactgactttcttcggctctttgtgagtgttcacctaagaagaatcgagtcttactcccagttccctgtggtggagtttttgacacttttgttcaagtacacatttcatcagcctactcatgaaggttacttctcttgtttggatatctggacgctgtttttggactatctgacaagtaaaattaaaagtcgtcttggagacaaggaagcagttctcaacaggtacgaagatgccctggtgctcctgctcacagaggtgttgaatcgaatccagttcagatacaaccaagcccagctggaggagttggatgatgagactctggatgacgatcagcagacggagtggcagcggtacttacggcagagcttggaggtggtggccaaagtgatggagctcctgcccacgcacgccttctccacactgttccctgttcttcaggacaatttagaagtttatttgggattacaacagtttatagtcacttcagggtcaggacacaggttgaacatcacggcggagaacgactgccggcggctgcactgctccctgagagacttgagctccctgctgcaggccgtgggccgcctggccgagtactttatcggggatgtgtttgctgcacggttcaatgatgccctcacagtcgtggaaaggttggtcaaagtcactctgtacggatctcagataaaattgtacaacattgaaactgctgtgccatcagtattgaaacctgacctcattgatgtgcatgctcagtccctggctgcgctgcaggcttactctcactggttagcacagtattgcagtgaagttcaccggcagaacacgcagcagttcgtgacactcatctctactaccatggatgcaatcacacctctaatcagcaccaaggtccaagacaagctgctgctatctgcgtgccacttactggtctcactggccaccaccgtgcggcccgtctttctgatcagcatccctgcagtgcagaaagtattcaacagaatcactgatgcctctgccctgcgacttgtcgataaggcccaggtgttggtgtgccgagccctctctaacatcttgctgcttccgtggccaaaccttccagagaatgagcagcagtggcccgtgcgctccatcaaccacgccagcctcatctctgcactctcccgggactatcgcaacctgaagcccagtgctgttgccccacagagaaagatgccactggatgacaccaaactgattatccaccagacactcagcgtcttagaagatattgtggagaatatctcgggggagtccaccaagtctcgacagatttgctaccagtcgctgcaggaatctgttcaggtctccctggccctctttccagcttttatccatcagtcagatgtgactgatgagatgctgagcttcttcctcactctgtttcgaggccttagagtacagatgggtgtgcctttcactgagcaaatcatacagactttcctcaacatgtttaccagagagcagttagccgagagcatcctccacgagggcagcacaggctgccgggtggtggagaagtttctgaagatcctgcaggtggtggtccaggagccaggccaggtgttcaagcccttcctccccagcatcatcgccctgtgcatggagcaagtgtatcccatcattgccgagcgtccctcccctgatgtgaaggccgagctgtttgagctccttttccggacgctccatcacaactggaggtacttcttcaagtccaccgtgctggccagtgtccagagggggatcgctgaggagcagatggagaatgagccccagttcagtgccatcatgcaggctttcggacagtcctttctccagcccgacatccacctttttaaacaaaatctcttctacttggagactctcaacaccaagcagaagctgtaccacaagaagatcttccggactgccatgctgttccagtttgtgaacgtgctgctccaggtcctggtccacaagtcccatgatcttctgcaggaggagattggcatcgccatctacaacatggcctcagtcgactttgatggcttctttgccgccttcctcccagagttcctgaccagctgtgatggtgtggatgccaaccagaaaagtgtgctggggcggaatttcaagatggatcgggtgaggagagaaagaggccgggctaagaggagggcagagtgggcacgcaagcctggcacctgtgcagcaaggagggggcacattgaggcctctgggcgtggtctgtgcccaccctgcagcttggcggcagctcacgagatgcctgctgacctggtgctgtagcctgattgaggggcacagccttttccccagtcttggtgtctgtagcacgtatgttcttagtctcagccatggaggtcccgagttcctggctctgcagcccctccatttgtcttggcatctttgttcatacccaggaccctgccgttctccctcctgggtgatgagccccggtggggccagcattggagtgtgcccaggcttgcattcaggctgagatggttggtgcttgggagctgcacttctgggtccccagggttagaggtgggacccaggttccccggctgtcttgggctctttccagaccagccccagctcagcttgggctgagttgctgccaggtcctgggaggagccctcctagtactcaccctcttgtcccactgctgccacctgtgcagggactgtcaggtgggctgtccccacccgtgcagcacctcggtgggagctgggtgctgctggctcttggtgtccatgaggccatcttgttggagcctgacagtgcctgggacctccttccccatggggctcacctgttctcttcttcctgtgtcaggtgaccaggcctctctcttgcctgataggaacttctgggaacttttccttgtaccgttttatacttgatgaaattaggaaaagaaatcgctttctccctggtcctcttggggttcttgacctgagtcctctgtgaagcagcttgtccacggctccaccgtagtgctcagatgcacacactgctctcactggtgcaaacctggccgcctgctttcctcatttgccacgtgtggcagggaagcttttgcttagactcatcctgttctcctttgtcttggggtcttccttttcttgggacttgttctctcctaagcctcttccagttcacttcagcccctggatatgttttttcctttttctagaggccagatcctaatacttaatgatcagcttctaacgacatcaatatcagtcaactttttgatttaaagctgtggtttcaaaatctagttataggccaggcgcggtgtctcacacctgtaatctcagcactttgggaggccaaggcgggcggatcacttgaggttagggggtttgagaccagcctggccaacatggcgaaaccctgtctctactaaaaataaaaaaaattagtcaggtgtggtggcacacgcctgtaatcccagctgcttgggaggctgaggcacaagaatctcttgaacccgggaggcagaggttgcagtgagcggaggttgtgccactgcactccagcctgggcggcagagtgggactttgtctcaaaaaaaaaaatctagttatatcagaagcacctggggtacttattaaaaatggagaaacagacttctgtgttctacccaggaaattctggtttggcatttgggagccactgatttaaaagacatcccttagttggttttttgagggtaaaataaaagaatcaccaccttccattcagtcacgcactgtgtgtttgaagccagctgcttctcaagccccgggccaggaactggggcaccagtcccagccttcaccaagtctttcatggtagacaggccaatacagcaccctctgtggaccacatagtgccaagcatgtgacatgtcttggctcgagtaagccttctaacaagcctctgaagtgtgggtcctgttactcccccatttcacagatggtgggggctcagaaggtgagcagttcacagaacttggaagtggtagagctgcgaagcaggaggcagacctgggtgttctggccccagagcctgcacacactccccagaagcagattgctcaggacagaggcgctgagctggctgctggggccaggaaataggaggcatctgtgcagactttgggaagaggcaggctttgaatggagttctggaagaggaatagtggttgggcaggaaaatgaacttggtcctgctcatggctctgctggggcttgctgggcctgtttgagtcctcaccgggacctacactgaaaaaaaaagcagggtctcaccgtgtgcatgatggcggaggtcagggcctcacttctggcccagggccttccatggcccacgctgcgcccagtgggacaggccttgggactgtgtttgctgctgctcgggtggctctcgaggggcaggggcggcctggagccccgtgggtaaaggttctgcagacattgctcggtgtgcgcgtcacctcaaggggccatggtgaagaagagggctgtcaccacagccatgtctgcgtttgaggggccggactcaggagcaagtgtgctggtctcttcagtgtgagctggggccagcttcttcatggtgcagcgctttggtctttctgtccttagactagtggttctggtagggcttggtggcagccttgtggtgaggactcagtgagttgatgtctgtatgttgattgcagcagtgtctggcacccgagaggccctagggacgtattcctcttgttctttttctcccacagcgcctggcacagagtctctgtgacacgcagtgcaacagtgaatagaagttttgagttttagaaagtgctcccctatcttcagtgcacactctgggatggaagtagctgttggggtctggtgggtgggtgacctggtgtgttgttggctgcagctatgcccctgccttccaggacctgccctcattcacccagaatgtgcacaggctggtcaacgacctgcgctactacagactctgcaacgacagcctgccccctggcactgtgaagctctaggcctgctactgcctggggacacggacttctgctgctgccacctgcgccagccctaccttccaccacagatgtctcccagatgggccttggtcacactccttggcttctcccaccgcaagcaacgctgcctgcctctgccgctcctccacatcttgccgctgcccagcagagctggcttctgggtccacctgagcactggacggtgctcccagggcgttggagcaggcggaggggtgtgtggccaggtactaggaggcaccaggaaatcccgcggggtggcccatgcagaccaggcgcacgtggctcatggggcagaattgccaaggacagctcacgacagtgccaccttctcaccattccagccaaggagagatgtgacgttggaactgctctggcacttctgtcaagcctcccccgccccaattgccttgagatctctgctctttgtcagagatttgcaaagactcacgtttttgttgttttctcatcattccattgtgatactaagaaactaagaagcttaatgaaaagaaataaaatgcctatgttgttgttctag

SEQ ID NO: 4497 - DNA, 3022 bp, Homo sapiens
ggagggggcgtcgggaaagccccgacttcgcagccttacactcttcgtgggcggcgaccgcggccccactgacatcattcctcatgagggaggaggcacaaacagttctgggccgaccagaaaaaggacgactgggacttgactctgaatcgcaggatttgaagagatttctcctggcttcccaacgaggctggtgggaagcggtcctcctcccatacacgacctcccaccctcgcgaggcgtagaaaccagttctgactgtacagtaaagcgagggccagggctgaggtctggaagctaatgaaagcacagaaagtgtcgaaactggatgagcaggaagcgagtggcctcccctgtcatctgacgttttcccaggatgtaatttgcctgactgaaacagatcaggaccaacagggagagttttcgatttagtgtgaggaaaagagcactaaattgtagcaaaagaccttattgctcaaggcccagtcagaagatttcataaggaagctgtagaaagtcttaagaggaaatcagccgggcgtggtggcgggcacctgtaatcccagctactcgggaggctgaggcaggagaatcgcttgaacccggggagcagaggttgcagtgagccgagatcgcgccactgtacgccagcctgggcgaaagaacgaaactccgtctccaaaaaaaaaaaaaacgaagaaaaagtccaaagagggtaaaggctgttctccccttaaaaaacagctaaagacctttgggggcgctgctccttgtaaatgtcaactacttccgcgggaaagaacgcgcaggcacttggccttgtgggcgctcacttgccccggaagtactgttgagttagcgcctcgccttccggggcggattgtctgtcgttgcagtagctgtaggaaggggaggccattttccgtttctgggaggagtgaggggcaacgggtcggagaaaaaggaaaaaagaagggctcagcgcctccccgccgggccgtggacagaggggcacagtttcggcaggcgggtgaggtcgctgagggcccgccggagatgttttccttgtcgagcacggtgcaaccccaggttacagttcctctgagtcatctcatcaatgccttccatacaccaaaaaacacttctgtttctctcagtggagtgtcagtttctcaaaaccagcatcgagatgtagttcctgagcatgaggctcccagcagtgagtgtatgttcagtgacttcctgacgaagcttaacattgtttcaattggcaaaggaaaaatattcgaagggtacagatccatgttcatggagccagcaaaaaggatgaagaagagcttggacacaaccgataactggcacatccgtccagaacccttctccctctcaatccctgtacactgcgggtttctccaaatgcctattgtctatgatttgttttgtccatcgttcttagtcacggcttagttcaggttcttgccatctttcacttgttccatcagccttctctctcatccagtctagtttctttgtttgtttgttttatcatttttaaattttttgtaaagacagggtcttgctttcttcaccaggctgatctcgaactcctggcctgaagcagtcctcccacctcagcctctcaaaagtgttgggattacaggctcgagccaccatgctaggccagtctatcttccttagttctccattttcttctataagacagaactaatcatgttacttagagaattaaattcaaacatggctcttcacagtttggccataacctatctctttaattttttctttccttgaattttttgagatattccagacccttggatggctttttgtttgcccccgtccctaagccgccttgatcatttttaatagcttaaaaagtacttttaagtattttatttcatcatgcctttaactgtcttttactatgtgctgtcatgttgtatgctaggatacgtagatgagtaaggcatgatctctgcctttgatccttactattaggaaataaggtgtattttatagttatgttagtattgagaaaatgaattctaagaatatgagttatagctaatttaaaaagtaccgtattcccagacatcagtccagagctatataatccgtgtccatgcctcttttaaaaaaaactttatttttagagacagggtctcccctttgtagcccaggctgaagtgcagtgatgctgtcatagctcactgcaacctccagctcctgggctcaaacatttctcctgagtagctggtgctgcgggtgcataccaccatgcccagctaatttttaaatttttcatcaagatgatgtcttaccatgttgctcaggctggtctcaaactcctggcctcaaacgatcttcccaccttagctgttttgggtttgagtaacatgtaattgttacttgcctttaagtgcctctctttcagctcatgtggacaagaaaataatccctatcctgttgtttaaaagtgggtatacacacatttttgtgatttttagacttttttgcctgattttcacacagttttgactttaattttcttctttattagaagatatgggtaactttagaacctctgagttcaaggaaggatctaagcaatgaggccagaggagtgagatgtcctatggtaaccaagcataccatttctttgtcaagtgggcttttgtttatggctgcttaggggcttaaaagctccatggactggtgaggattatcatttgaatggaatttccccaattcaagaaccttactattatcctccaatcagttctacactgttggggaaaatcccctggaccttatataacatactttgtaaccctgcagttagttactcttacactcttgtcattataaatgcttgatcaatagttgatagactagctcttgatcagagtacccttgtatggagagaaggaaaaaatgccatacatttcacttgattctgtgaaccataatgcttaggacagtagtggtttgggtttgattt

SEQ ID NO: 4498 - DNA, 2518 bp, Homo sapiens
aggggaggccattttccgtttctgggaggagtgaggggcaacgggtcggagaaaaaggaaaaaagaagggctcagcgcctccccgccgggccgtggacagaggggcacagtttcggcaggcgggtgaggtcgctgagggcccgccggagatgttttccttgtcgagcacggtgcaaccccaggttacagttcctctgagtcatctcatcaatgccttccatacaccaaaaaacacttctgtttctctcagtggagtgtcagtttctcaaaaccagcatcgagatgtagttcctgagcatgaggctcccagcagtgagtgtatgttcagtgacttcctgacgaagcttaacattgtttcaattggcaaaggaaaaatattcgaagggtacagatccatgttcatggagccagcaaaaaggatgaagaagagcttggacacaaccgataactggcacatccgtccagaacccttctccctctcaatccctccttcacttaacttaagggaccttggattatctgaactaaaaattggacagattgatcagctggtagaaaatctacttcctggattttgtaaaggcaaaaacatttcttcccattggcatacatcccatgtctctgcacaatccttctttgaaaataaatatggtaacttagatatatttagtacattacgttcctcttgcttgtatcgacatcattcaagagctcttcaaagcatttgttcagatcttcagtactggccagttttcatacagtctcggggttttaaaactttgaaatcaaggacacgacgtctccagtctacctccgagagattagctgaaacacagaatatagcgccatcattcgtgaaggggtttcttttgcgggacagaggatcagatgttgagagtttggacaaactcatgaaaaccaaaaatatacctgaagctcaccaagatgcatttaaaactggttttgcggaaggttttctgaaagctcaagcactcacacaaaaaaccaatgattccctaaggcgaacccgtctgattctcttcgttctgctgctattcggcatttatggacttctaaaaaacccatttttatctgtccgcttccggacaacaacagggcttgattctgcagtagatcctgtccagatgaaaaatgtcacctttgaacatgttaaaggggtggaggaagctaaacaagaattacaggaagttgttgaattcttgaaaaatccacaaaaatttactattcttggaggtaaacttccaaaaggaattcttttagttggacccccagggactggaaagacacttcttgcccgagctgtggcgggagaagctgatgttcctttttattatgcttctggatccgaatttgatgagatgtttgtgggtgtgggagccagccgtatcagaaatctttttagggaagcaaaggcgaatgctccttgtgttatatttattgatgaattagattctgttggtgggaagagaattgaatctccaatgcatccatattcaaggcagaccataaatcaacttcttgctgaaatggatggttttaaacccaatgaaggagttatcataataggagccacaaacttcccagaggcattagataatgccttaatacgtcctggtcgttttgacatgcaagttacagttccaaggccagatgtaaaaggtcgaacagaaattttgaaatggtatctcaataaaataaagtttgatcaatccgttgatccagaaattatagctcgaggtactgttggcttttccggagcagagttggagaatcttgtgaaccaggctgcattaaaagcagctgttgatggaaaagaaatggttaccatgaaggagctggagttttccaaagacaaaattctaatggggcctgaaagaagaagtgtggaaattgataacaaaaacaaaaccatcacagcatatcatgaatctggtcatgccattattgcatattacacaaaagatgcaatgcctatcaacaaagctacaatcatgccacgggggccaacacttggacatgtgtccctgttacctgagaatgacagatggaatgaaactagagcccagctgcttgcacaaatggatgttagtatgggaggaagagtggcagaggagcttatatttggaaccgaccatattacaacaggtgcttccagtgattttgataatgccactaaaatagcaaagcggatggttaccaaatttggaatgagtgaaaagcttggagttatgacctacagtgatacagggaaactaagtccagaaacccaatctgccatcgaacaagaaataagaatccttctaagggactcatatgaacgagcaaaacatatcttgaaaactcattcttgatgtggtgtaattgaagggtgtgaaatgctttgtcaatcatttgtcacatttatccagtttgggttattctcattatgacacctattgcaaattagcatcccatggcaaatatattttgaaaaaataaagaactatcaggattgaaa

SEQ ID NO: 4499 - DNA, 2436 bp, Homo sapiens
accaggcgggagggcgggtaggcggtttgtatccgggctgtgaggtgctcggagcctcggcggaccttgctgcctctgtctctttaacgcgagaggaagcgatgcagaggggtggaaaatggcagagctgcagatgttactagaggaggagatcccgtctggcaagagggcgctgatcgagagttaccagaacctgactcgggtggcagactactgtgaaaacaactacatacaggctacagacaagagaaaagctttagaggagaccaaagcctatacaacccaatctctagctagtgttgcttatcaaataaatgcattggccaacaatgtactccagttgctggatatccaagcctctcagcttcggagaatggagtcttccatcaatcatatctcacagactgtggatattcataaggagacagtggcacgaagagagattggtattttgacaacaaataagaatacatcaagaactcacaaaataatagcacctgcgaatatggagcgccctgtaaggtatattcggaaacctatcgattacacagttctggatgatgtgggccatggtgtcaagcatggaaataaccagcctgcaagaactggcacactgtcgagaacaaatcctcctactcagaaaccgccaagtcctcccatgtcaggccggggaacactgggacggaatactccttataaaaccctggaacctgttaaacccccaacagttcctaatgactatatgaccagtcctgctaggcttggaagtcagcatagtccaggcaggacagcatctttaaatcagagaccaaggacacacagtggaagtagtggaggaagtggaagtcgagaaaacagtggtagcagtagtattggcattcccattgctgtgcctacaccttcgccacccactattggaccagccccgggctcagctcctggttcccagtatggcacaatgaccaggcagatatctcgacacaactctactacttcttcgacatcttctggtggatacagacgaactccctctgtgactgctcaattttctgctcagcctcatgttaatggaggtccactttattctcaaaattcaattgctgatagtccaactccaccgccaccacctccaccagatgacattcccatgtttgatgactctccacctcccccaccaccaccaccagtggattatgaagatgaggaggctgcagtagttcagtataatgatccatatgcagatggggatcctgcttgggcccccaagaattatattgagaaagttgttgcaatatatgattatacaaaagacaaggatgatgagctgtcatttatggagggtgcaatcatttatgttataaagaagaatgatgatggctggtatgaaggagtctgcaatcgagtgactggtctgttccctgggaactatgttgaatcaatcatgcactatactgattaatttttttttttcttttgaagtagattcttattactcagtcatactgtgggactattatggttaacagaactgtcttaatatgttttaaaatgtgcccatattttcagaacatgctgttttattggtaaattgaatgtctacctgtaagcataaatctttgaggcagtttatgtattgctgaatagcaatttatacaagaagctgtccataactgattatgcttatgtacttacttacacatttttaactttatgaccagcctaaatattctgggggaagtggggtataatatttaacgaatcatgattcagattgtaccattacatgtttcagtgcagcatggttactaacgctatgtcagactaatattaaaatcagaaaatttaaatgctggtgctggtcagactttttttgttagattctctcatttaaaaaaaatactgtttgtttaaagcatgcataaaaatttatgtattgaaatatacttaaaaattcaagatgcttcccatttgtgtaatatttacctggaggactcgtacttaggtgtcttaacgtgaattgagtctccaaggtctccatgtgaaacaagcaaaaagagaattatctgtaatgttgtaatttgtacctaagttttttaatgagtgaaatttgcattataaactttttccattcataaatacataagtgaaccaaaggtttttgtcctttccttcactgatttgctttaaaaaaaataaaagataatgatttattgcagaattatgattctattttctcaatatgttaacttggaaaaaaattttagccttatcttaatctgtcccaacagcaatgtgacggatttttgcagattcaaaatctgcaatggttatttacaagtcaatctactgaattccttttttaaataatcttttgaaactaagaaaatgtgtcaaattgtgtgcattcattctgtaggtaaaattcttaaggattgc

SEQ ID NO: 4500 - DNA, 1945 bp, Homo sapiens
agtcagtattgtatatgaattttctgccatgtggtagaaagagggtgcctgtctttgtactctgtgtgaacaggcacacctgtttacctgtcttggtttcaccggttttataggagttgcaacagaggatggcattttacacttacttttgtgcctttcctgttgtaattggtcctgtttgcctgagctgtttttgtgctactgttgtgtgtgaagatgtccgacacctaaacattttgcgggaagctttgcctgctttcctgagagtggtcctgtctagctcagctgtggctcccaagactccactttgcttctttctggtgggagcagccaggcacctggtttccctctcgaattcactttgagatgtgtgggctgtgctgtggccgcccctggcctggccgggcccgctgaccctctgcttctacctctgcccccaggcgcggggacctgccgtttgtcgtgccccgccgaatggcccggaaaggcgccggggatggctccgacgaagaggtagatggcaaagcggatggggctgaggccaaacctgccgaataagcctcttctcctgcagcctgagatggatggacagacagacaccacagcctccccttcccagaccccgcagcacgcctctccccaccttcttgggactgctgtgaacatgcctcctcctgccctccgccccgtccccccatcccgtttccctccaggtgttgttgagggcatttggcttcctctgctgcatccccttccagctccctcccctgctcagaatctgataccaaagagacagggcccgggcccaggcagagagcgaccagcaggctcctcagccctctcttgccaaaaagcacaagatgttgaggcgagcagggcaggcccccggggaggggccagagttttctatgaatctatttttcttcagactgaggccttttggtagtcggagcccccgcagtcgtcagcctccctgacgtctgccaccagcgcccccactcctcctcctttctttgctgtttgcaatcacacgtggtgacctcacacacctctgccccttgggcctcccactcccatggctctgggcggtccagaaggagcaggccctgggcctccacctctgtgcagggcacagaaggctggggtggggggaggagtggattcctccccaccctgtcccaggcagcgccactgtccgctgtctccctcctgattctaaaatgtctcaagtgcaatgccccctcccctcctttaccgaggacagcctgcctctgccacagcaaggctgtcggggtcaagctggaaaggccagcagccttccagtggcttctcccaacactcttggggaccaaatatatttaatggttaagggacttgtcccaagtctgacagccagagcgttagaggggccagcggccctcccaggcgatcttgtgtctactctaggactgggcccgagggtggtttacctgcaccgttgactcagtatagtttaaaaatctgccacctgcacaggtatttttgaaagcaaaataaggttttcttttttcccctttcttgtaataaatgataaaattccgagtctttctcactgcctttgtttagaagagagtagctcgtcctcactggtctacactggttgccgaatttacttgtattcctaactgttttgtatatgctgcattgagacttacggcaagaaggcattttttttttttaaaggaaacaaactctcaaatcatgaagtgatataaaagctgcatatgcctacaaagctctgaattcaggtcccagttgctgtcacaaaggagtgagtgaaactcccaccctacccccttttttatataataaaagtgccttagcatgtgttgcagctgtcaccactacagtaagctggtttacagatgttttccactgagcatcacaataaagagaaccatgtgct

SEQ ID NO: 4501 - DNA, 1124 bp, Homo sapiens
aacttctccagccggccggggcgagcgccagcgcggcgtccggggcgagtgacacgcagagctgaagccatggttcatcaggtgctctaccgggcgctggtctccaccaagtggctggcggagtccatcaggactggcaagctggggcccggcctgcgggtgctggacgcgtcctggtactcaccaggcacccgagaggcccgcaaggagtacctcgagcgccacgtacccggcgcctctttctttgacatagaagagtgccgggacacggcgtcgccctacgagatgatgctgcccagcgaggctggcttcgccgagtatgtgggccgcctgggcatcagcaaccacacgcacgtggtggtgtatgatggtgaacacctgggcagcttctatgctccccgggtctggtggatgttccgtgtgtttggccaccgcaccgtatcagtgctcaatggtggcttccggaactggctgaaggagggccacccggtgacatccgagccctcacgcccagaaccggccgtcttcaaagccacactggaccgctccctgctcaagacctacgagcaggtgctggagaaccttgaatctaagaggttccagctggtggattcaaggtctcaagggcggttcctgggcaccgagccggagccggatgcagtaggactggactcgggccatatccgtggtgccgtcaacatgcctttcatggacttcctgactgaggatggcttcgagaagggcccagaagagctccgtgctctgttccagaccaagaaggtggatctctcgcagcctctcattgccacgtgccgcaagggagtcaccgcctgccacgtggccttggctgcctacctctgcggcaagcctgatgtggccgtgtacgatggctcctggtccgagtggtttcgccgggcccccccagagagccgtgtgtcccagggaaagtctgagaaggcctgagccgtgacctcttctgcttactgtaactgcggccggtttagtgaccccatgacttacagccggttcttacctcttaggtgaaggagatgacatgtttttagaattgctgtgcaaggctcaccctctctctgtcaacactggaataaactttgccttttctg

SEQ ID NO: 4502 - DNA, 2093 bp, Homo sapiens
aaaaaacaatatcgtttgctgtcacttaaatatcatccagataaaggaggtgatgaggttatgttcatgaggatagcaaaagcttatgctgctttaacggatgaagagtcccggaaaaattgggaagaatttggaaatccagatgggcctcaagccacaagctttggaattgccctgccagcttggatagttgaccagaaaaactcaattctggttttacttgtatatggattggcatttatggttatccttccagttgttgtgggctcttggtggtatcgctcaatacgctatagtggagaccagattctaatacgcacaacacagatttatacatactttgtttataaaacccgaaatatggatatgaaacgtcttatcatggttttggctggagcttctgaatttgatcctcagtataataaagatgccacaagcagaccaacggataatattctaataccacagctaatcagagaaattggcagcattaatttaaagaagaatgagcctccacttacctgcccatatagcctgaaggccagagttcttttactgtctcatcttgctagaatgaaaattcctgagacccttgaagaagatcagcaattcatgctaaaaaagtgtcctgccctacttcaagaaatggttaatgtaatctgccaactaatagtaatggcccggaaccgtgaagaaagggagtttcgtgctccaactttggcatccctagaaaactgcatgaagctttctcagatggccgttcagggacttcagcaatttaagtctccccttctgcagctccctcatattgaagaggacaatcttagacgggtttctaatcataagaagtataaaattaaaactatccaggatttggtgagtttaaaagaatcagatcgtcacactctactgcacttccttgaagatgaaaaatatgaagaggttatggctgtccttgggagttttccatatgtgaccatggatataaaatcacaggtgttagatgatgaagatagcaacaacatcacagtaggatccttagttacagtgttggttaagttgacaaggcaaacaatggctgtaagtatttgaaaaggagcagtccatctgtgctgcagaggaacagccagcagaagatgggcagggtgaaactaacaagaacaggacaaaaggaggatggcaacagaagagtaaaggacccaagaaaactgctaaatcaaaaaaaaagaaacctttaaaaaaaaaacctacacctgtgctattaccacagtcaaagcaacagaaacaaaagcaggcaaatggagtcgttgggaatgaagctgcagtaaaggaagatgaagaagaagtttcagataagggcagtgattctgaagaagaagaaaccaatagagattcccaaagtgagaaagatgatggtagtgacagagactctgatagagagcaagatgaaaaacaaaacaaagatgatgaagcagagtggcaagaattacaacaaagcatacagcgaaaagagagagctctattggaaaccaaatcaaaaataacacatcctgtgtatagcctttactttcctgaggtagagctgaagtttcctgcaccaggcaagcctggaaattatcagtatactgtgtttctgagatcagactcctatatgggtttggatcagattaaaccattgaagttggaagttcatgaggctaagcctgtgccagaaaatcacccacagtgggatacagcaatagagggggatgaagaccaggaggacagtgagggctttgaagatagctttgaggaagaagaggaggaagaagaagatgatgactaagcagtactctgaatggaccacagtgtttgcacatatttgcaattttttgctgttttggaagtgtatcataaaccagaaacagtacagaactgatgttgagggaggtgtagtttttttactcttgaaatgggtgcataatataactaggcagtggcggtgccttggtacaacctgaaaaatgttaaggcttattgaaacctttcaagtaggggatggtacatttatttcatctgcaaatgataataaatcctttgttattataactgtc

SEQ ID NO: 4503 - DNA, 1065 bp, Homo sapiens
ggagggagcccgcggcggcggcagcagctacagcgaaatggcggagaccgtggctgacacccggcggctgatcaccaagccgcagaacctgaatgacgcctacggaccccccagcaacttcctcgagatcgatgtgagcaacccgcaaacggtgggggtcggccggggccgcttcaccacttacgaaatcagggtcaaggtcgtagttcccccgctccctgggaaagcgtttttgcgtcagcttccttttagaggagatgatggaatatttgatgacaattttattgaggaaagaaaacaagggctggagcagtttataaacaaggtcgctggtcatcctctggcacagaacgaacgttgtcttcacatgtttttacaagatgaaataatagataaaagctatactccatctaaaataagacatgcctgaaatttggcaagaaggggcaaaaacgtgactattaatgattgataagcaccagtgaagaagttctaacttttagcatgctgcacagaaactggtataacatgccttcagtatactaacactcatatgctcagttttgttttgttttggcagttgacaagaagttaatttgctttagtaaaaatccctcattccagcctttctatataaatagctctttcttgctgttttaatgtggtgcacactatagcctcacaaacctgttattccagtgtaatctgcagtgtcgtaactaaagttactggcttggtcttatttgcacagtttttgcgtcttgtttgcttcttgcatctgattaactagaatatttctctttcccccttttaatttgtgatgtcacttgaccccatttatgtgtaggagcactacaccattggtttccaatactgcacacataagatacatacttgtgtgcagaaagtatcttcctccaggcttgtaatacccttcacatggaagattaatgagggaaatctttatattctgtataaaaacaaaagcaaatttatatactaaaatcatttgtctaaaaatttaagttgttttcaaataaaaattaaaatgcatttctgatatgc

SEQ ID NO: 4504 - DNA, 2991 bp, Homo sapiens
ggattgaggggttgactgagcgttgcgagccttagctttctcccgaacgccagcgctgaggacacgatgtcgcggctctcccgctcactgctttgggccgccacctgcctgggcgtgctctgcgtgctgtccgcggacaagaacacgacccagcacccgaacgtgacgactttagcgcccatctccaacgtaacctcggcgccggtgacgtccctcccgctggtcaccactccggcaccagaaacctgtgaaggtcgaaacagctgcgtttcctgttttaatgttagcgttgttaatactacctgcttttggatagaatgtaaagatgagagctattgttcacataactcaacagttagtgattgtcaagtggggaacacgacagacttctgttccgtttccacggccactccagtgccaacagccaattctacagctaaacccacagttcagccctccccttctacaacttccaagacagttactacatcaggtacaacaaataacactgtgactccaacctcacaacctgtgcgaaagtctacctttgatgcagccagtttcattggaggaattgtcctggtcttgggtgtgcaggctgtaattttctttctttataaattctgcaaatctaaagaacgaaattaccacactctgtaaacagacccattgaattaataaggactggtgattcatttgtgtaactcactgaagccaaaatactatcttttaagatgtcccacatggaagacgctattccaggatctttaaatttccatggatgcatataggatgtttgggagcatcatccgtgaagaaaaaatcaattaaatcattgtgttcaacaggaatatttaaaatattctgcatgaatcctgtggctgtcttattttaaatagctgctgctgtgggattatattttttttccttaacatgccaaatataactttctgaaagtgatggaaaatgttgtcttgtgcagacaacatcatggctcttggcagtttaaatttagtaattttaatttagtgaacagaattgagaagaacgtgccaaatgagaatcaattaggtggatttttggctgtcatttcaaaagtggaataaatttattaatttagtagtactaaatggtatccttagattaaaattttgtgcttgataacagctgttttttctacattagaaataagatgccacacaaggaactacattccagatttaaagaaatgaaaggataccattagtgtgtataacagattattgttcatacttgtaaagcatcttatgtcattgagaatataaagaacagtgccttagaagacagtgaaaggtaagctctagcttaatgtctatgatttgttctttgacattaaggaaggtaaggattggtcagaggatgtaacttgatgtgagcagtagtaaacctgttttagatatcatactgttaatattttattgaaaatttatttcagagcggagaaacttaagctaaagtctgttatacagaattgaaagccttcgtatcttgaacctcccaacatttttcttatggctgttgaaaagtatagagctaaattgatttaattacactttcctttgtactttaaaaaaaagtatgctagcactattgtaccttgaaaggatttccaccagactgtcttgagtagtgacttctttggtgaggcaagaaggatatacattattttagaatcatttactatttaaatgagacaatcatattattttagaatcatttattttaaatgagacaatcattttaagttttaagataacagaagtgaccaatgtaatttcacaacacctaaggattttttggttgatcaggttactgtagatttttactgattgtcctggatgaatagactgtgctttttctttttctctcccttccttcttggtttcccatagtataataagcatgcatactttaacttctatagttttctcctttagagggtcgtcttcagttttagaggtttacttctcccttgcctttgactcattggactagtgcagaggctttaagtagtttaaaatgggcttttgcttttctaggtcattaacgttttttatttagtttctttagccaatagtggctgagtttcgcacttgattttcaatattttatagtaagaaatgacaaactgctttgtttcatttcataaacaaactctgcatttagataactattaaaggttgttaagatgaagatttactgtttctttgttactcgttggtacagctgtttgttttacttgcacatttgtacatatacttaatgttttcaagtgccttaattgtttaaaatctctggcttcaaagtttcttggggaaaggtcggtttacctcacattttttgtttccattagtaatattctaggtacctcacaaaatgtattatggtgccatggctgttagtttttagtgagtgctgtaggattaattcgaaaataggcagaattccattcctcccaaggtggcaaaaattagctatactgatgtaattgtcatttacctgggtatgaattccctgacacacattcatgtcaacatatgtagcaaattttgtgaaaacataacaatttgaagcttctgtaattttgagcactgctctaacaacaagcataatataaaattagttagattttgcaagtctacaaatgagctcttgcaacagaactcacagcctttttacttttttcccctaactttagcaatgtagtatcttgagccattaatttttgggtttttttaaaatccagaaggtatatagaaaccttttcagatttttcatctgatttgttcttgcagatgttcttctatcaaataccttattttaccttacagatatttgttgcacaggcagatactgctgtatttagacatttctatttcagttcattaaaaactgcaaaaccaatctgtatcatgtaccaaactgacttaaaataaatctacatgtttattg

SEQ ID NO: 4505 - DNA, 2968 bp, Homo sapiens
cggcgccgcaggggattgaggggttgactgagcgttgcgagccttagctttctcccgaacgccagcgctgaggacacgatgtcgcggctctcccgctcactgctttgggccgccacctgcctgggcgtgctctgcgtgctgtccgcggacaagaacacgacccagcacccgaacgtgacgactttagcgcccatctccaacgtaacctcggcgccggtgacgtccctcccgctggtcaccactccggcaccagaaacctgtgaaggtcgaaacagctgcgtttcctgttttaatgttagcgttgttaatactacctgcttttggatagaatgtaaagatgagagctattgttcacataactcaacagttagtgattgtcaagtggggaacacgacagacttctgttccgctaaacccacagttcagccctccccttctacaacttccaagacagttactacatcaggtacaacaaataacactgtgactccaacctcacaacctgtgcgaaagtctacctttgatgcagccagtttcattggaggaattgtcctggtcttgggtgtgcaggctgtaattttctttctttataaattctgcaaatctaaagaacgaaattaccacactctgtaaacagacccattgaattaataaggactggtgattcatttgtgtaactcactgaagccaaaatactatcttttaagatgtcccacatggaagacgctattccaggatctttaaatttccatggatgcatataggatgtttgggagcatcatccgtgaagaaaaaatcaattaaatcattgtgttcaacaggaatatttaaaatattctgcatgaatcctgtggctgtcttattttaaatagctgctgctgtgggattatattttttttccttaacatgccaaatataactttctgaaagtgatggaaaatgttgtcttgtgcagacaacatcatggctcttggcagtttaaatttagtaattttaatttagtgaacagaattgagaagaacgtgccaaatgagaatcaattaggtggatttttggctgtcatttcaaaagtggaataaatttattaatttagtagtactaaatggtatccttagattaaaattttgtgcttgataacagctgttttttctacattagaaataagatgccacacaaggaactacattccagatttaaagaaatgaaaggataccattagtgtgtataacagattattgttcatacttgtaaagcatcttatgtcattgagaatataaagaacagtgccttagaagacagtgaaaggtaagctctagcttaatgtctatgatttgttctttgacattaaggaaggtaaggattggtcagaggatgtaacttgatgtgagcagtagtaaacctgttttagatatcatactgttaatattttattgaaaatttatttcagagcggagaaacttaagctaaagtctgttatacagaattgaaagccttcgtatcttgaacctcccaacatttttcttatggctgttgaaaagtatagagctaaattgatttaattacactttcctttgtactttaaaaaaaagtatgctagcactattgtaccttgaaaggatttccaccagactgtcttgagtagtgacttctttggtgaggcaagaaggatatacattattttagaatcatttactatttaaatgagacaatcatattattttagaatcatttattttaaatgagacaatcattttaagttttaagataacagaagtgaccaatgtaatttcacaacacctaaggattttttggttgatcaggttactgtagatttttactgattgtcctggatgaatagactgtgctttttctttttctctcccttccttcttggtttcccatagtataataagcatgcatactttaacttctatagttttctcctttagagggtcgtcttcagttttagaggtttacttctcccttgcctttgactcattggactagtgcagaggctttaagtagtttaaaatgggcttttgcttttctaggtcattaacgttttttatttagtttctttagccaatagtggctgagtttcgcacttgattttcaatattttatagtaagaaatgacaaactgctttgtttcatttcataaacaaactctgcatttagataactattaaaggttgttaagatgaagatttactgtttctttgttactcgttggtacagctgtttgttttacttgcacatttgtacatatacttaatgttttcaagtgccttaattgtttaaaatctctggcttcaaagtttcttggggaaaggtcggtttacctcacattttttgtttccattagtaatattctaggtacctcacaaaatgtattatggtgccatggctgttagtttttagtgagtgctgtaggattaattcgaaaataggcagaattccattcctcccaaggtggcaaaaattagctatactgatgtaattgtcatttacctgggtatgaattccctgacacacattcatgtcaacatatgtagcaaattttgtgaaaacataacaatttgaagcttctgtaattttgagcactgctctaacaacaagcataatataaaattagttagattttgcaagtctacaaatgagctcttgcaacagaactcacagcctttttacttttttcccctaactttagcaatgtagtatcttgagccattaatttttgggtttttttaaaatccagaaggtatatagaaaccttttcagatttttcatctgatttgttcttgcagatgttcttctatcaaataccttattttaccttacagatatttgttgcacaggcagatactgctgtatttagacatttctatttcagttcattaaaaactgcaaaaccaatctgtatcatgtaccaaactgacttaaaataaatctacatgtttattgaatt

SEQ ID NO: 4506 - DNA, 2465 bp, Homo sapiens
ttgtctcgcgggagcgctgctggcggtcgggcgctcgggcggccctggccggggagacgagttgcatgtgttggttcagctggcgatagcggcgggagcggagccggcggggcctgtgcgaccgcctgggtttgtgaaatggctgctgacatttctgaatccagcggggctgactgcaaaggagacccaaggaacagtgccaagttagatgccgattacccacttcgagtcctttattgtggagtctgttcattaccaacagagtactgtgaatatatgcctgatgttgctaaatgtagacaatggttagagaagaattttccaaatgaatttgcaaaacttactgtagaaaattcacccaaacaagaagctggaattagtgagggtcaaggaacagcaggggaagaagaggagaagaaaaaacagaagagaggtggaaggggtcaaataaaacaaaaaaagaagaccgtaccacaaaaggttactatagccaaaattcccagagcaaagaagaaatatgtgacaagagtatgtggccttgcaacttttgaaattgatcttaaagaagcacaaagattttttgctcaaaaattctcctgtggtgcctcagtaacaggggaggatgaaattatcattcagggagattttacagatgacataattgatgtcattcaggaaaaatggccagaggtagatgatgacagcatcgaagatcttggagaagtaaagaagtgaatttgaaaatttgtctgtatttaatggcctgaactgagagttgatatggccaaagggagagaggccttttaaaatatatatatatatacacatatatatgtatatatatatatatatacacatatatatgtatatatacacatatatgtatgtatacacatacacacatgtatatatacatgtgtgtatgtatacatgtatatatatatacatacacatatatgtatacatatatacacatatatgtatacatatatacacatatgtatacatatatatatattctacagtaaaactgtagactgtcctcgtccttggcattttcactgttctgtacaaggctgcttgtttttttattgccaaagtcaaataaacgggagactgtcatgctcatgcatgaatagaatttagtcaaataaaaaattttggtcatttggtactgactttctctctctctctctctctcttttttttttttgacagagtctcgcactgttgcctgggctggaatgcagtggtgcgatctcggctcactgcaacctccgcctcccgggttcaagtgattctcctgcctcagcctcccaagtaggtgggattacaggcgcccgccaccacgcccagctaatttttgtatttttagtagagatggggtttcactatgttggccaggctggtctcgaactcctgacctcgtgattggcccacctcagcctcccaaagtgctggtattacagatgtgagccaccgcacccagcctgagtttctctttctctctttttaactttattttttgaaaaacccggtagactttttgtggggagcatttttgttgataattttactgatctaaagctgagtgattttttaaaagaatttgaatttggcttcctcaccagtaatatgtctccttgcttctttgatgtgatagttttgagatgggtgagaatctaatagatctgtggttgaatttgctgtgttgttatgaagtccaccctgtgggcacaataacataactgttggtaggagttgtttgagctattctggagattatttggtaaagtatactaaaagccttaaaaccatgtatgtgcgctgtttgaacccgtaagccacttctttgacattagaagacattagaagaaataatcagccttgcataaaacttatggatgaaagtattcatcacaatattatttataataaaaaattgcaaatgttataaatgaacaattgggaaatggttaaagaagtgatggtgcattgtgtggtagaatattatgcatatgtttaaagaatcatattttctaagattatttggaagcatgtttggtaatgtcaagtggagtaccccagatacattttagacatttatcgtcatcatctgctctgagtggaaggccgttcagagaggctagaggttcttattctggctataaattatgtgagtaaaattgtgctaaccagttaaaagtactgtacacccatgctcaatatatagtcctggaaatagcaattgaaacatgtcttctcacaagagaaaatgacagttttaatgatgtatttgatgaatttaaactttaagtcaggtgctgcaaattggaaagaagacttgtggtgttttaagttgctgtggacacttttaagaaacttagaacccatggaacccttgtttatcgccatgcaaattacaatcttgaatgagtgttttttaaaaataaagtattagaaaa

SEQ ID NO: 4507 - DNA, 1628 bp, Homo sapiens
  misc_feature (461)..(525): n is a, c, g, or t
actggacaaagaatggggtggaactgagtgccactcgtaagaatgccagcaacatggagtacaggatcaataagccgagagctgaggattcaggcgaataccactgcgtatatcactttgtcagcgctcctaaagcaaacgccaccattgaagtgaaagccgctcctgacatcactggccataaacggagtgagaacaagaatgaagggcaggatgccactatgtattgcaagtcagttggctacccccacccagactggatatggcgcaagaaggagaacgggatgcccatggacattgtcaatacctctggccgcttcttcatcatcaacaaggaaaattacactgagttgaacattgtgaacctgcagatcacggaagaccctggcgagtatgaatgtaatgccacctggccccactctggcctttcttgggaattctggctgaaattatcatccttnnnnnnnnnnnnnnnnnnnnnnnnnnnnnnnnnnnnnnnnnnnnnnnnnnnnnnnnnnnnnnnnngaaaaccaactctaccaacaatcacaaagataaaaacttgcgccagagaaacacaaattaagtactgcttacaatatctttaggttcctgaaactggtggcaacatgacctgctaaaattttctgcttggacctctttggttctctcccctttcaagtgagcaacaccacaatgactgtctaaagcatgccttatttagcctctcctgtaagggtgatctagccaggtacattttaaacaatgcttcagtgtagaaggtgtaaactattttgggcttgatgtgctgtgaatgttgcttttttttttcctttgttaaaatatttaaatagaagtgaaaaggtcctctgaggatcagatcatgcatgcgccattttttacttaatgcagctgttaaattggcaaagctctaaaatgcactgctgccatctagtgatacacttttgtaaagtacagcaaaacctacagatatatacagtatataaatatatatatatatatatttatatttttgggggtgggagaaatccaaaataaagtaaatgcttgtttcatttttaagctgctgatattcattccttattgtatgttgtcagatgaggaaattgtgcagttctggtacataaagatgagtaatataaactgaaatctataattttaagggcttaacctgtgactttaataagctggaacagtccactgaatgggtataatgaattgcagtatatacgtatgattgctttttaagtgattatcttttcttctgttaagtcatgtaaattcataaatccttttgcactgatgtgttgaaccttattcttgtacattcattcaatcaaggcaaacttttataatttttcttttgtttccaatgaccttgaaatgttatagcatggtaatattctatgcaactatagttatactttttggtttgacactgtattttttcacattgatttactggttgatgatagattttataacctaacggttctcatgcggtgcgtaattgtagatgcatgtacttgtgtgttttgtgtaattattgaagtgcaatgatgtataaaaaagtggattcacctgtttttaaaaataaaacattgata

SEQ ID NO: 4508 - DNA, 6252 bp, Homo sapiens
gggcttggcctctgtgttctccaaccgcacatcccggaagtcagccttacgtgcggggaacgacagtgccatggcagacggcgagggataccggaaccccacggaggtgcagatgagccagctggtgctgccctgccacaccaaccaacgtggtgagctgagcgtcgggcagctgctcaagtggattgacaccacggcttgcctgtccgcggagaggcacgctggctgcccctgtgtcacagcttccatggatgacatctattttgagcacaccattagtgttggacaagtggtgaatatcaaggccaaggtgaaccgggccttcaactccagcatggaggtgggcatccaggtggcctcggaggacctgtgctctgagaagcagtggaatgtgtgcaaggccttggcaccttcgtggccgccgagagatcaccaaggtgaagctgaagcagatcacgccgcggacagaagaggagaagatggagcacagtgtggcggctgagcgccggcgcatgccgttgtctatgcagacaccatcaaggacctcctggccaactgcgccattcaggacgatctggagagcagagactgtagccgcatggtgccggctgagaagacccgtgtggagagtgtggagctggtcctgcctccccacgccaatcaccagggcaacacctttgggggccagatcatggcctggatggagaatgtggccaccattgcagccagccggctctgccgtgcccaccctacgctgaaggccattgaaatgttccacttccgaggcccgtcccaggtcggcgaccgtctggtgctcaaagccatcgtgaacaatgccttcaaacatagcatggaggtgggcgtgtgcgtggaggcctatcgccaggaggctgagacccaccggcgccacatcaacagtgcctttatgacctttgtggtcctggacgcagatgaccagccccagttgctgccctggattcggccccagcccggcgatggtgagcggcggtaccgagaggccagtgccagaaagaagatccgcctggacaggaagtacatcgtgtcctgtaagcagacagaggtgcccctctccgtcccctgggaccctagcaaccaggtgtacctgagctacaataacgtctcctccttgaagatgcttgtggccaaggacaactgggtgctgtcctcggagatcagtcaggtccgcctgtacactctggaggatgacaagttcctctccttccacatggagatggtggtgcatgtggatgcagcccaggccttcctgctgctctcggacctgcgtcagaggccagagtgggacaagcactaccggagcgtggagctagtgcagcaggtagacgaggacgacgccatctaccacgtcaccagccctgccctcggaggtcacacaaagccccaggacttcgtgatcctggcctcgaggcggaagccttgtgacaatggggacccctatgtcatcgcgctgaggtcggtcacgctgcccacacaccgagagacgccagagtacagacgcggagagaccctctgctcaggcttctgcctctggcgcgagggggaccagctgaccaagtgctgctgggttagggtctccctgactgagctggtctcggcaagtggcttctattcctgggggctcgaatccaggtcaaagggtcgcaggagcgacggttggaatggaaaactagctggaggacacctgagtactcttaaagcaatccccgtggccaaaatcaacagccgatttggataccttcaagacacctgaaaccttatcatgagccagatgccaaggaagagactctgggaggatccagaggaccccctggttgcagccacgtagagactgacgctgaggaggactccaactatcatgagcaacacccgtcgaacacagccaccccgctaagaacagatcaagaagctgtcacagatggcggaagaaaacctgaggaaagcgggacaaccagtcacaatgaataatttaatggtagctatgatagcagttatcaccactgccgtgagtattccttcaataagggctggtaataatgcctggatgcaatcattctatgacacagttacacatgctttctgatctcagtatttaccataataaatcggctcctataattgaggcataccaccctcaaaaacctatttgtaaacaggattggacccagttagaaaaaatgaacgtacttatttaggaagattgctttgcagaataggcagagatgctgcacaacgattcctatggaatcattactaattggtcccccaaggggatgtttagcttgaattgcacctctcagtctgcatgccacggtcacactatgttcagatgatctgaacaaaacagtcagatggtagaaatgttaagtacggcaaaagttcctattatctggaaccatggcggtatagtggcacctcaacctcaaataatatggcccgctctaggagctaaacataaggatttgtaaaaactattaaatgctcttaataagatcaaaatttgggaaagaataaaagagtatctagaaggacactctacaaacttgtttttggatatagcaaaattaaaagaacaaatatgtaaagcatcccgggcaacctgaccttaatgccaggaaccagagtgcttaaaggagctgcagaaaaattagcagctagtaacccatttaaatgggtaaaaacacttggaagctctgtgatttcaatgatgactatgctttttaatctgttgtttgcctttgtatagtctgcagatgcggatcccgactcctgcgagagtctctttgcaaatcgaagaagggagacatgttgggagcaagccccccagagtctggccataaactggccccaaaactggccataagcaaaacctctgcagcactaaaacatgtccataatggccctaacgcccaatctggaaggttgtgggtttatgggaatgagagcaaggaacacctggcctgcccagggcggaaaaccgcttaaaggcattcttaagccacaaacaaaagcatgagcgatctgtgtcttacgggtgtgttcctgctgcaattaattcagcccatccctttgtttcccataagggatacttttagttaatttaatatctatagaaacaatgctaatgactggtttgctgttaaatgaaggggtgggttgcccctccacacctgtgggtgtttctcgttaggtggaacgagagacttggaaaagagacacagagacaaagtatagagaaagaaaagtgggcccaggggaccagcattcagcatacagaggatccacactggcaccggcctctgagttcccttagtatttattgatcattatcgagcatggcaggataataggataatagtggagagaaggtcagaaggtaaacacatgaacaaaggtctctgcatcataaacaaggtaaagaattaagtgctgtgctttagatatgtatacacataaacatctcaatgccttaaagagcagtattgctgcccgcatgtcatacctacagccctaaggcggttttcccctatctcagtagatggaagtatattccatgtaaagtaaatcggctttacacccagacattccattgcccagagacgagcaggagacagaagccttcctcttatctcaactgcaaagaggtgttccttcctcttttactaatcctcctcagcacagaccctttatgggtgtcgggctgggggatggtcaggtctttcccttcccacgaggccatatttcagactatcacatggggagaaaccttggacaatacctggctttcctaggcagaggtccctgcggcctttgcagtattttgcgtctctgggtacttgagattagggagtggtttgagattagggagtggtgatgactcttaaggagcatgctgccttcaagcatttgtttaacaaagcacatcttgcacagcccttaatccatttaaccctgagttgacacagcacatgtttcagggagcacagggttgggggtaaggttacagattaacggcatctcaaggcagaagaatttttcttaatacagaacaaaatggagtctcctatgtctacttctttctacacagacacagtaacaatctgatctctcttttccccacagttaataaatatgtgggtaaatctctgttgggggctctcagctctgaaggctgtgagacccctgattttctacttcacacctctatatttttgtgtgtgtgtctttaattcctctagcgctgctgagttagtgaccgagctggtctcggcagaggtgggcgggtcttttgagttcaggagttcaagagcagcctggccaacatggtgaaaccccttctctactaaaaatatgaaaattatccgggcatggtggtgtgcctctgtactttcagctactcaggaagctgaggcacaagaattgctggaacatgggaggtggaggctgcagtgagctgagatcatgccactgcactccagcccaggcaatagagtaagactctgtctcaaaacaaaaagagttttaggccaggtgtggtggctcacgcctgtaatcccagcactttgggaggctgaggtgggcagatcacctgaggtcaggagttcgagaccagtctggccaacatggcgaaaccccatctctctctactaaaaatacaaaatttagccaggtgtggtggtgggtgcctgtaatcacagctgcttgggaggctgaggcaggagaattggttgaacccaggaggcagaggttacagtgagcagagatcgtgccactgcattccagccggggtaagagagcgagactctgcctcaaaaaaagaaggcttagtgtgcaactcatcagagttgcacagggcagagaaagaatgggaaaaaaacaatttctagaaaacttttcgaattttctgatcaacaccaaatattccaaataggaaaaatacaaaaaaatccatacctatatgtggcataatatgattgtagagcaccaaagtaaaagatcttattttttattaaaattaaaaaaaaattaaaatagagggtctcactatgctgcccaggctggtcttgaactcctggcttcaagctatcctcccaccatggcatcctaaagtgctgggattgcaggcatgagctgctgcatctggcccaaagtaaaagatcttagaagcggccagaaaaaatagatttgggctgggcatgaatagattgatcaccaaaaaggtggcagactaacttctcgacagaatccacagaagccagaaggcagtggaacattagctttgatgtactaaaataaaataccacgctaggctcctacatacagtgaaaatgttttgagaatgagaattataattttttggcaaacaaaactaaaggagtttacaactaagaaactcttttgtgagacagccttgctctgttgcccaggctggagtgcagtgacgaaatctcagctcactgcaacctcggcctcccgggttcaggcaattcttgtgtctcagccttccaagtagctgggattacagatgtgcgccaccaggcccagctactttttatatttttagtggagatggggtttcactgtgttggccaggctggtctcaaactcctgacttcaagtgatctgcccgccttggcctgctaaagtgctgggattacaggcatgagcgactgtgcctctccagtccctgtgtttttttttgtttttggaggttttatttgtttgtttttagagacactttcactgtgttgcccaggcctgtctgttggcctcaagtgatcctcctgccttggatctcccaaagtgctgggattacaggtgtgaaccactgtgctcagcccattttttatttgtttcttgaaggaaggtagcagtattaattaattttggactttgctcactaaagtttgaatgttaagaatagatgtatacagtctggatgcagtggtgcatgcttgtaattttagcactttgggaggctgaagcgggaggatcgcttgggctcaagagtttgagaccagcctgggcaacatggtgaaaccttgtctctacaaaaaaattttaaaaaattagccagacatgatggcatgcacctataatcccagctacttgggaggctgaggtgggaggattgcttgagtccagggaggtcgaggctgcagtgagccatgatcacaccactgcactccagcctgggtgacagagtgatactgtctc

SEQ ID NO: 4509 - DNA, 3082 bp, Homo sapiens
atttggagtcaggcctggctgttgctcaggtgaccagcttgtgtctctgggagggcgctgctttccccggccacccggcgcgatgatccagaatgtcggaaatcacctgcgacggggcttggcctctgtgttctccaaccgcacatcccggaagtcagccttacgtgcggggaacgacagtgccatggcagacggcgagggataccggaaccccacggaggtgcagatgagccagctggtgctgccctgccacaccaaccaacgtggtgagctgagcgtcgggcagctgctcaagtggattgacaccacggcttgcctgtccgcggagaggcacgctggctgcccctgtgtcacagcttccatggatgacatctattttgagcacaccattagtgttggacaagtggtgaatatcaaggccaaggtgaaccgggccttcaactccagcatggaggtgggcatccaggtggcctcggaggacctgtgctctgagaagcagtggaatgtgtgcaaggccttggccaccttcgtggcccgccgagagatcaccaaggtgaagctgaagcagatcacgccgcggacagaagaggagaagatggagcacagtgtggcagctgagcgccggcgcatgcgccttgtctatgcagacaccatcaaggacctcctggccaactgcgccattcagggcgatctggagagcagagactgtagccgcatggtgccggctgagaagacccgtgtggagagtgtggagctggtcctgcctccccacgccaatcaccagggcaacacctttgggggccagatcatggcctggatggagaatgtggccaccattgcagccagccggctctgccgtgcccaccctacgctgaaggccattgaaatgttccacttccgaggcccgtcccaggtcggcgaccgtctggtgctcaaagccatcgtgaacaatgccttcaaacatagcatggaggtgggcgtgtgcgtggaggcctatcgccaggaggctgagacccaccggcgccacatcaacagtgcctttatgacctttgtggtcctggacgcagatgaccagccccagttgctgccctggattcggccccagcccggcgatggtgagcggcggtaccgagaggccagtgccagaaagaagatccgcctggacaggaagtacatcgtgtcctgtaagcagacagaggtgcccctctccgtcccctgggaccctagcaaccaggtgtacctgagctacaataacgtctcctccttgaagatgcttgtggccaaggacaactgggtgctgtcctcggagatcagtcaggtccgcctgtacactctggaggatgacaagttcctctccttccacatggagatggtggtgcatgtggatgcagcccaggccttcctgctgctctcggacctgcgtcagaggccagagtgggacaagcactaccggagcgtggagctagtgcagcaggtagacgaggacgacgccatctaccacgtcaccagccctgccctcggaggtcacacaaagccccaggacttcgtgatcctggcctcgaggcggaagccttgtgacaatggggacccctatgtcatcgcgctgaggtcggtcacgctgcccacacaccgagagacgccagagtacagacgcggagagaccctctgctcaggcttctgcctctggcgcgagggggaccagctgaccaaggtatcctactacaaccaggccaccccaggtgttctcaactatgtgaccaccaacgtggccggcctctcctctgagttctacaccaccttcaaggcttgtgagcagtttctcttggacaaccggaatgatctggcccccagcctccagaccctctagatgccctcagtggccacatcatgcccactcccactccatcctgtccccaaggacacacatacagtgcctggagaaagccaaagacctttatttcttcctgcctccccgtgggaagcctccgccctgaggtccgctggcccaccacccctgggtgctcagtttctaccaacatgagccagcaagtccttgtggtagccctggggtagcctgtagtagactcgggtcctgtccacagccctagctgccagcaatgctgtcctcacagaggcatagtcgcccccagctgggttgtgctccactgtgacggtggcccggggggaggatgccagcagcctgcctatggctccagctgtgctgtggcccagcagcatggcctgcatctggaaggacacaggttgccagagcccctggcacaactctagcatatctgtgagcagctgttccctgtagccactgcccagcacctcctcaggccagcctggtgccacagtcacgtgggggaagacctcagccacagctgtaagcagctctctgccagccacatggccggggaccgaaaaactcccgtgggagattttggccccaacccacacaggccaatgcaagaggccaaggctggagaggcgtgccagcaaggccagggatggccggagggctgcgggctccactatttgcaaatggatgccccagtgtccgggatgtgtggccagctgctgcaggcaggactccagcgtcaggatgttgccacttggagtatgaacaatgggcacggggttttcagccacagttccctcgaggccagtgttcagcaggatcatgccttctgtgtctggaagaggcggcagaggcaacagtgtttaggatttgggttatcataaggtgttaagagtcccttgttaaaggggcagtgggagttatggggtcatcaaggaccttgcctctctggaatctgtcaacccagttttgggctccaggtggatgggttgctttataaatgtgcctggtgcatgagaaactcttgtttcagctcttggcctttacccatgactcagcctgggggctggtgccggccttgcctgcagcaatgtagctgaggactggtctgaaggccaggagccctgtgctcttgacatcactgtactccctctccctccccgcaaccctgccccaccttgcatccagggtatggtgtaaataaacctgtgttgccatggc

SEQ ID NO: 4510 - DNA, 5618 bp, Homo sapiens
gttggctgatagttcaccttcaaatcttcaaattattataaaagaactgctttctatgcatcaccagcctgaccctgctcttaccaaggagtttgattaccttcccccagtggatagcaggtccagttcagggtttgtggggctgagaaatggtggtgcaacttgttatatgaatgcagtcttccagcagctgtatatgcaacctgggctccctgagtcattactttcagtggatgatgacacagacaatccagatgatagcgtgttttaccaagtgcagtctctctttggacatttaatggaaagcaagctgcagtactatgtacctgagaatttttggaagattttcaagatgtggaataaagaactttatgtgagagaacagcaggatgcatatgaattctttactagtctcattgatcagatggatgaatacctcaagaaaatggggagagaccaaatttttaagaatacatttcagggcatctactctgatcagaagatctgtaaagactgtcctcacagatatgagcgtgaagaagctttcatggctctcaatctaggagtgacttcttgtcagagtttggaaatttctttggaccaatttgttagaggagaagttctagaaggaagtaatgcgtactactgtgaaaagtgtaaagaaaagagaataacagtgaaaaggacctgtattaaatctttacctagcgtcttggtaattcacctaatgagatttgggtttgactgggaaagcggacgctccattaaatatgatgaacaaataaggtttccctggatgctaaacatggagccttacacagtttcaggaatggctcgccaagattcttcttctgaagttggggaaaatgggcgaagtgtggatcagggcggtggaggatccccacgaaaaaaggttgccctcacagaaaactatgaacttgtcggtgtcatcgtacacagtgggcaggcacacgcaggccactactattccttcattaaggacaggcgagggtgtggaaaaggaaagtggtataaatttaatgacacagttatagaagaatttgacctaaatgacgagaccctggagtatgaatgctttggaggagaatatagaccaaaagtttatgatcaaacaaacccatacactgatgtgcgccgaagatactggaatgcctatatgcttttctaccaaagggtgtctgatcagaactccccagtattaccaaagaaaagtcgagtcagcgttgtacggcaggaagctgaggatctctctctgtcagctccatcttcaccagaaatttcacctcagtcatcccctcggccccataggccgaacaatgaccggctgtctattcttaccaagctggttaaaaaaggcgagaagaaaggactgtttgtggagaaaatgcctgctcgaatataccagatggtgagagatgagaacctcaagtttatgaagaatagagatgtatccagtagtgattatttcagttttgttttgtctttagcttcattgaatgctactaaattaaagcatccatattatccttgcatggcaaaggtgagcttacagcttgctattcaattcctttttcaaacttatctacggacaaagaagaaactcagggttgatactgaagaatggattgctaccattgaagcattgctttcaaaaagttttgatgcttgtcagtggttagttgaatattttattagttctgaaggacgagaattgataaagattttcttactggagtgcaatgtgagagaagtacgagttgctgtggccaccattctggagaaaaccctagacagtgccttgttttatcaggataagttaaaaagccttcatcagttactggaggtactacttgctctgttggacaaagacgtcccagaaaattgtaaaaactgtgctcagtactttttcctgttcaacacttttgtacaaaagcaaggaattagggctggagatcttcttctgaggcattcagctctgcggcacatgatcagcttcctcctaggggccagtcggcaaaacaatcagatacgtcgatggagttcagcacaagcacgagaatttgggaatcttcacaatacagtggcgttacttgttttgcattcagatgtctcatcccaaaggaatgttgctcctggcatatttaagcaacgaccacccattagcattgctccctcaagccctctgttgcccctccatgaggaggtagaagccttgttgttcatgtctgaagggaaaccttacctgttagaggtaatgtttgctttgcgggagctgacaggctcgctcttggcacgcattgagatggtagtgtactgctgtttctgtaatgagcatttttccttcacaatgctgcatttcattaagaaccaactagaaacggctccacctcatgagttaaagaatacgttccaactacttcatgaaatattggttattgaagatcctatacaagcagagcgagtcaaatttgtgtttgagacagaaaatggattactagctttgatgcaccacagtaatcatgtggacagtagtcgctgctaccagtgtgtcaaatttcttgtcactcttgctcaaaagtgtcctgcagctaaggagtacttcaaggagaattcccaccactggagctgggctgtgcagtggctacagaagaagatgtcagaacattactggacaccacagagtaatgtctctaatgaaacatcaactggaaaaacctttcagcgaaccatttcagctcaggacacgttagcgtatgccacagctttgttgaatgaaaaagagcaatcaggaagcagtaatgggtcggagagtagtcctgccaatgagaacggagacaggcatctacagcagggttcagaatctcccatgatgattggtgagttgagaagtgaccttgatgatgttgatccctagaggaacatgcccagcctgagaggagtcaagacacaatactggatgctcagcaccttcttggaatcagaatctcgaaccctttggaagagcctggagattggactgggaaagctgctgtgacttgggcggatcgtgtatttctcaaggaaagcatttttaagccactagaaggtttgggagctgtttggcagtgggagaactccggcatgtggatcagctgtcccgggagcgtggtctatatgtggattcacatttctgtggagattttcggaaatagagccagtggcagacttttttgttacacgaacatacaagagtgagcataaagctgttgctttctctacgatgctacaaaagaaattcctttggtttttatattttaagaaaaagcaagctgcttttagatatgtgggggcaaatttttaatcttgcagtaatattaaacaggaatatccaatttaaaatgatgtaaagatgtaataaaattccttttcattgtaaaatagtaattaagtcaatttacacagacctttgtatttaatatgtctccctatttgtatagaatttcagatgggtctagatgagaaccctatgcataagcttggatcttgatgaaaggttaccaggatcaggatcaaaaattgggaaatactaagctcttgaagatatttttctgatataattagattgaaaagagcaattttgaaaatgctgtgttctccagaagtacagggtgcattatttgacatcaattacttaaagaagttatgagttgttccccaaacagattttaaaaacagcaaaataaaagcactttaagatataattttactgagtttaacttcacagaattatctttttaatgcttggagacatattgaataaactgtagtcttaaatcatgtgatctgcaatcgtttgcttttgcttaaaacataattactgaaacccttggtattggttgtatatgaagttaactatttgagttggtacacactgcttgtgagtttcatagttattgtaatgcagagaaggaatttgagaatttgtttctcctcaacatgactaattaacactgaaaagtcagtcaaggtttaagatttattttcccagaaataaatataaagcaattgaataaccatccatttagtcgtatttccaaagtatagcaccattcactcatttataccagctcccttttatggtgtgggggagaggtttacacccacatatttcatatatattttgtacattttgtattttgaattgctcacattttcggccctgttttgcctttagttacaggtcctgccttattttcatctcaccatgcacagaactagggagccttaggaagtgccaggttttcactgtcagatttgccaagtcacagaggcgcagccagccctgaagtgcctgtctggctgctgtggcattgtgtgggcatgtggccaggcagatggcatctcattactgtgctctcgccatggcccagtcttttcattctctggcagtgagggtttctgtgctgtcagacttcattgttattctgtgacttgctggaggttggcagtggcctttgtcaaacacactgagaagatggaagggccagcacttaagagcagaactgtacccttagagaaacggacagaggcgagtggcaaacttcagacggttccaatggtcttgcagtttgaaatgtgatgttctaccattggttttgagtacgtgaatacttcctgtcctactgtttcccctaccctattctcaccttctctccgcccacatcctcaccaagagattgtgtgggacatgaccttgaaatgctggcgatgatccacactgggatatcatcgctggcgactgcactctcaggagcccaaaatcaggagtgaaattgccacttctagtccccttatttcctatggaaacaacgccttccgcacccctagcacctgccgtcctcactgtaaaggttcatcaggatcgtccaccgtgtatattatacgcttcagatcatgttgcttatattgttgctgcaatgaccatcgttttcactttgctggtaaccacttgattgctgacagctacagtcaatgaacctgctgatgactttttttaatgtagtacaacagtgacagttatgacaggcttaccttggaagagttgtcatttttactgccaattttttggatgaagatgtttttataaacctttcaaaatggtctgcaaacagagcaggaattgcacaattaactcaataatgctgtgtgttctcaagaagctcccttagtgaggccgatcttaagatggccgattctgcccgttgaaggcatcctgggaaagaaaacaagcatcccagcgggcatctcaccacgacttctcctggagtcctcacacggtcactgacaactacagtcagttttaggaactagagtgccgtatcatcagacttaccctgtcctgccccaccttccctgctaacatcgaggtgtgtgcagttaccttctgagcttggaacaagcagactggaattttcctctgctacctcttgtgtataaaatcttgtttataaaatttcaaaaggaagtagatacactagggaagaaccttaattctaaatttggttcatgtgtggcaaagttcttagcttctaagagtataaaataaatttttcaaaaac

SEQ ID NO: 4511 - DNA, 3546 bp, Homo sapiens
gagccggccgcacgcggaggatcctaaggagcagctctgttgcgacataggccgagcagcgaggcccagctccctgaaacaacagtaacctacccctgtgggtcatcatcatgccctccgacctggccaagaagaaggcagccaaaaagaaggaggctgccaaagctcgacagcggcccagaaaaggacatgaagaaaatggagatgttgtcacagaaccacaggtggcagagaagaatgaggccaatggcagagagaccacagaagtagatttgctgaccaaggagctagaggactttgagatgaagaaagctgctgctcgagctgtcactggcgtcctggcctctcaccccaacagtactgatgttcacatcatcaacctctcacttacctttcatggtcaagagctgctcagtgacaccaaactggaattaaactcaggccgtcgttatggcctcattggtttaaatggaattggaaagtccatgctgctctctgctattgggaagcgtgaagtgcccatccctgagcacatcgacatctaccatctgactcgagagatgccccctagtgacaagacacccttgcattgtgtgatggaagtcgacacagagcgggccatgctggagaaagaggcagagcggctggctcatgaggatgcggagtgtgagaagctcatggagctctacgagcgcctggaggagctggatgccgacaaggcagagatgagggcctcgcggatcttgcatggactgggtttcacacctgccatgcagcgcaagaagctaaaagacttcagtgggggctggaggatgagggttgcccttgccagagccctctttattcggcccttcatgctgctcctggatgagcctaccaaccacctggacctagatgcttgcgtgtggttggaagaagaactaaaaacttttaagcgcatcttggtcctcgtctcccattcccaggattttctgaatggtgtctgtaccaatatcattcacatgcacaacaagaaactgaagtattatacgggtaattatgatcagtacgtgaagacgcggctagagctggaggagaaccagatgaagaggtttcactgggagcaagatcagattgcacacatgaagaactacattgcgaggtttggtcatggcagtgccaagctggcccggcaggcccagagcaaggagaagacgctacagaaaatgatggcatcaggactgacagagagggtcgtgagcgataagacactgtcattttatttcccaccatgtggcaagatccctccacctgtcattatggtgcaaaatgtgagcttcaagtatacaaaagatgggccttgcatctacaataatctagaatttggaattgaccttgacacacgagtggctctggtagggcccaatggagcagggaagtcaactcttctgaagctgctaactggagagctactacccacagatggcatgatccgaaaacactctcatgtcaagatagggcgttaccatcagcatttacaagagcagctggacttagatctctcacctttggagtacatgatgaagtgctacccagagatcaaggagaaggaagaaatgaggaagatcattgggcgatacggtctcactgggaaacaacaggtgagcccaatccggaacttgtcagacgggcagaagtgccgagtgtgtctggcctggctggcctggcagaacccccacatgctcttcctggatgaacccaccaatcacctggatatcgagaccatcgacgccctggcagatgccatcaatgagtttgagggtggtatgatgctggtcagccatgacttcagactcattcagcaggttgcacaggaaatttgggtctgtgagaagcagacaatcaccaagtggcctggagacatcctggcttacaaggagcacctcaagtccaagctggtggatgaggagccccagctcaccaagaggacccacaacgtgtgagccctctacctgggttcgggtcaggagctccatctgggaactaacagctgctaacctgaccagccgctcaggacaggaccctggggctacactcctgcattgctgcaatactgctcccccagcctctcccctgcccctcaacctgccttagctgcactctcttacctacagctggacagtacctgtctgtttcctgtcctccttccagttacatctgtccatgtctggactcggctggccgttccctccagccccttgctggttatcttactctgagtgtgatgcagtcagaggcacctgcgggttagcccaggggcccaagccctggatttggcctgcggaggagcttaggatcctcgttttctgggttttggtgatgttggaggagtaccccccagcccaccgccccgattcctttttgcttctggtttggagctccggaccaggaccttcgtcctggtcagtttttaaataattatttagcagtgtaacttttagacctgcgtgacatctacaaagcgcccaataaagaaagaggaagccacggtccctaccttccttctcgggtctctggggccttctcctccctgcagtgccaacatgcactgcccacagcaggagctggatccagcgtcagtgtgtcgatgggaactgaagactagtccataggagctggaagaactttgtccctttacttctgatttgaaattgtaccttttctcaggcctgtgattcacagactttaacatgaatcagaatcacctggagggctcatgcaatcagattgccagatctcgcctcagcgtttctggttcaataggttttgggggagaccaagaacgttaacatttctagcaagtttccaggtgatgctgttgttgctggtctagagactattttgagaaccactgtccaggagcgtggttttctgattgtgatctgaggttctgccccaactgcacagcagttgggctgcttgttaaaaatgcaggccaggtgcggtggctcacacctgtaatcccagcgctttgggaggctgaggcaggtggatcacttgagctcaggagttcaagaccagcttgggaaacatggcaaaacccgtctttatgtgcctggaatcccacctgctcaggtggctagggtggatggatcgcttgagcccaggaggtggaggttgcagtgagctgagattgcaccactgcattccagcctggatgacagagcaaaaccctgtctcaaaaaaatgcagactggccaggcacagtggctcacacctgtaatccgactgtaagctcatcaccttgggaggccactgtaggaggatcaattgagcctagaagttcaagaccagcctgggcaaagtagggagaccccttctctacaaatagtaataaaatgaaccgggcatagtagcatgtgcctgcggtcccagctgctctgataagaggaggctcacttgagcccaggaggttgaggctgcagtgagcagagcgtgccgctacactccagcctgatgacagaccgagacactgtctcaaaaaaataaaaaaattcagattgctga

SEQ ID NO: 4512 - DNA, 2987 bp, Homo sapiens
attgcctgaagaagtttggaggctgagagcagcagtagactggccaactgcagagcaagttgtttctccagccgtgcggtgcagcctcatgcccccaacccagcttagccactgtaagaagacgttcactgtacagacgaccaaacttgccgtggaagagacagttgtgagattcccttgcaaatttacatacgagaatggcttgtgaaatcatgcctctgcaaagttcacaggaagatgaaagacctctgtcacctttctatttgagtgctcatgtaccccaagtcagcaatgtgtctgcaaccggagaactcttagaaagaaccatccgatcagctgtagaacaacatctttttgatgttaataactctggaggtcaaagttcagaggactcagaatctggaacactatcagcatcttctgccacatctgccagacagcgccgccgccagtccaaggagcaggatgaagttcgacatgggagagacaagggacttatcaacaaagaaaatactccttctgggttcaaccaccttgatgattgtattttgaatactcaggaagtcgaaaaggtacacaaaaatacttttggttgtgctggagaaaggagcaagcctaaacgtcagaaatccagtactaaactttctgagcttcatgacaatcaggacggtcttgtgaatatggaaagtctcaattccacacgatctcatgagagaactggacctgatgattttgaatggatgtctgatgaaaggaaaggaaatgaaaaagatggtggacacactcagcattttgagagccccacaatgaagatccaggagcatcccagcctatctgacaccaaacagcagagatatcaagatgccggtgcccaggaggagagctgtgtctccgaagtgccccagtcggacctgactgcattgtgtgatgaaaagaactggaaagagcctatccctgctttctcctcctggcagcgggagaacagtgactctgatgaagcccacctctcgccgcaggctgggcgcctgatccgtcagctgctggacgaagacagcgaccccatgctctctcctcggttctacgcttatgggcagagcaggcaatacctggatgacacagaagtgcctccttccccaccaaactcccattctttcatgaggcggcgaagctcctctctggggtcctatgatgatgagcaagaggacctgacacctgcccagctcacacgaaggattcagagccttaaaaagaagatccggaagtttgaagatagattcgaagaagagaagaagtacagaccttcccacagtgacaaagcagccaatccggaggttctgaaatggacaaatgaccttgccaaattccggagacaacttaaagaatcaaaactaaagatatctgaagaggacctaactcccaggatgcggcagcgaagcaacacactccccaagagttttggttcccaacttgagaaagaagatgagaagaagcaagagctggtggataaagcaataaagcccagtgttgaagccacattggaatctattcagaggaagctccaggagaagcgagcggaaagcagccgccctgaggacattaaggatatgaccaaagaccagattgctaatgagaaagtggctctgcagaaagctctgttatattatgaaagcattcatggacggccggtaacaaagaacgaacggcaggtgatgaagccactatacgacaggtaccggctggtcaaacagatcctctcccgagctaacaccatacccatcattggttccccctccagcaagcggagaagccctttgctgcagccaattatcgagggcgaaactgcttccttcttcaaggagataaaggaagaagaggaggggtcagaagacgatagcaatgtgaagccagacttcatggtcactctgaaaaccgatttcagtgcacgatgctttctggaccaattcgaagatgacgctgatggatttatttccccaatggatgataaaataccatcaaaatgcagccaggacacagggctttcaaatctccatgctgcctcaatacctgaactcctggaacacctccaggaaatgagagaagaaaagaaaaggattcgaaagaaacttcgggattttgaagacaactttttcagacagaatggaagaaatgtccagaaggaagaccgcactcctatggctgaagaatacagtgaatataagcacataaaggcgaaactgaggctcctggaggtgctcatcagcaagagagacactgattccaagtccatgtgaggggcatggccaagcacagggggccggcagctgcggtgagagtttactgtccccagagaaagtgcagctctggaaggcagccttggggctggccctgcaaagcatgcagcccttctgcctctagaccatttggcatcggctcctgtttccattgcctgccttagaaactggctggtccaatgggatttacagcaacattttccattgctgaagtgaggtagcagctctcttctgtcagctgaatgttaaggatggggaaaaagaatgcctttaagtttgctcttaatcgtatggaagcttgagctatgtgttggaagtgccctggttttaatccatacacaaagacggtacataatcctacaggtttaaatgtacataaaaatatagtttggaattctttgctctactgtttacattgcagattgctataatttcaaggagtgagattataaataaaatgatgcactttaggatgtttcctatttttgaaatctgaacatgaatcattcacatgaccaaaaattgtttttttaaaaatacatgtctagtctgtcctttaatagctctcttaaataagctatgatattaatcagatcattaccagttagcttttaaagcacatttgtttaagactatgtttttggaaaaatacgctacagaatttttttttaagctacaaataaatgagatgctact

SEQ ID NO: 4513 - DNA, 4331 bp, Homo sapiens
  misc_feature (2971)..(2971): n is a, c, g, or t
cccaggatggcggcccaggtgactctggaggacgcgctgtccaacgtggacctcctggaggagctgcccctgcccgaccagcagccctgcatcgagcccccgccatcctcgctgctctaccagccaaatttcaacactaactttgaagacagaaatgcatttgttactggcatcgcaagatacattgaacaagccaccgtccactctagcatgaacgagatgctggaggagggccaagaatatgctgtcatgctgtacacctggaggagctgctcccgggccatcccacaggtgaaatgtaacgagcagcctaacagagtggaaatctacgagaaaaccgtggaggttctggagcctgaggtcacaaaactgatgaatttcatgtacttccagagaaatgccattgagcgtttctgcggggaagtgaggcgcctgtgccatgccgagaggaggaaggacttcgtgtcagaagcctacctgatcacactgggcaaattcatcaacatgttcgctgtgctggacgagctgaagaacatgaagtgcagtgtgaagaacgaccactcagcgtacaagagggccgctcagtttttacgtaaaatggcagatccacagtccatccaggaatcgcagaatctgtccatgttcctggccaatcataacaagatcacacagtctctgcagcagcagctcgaagtgatttctggctacgaagagctcctggcagatattgtgaatctgtgtgtggattactacgagaacaggatgtatttgacgcccagtgagaaacacatgcttctcaaagtcatgggatttggtctgtacctgatggatgggagtgtcagtaacatctataagttggatgccaagaaaagaataaacttatccaaaatcgacaagtacttcaagcaactccaggtggttccgctatttggggacatgcaaatagaactggcaagatatatcaagaccagcgcccactacgaggaaaataaatctcgatggacgtgcacatcctccggcagcagccctcagtacaacatctgcgagcagatgatccagatccgcgaggaccacatgcgcttcatttcggagctggcgcgctacagcaacagcgaggtggtcacgggctcgggccgccaggaggcccagaagacggacgcggagtaccgcaagctcttcgacctggcgctgcagggcctgcagctgttgtcgcagtggagcgcgcacgtgatggaagtgtattcctggaagcttgtgcaccccaccgacaagtactccaacaaggactgccccgacagcgctgaagagtacgagcgtgccacgcgctacaactacaccagcgaggagaagtttgccctagtggaggtgatcgccatgatcaaaggcctgcaggtgctgatgggcaggatggagagcgtgttcaaccacgccatccggcacaccgtctatgccgcactgcaggacttctcccaggtgacccttagggagccgctgcggcaggccatcaagaagaagaagaacgtcatccagagtgtcctgcaggccatcaggaagaccgtgtgtgactgggagacggggcatgagcccttcaatgacccagccttgcggggcgagaaggaccccaagagcggcttcgacataaaagtaccacgccgcgccgtgggaccctccagcactcagctttacatggtgagaaccatgctagagtccctcattgcagacaaaagtggttccaagaaaaccttgagaagtagccttgaggggcccaccatattggacatagaaaaatttcatcgagagtcattcttctacactcacttgataaatttcagtgaaacgctgcagcagtgctgtgacctttcgcagctgtggttccgagagttcttcctggagctgaccatgggcaggaggatccagttccccattgagatgtcgatgccctggatcctgacggaccacatcctggagaccaaggaggcatcgatgatggagtacgtgctctactccctggacctgtacaatgacagcgcccactacgcgctcaccaggttcaacaagcagttcctgtacgacgaaattgaggccgaggtgaatctatgttttgaccaatttgtttacaagctagcagaccagatatttgcctattataaggttatggcaggaagtttgcttcttgataaacggttacgatcagaatgcaagaatcagggagccacgatccacctcccgccgtctaaccgctacgagacgctgctgaagcagaggcatgtgcagctcctcggcagatcaatagacctcaatcgtctgatcacccagcgcgtctcagcagccatgtataagtccctagaactggcgattggacgatttgaaagtgaagatttgacctccatagttgagctggatggcctgttggaaatcaaccgcatgacccacaagctgctgagccggtacctgacgctggacggcttcgacgccatgttccgggaggccaaccacaacgtgtcagcgccctacgggaggatcaccctgcacgtcttctgggagctcaactatgacttcctgcccaactactgctacaacggctctaccaaccggtttgttcggacagtgttaccattttctcaggaatttcaaagagataagcagcctaatgcacagcctcagtatctgcatggatccaaggctttgaacttggcctactccagcatttacggcagctaccggaacttcgtgggacctccacactttcaagtcatctgccggcttctcggctaccagggtatcgccgtggtcatggaggagctgctgaaggtcgtcaagagcctgctgcaaggcacaatcctgcagtacgtgaagacgctgatggaggtgatgcccaagatctgccgcctgccccggcacgagtacggctctcctggtatcctggagttcttccaccaccagctgaaggacatcgtggagtacgcagagnctgaagacggtgtgcttccagaacctgcgggaggtggggaacgccatcctcttctgcctgctcatcgagcagagcctgtctttagaagaagtgtgtgacctgctgcacgcggctcctttccagaacatcttgccgcgagtccatgtgaaagagggggagagacttgatgccaaaatgaaaagactagaatcaaagtacgccccgctgcatcttgtcccactgattgaaagactggggacccctcagcaaattgccatcgcaagagagggggacctgctgacaaaggagcgcctctgctgcggcctgtccatgtttgaggtcatcctgacacggatccggagctttctggatgaccccatctggcgcgggcctctgcccagcaatggggtcatgcatgtggacgagtgtgtggagtttcacagactgtggagtgccatgcagtttgtctactgcattcccgtggggacacacgagttcacagtcgagcagtgctttggtgatgggctacactgggctggctgtatgatcatcgtacttcttgggcagcagcggcgttttgctgtgctggatttctgctaccatctacttaaagtccagaaacatgatggcaaagatgagattattaaaaatgtgcctttgaagaagatggtggagagaattcgcaagttccagattctcaatgatgagatcatcaccatcctggataagtacctgaagtcaggcgacggggagggcacgccagtggagcatgtgcgctgcttccagccgcccatccaccagtccctcgccagcagctgagggcacgcgctgcactccgtaactcaacatggcatgcctttctctccgtaaactatttagtgagatttttagggactatttttcagtatctctgtacctgttaaagggggtgcttttcgatctaaaaacttaattttataaaattgacttatttttctagactaaaattgtatatgcttttggtaattaggaactcttgagaatattggctgctgattgttgccatcacgttcctacaaaattgtttttctatgggatgttctggcagctgtgtcataaaatgctgctgggttcattcattcattccataagaaacttaataccagcaaatgcattaaatcccttgccagttaccattaactgtaactatttagcttttgtttagggatctttctgatggtcttttatgagcaatcttagttctaagtcattgttcccatcccttttttgtgtgtttcagaaaatagtgaacttgattcccctgcttccactaaatccagttgtgacaaaatctaacgtgacatcagatcgaaaggttatagaaataaaactaatgagatct

SEQ ID NO: 4514 - DNA, 1380 bp, Homo sapiens
cgtgcgcagatcagggatcgcgattgcgaatcctccgctgaggtgatttggatatccctagaacgttgagggcacgagtcgggtcctgagaccaggtcctcagccagcagagccacgttccttatgagcaccgtgggtttatttcattttcctacaccactgacccgaatatgcccggcgccatggggactccggctttgggagaagctgacgttgttatccccaggaatagctgtcactccggtccagatggcaggcaagaaggactaccctgcactgctttccttggatgagaatgaactcgaagagcagtttgtgaaaggacacggtccagggggccaggcaaccaacaaaaccagcaactgcgtggtgctgaagcacatcccctcaggcatcgttgtaaagtgccatcagacaagatcagttgatcagaacagaaagctagctcggaaaatcctacaagagaaagtagatgttttctacaatggtgaaaacagtcctgttcacaaagaaaaacgagaagcggcgaagaaaaaacaagaaaggaaaaaaagagcaaaggaaaccctggaaaaaaagaagctacttaaagaactgtgggagtcaagtaaaaaggtccactgagaaaagaattagagattccaactgacagaatctgccagaagctcccagggaataatggtggcgagttccatcaccagcattattatagtgcttcaaaagaaatatttttgatgaacttaaaagacaacaaatttatttaaatggtgcactaaactgtagtgaacagagacatgcacgattcaagaataaaactcggctgggcacggtggacggtgcctcacatctgtaatcccagcactttgggaggccgaggcgggcggatcacttgaggtcaggagtttgagaccagcctggccaacatggtgaaaccccgtctctactaaaaatacaaaaaataaaactagttcaagtgcaatgacacacgcctataatcccagcaccttgggaggctaagacaggaagatcacctgagcccaggagctcaagattgcagtgagctatgaacaccactgcactccacctgtccacttgttcttgtgtgacagaacaagaccctgtctctaaaaaataagataaaaccataaagaaacacagtcagtactatacaagaataatggctacttctagagggaaggagttgtcattgtgatgaggcacttggaggggttctggggtgcctgacaaagttctgtttcttcacctgggtggtagttagaagggtgtccccgtatttcaaattgtacctttgtgagattgtatgttttgtaataataaaattttttttgtaattagtaaagtcaatttttatggagaact

SEQ ID NO: 4515 - DNA, 1594 bp, Homo sapiens
gattgcgaatcctccgctgaggtgatttggatatccctagaacgttgagggcacgagtcgggtcctgagaccaggtcctcagccagcagagccacgttccttatgagcaccgtgggtttatttcattttcctacaccactgacccgaatatgcccggcgccatggggactccggctttgggagaagctgacgttgttatccccaggaatagctgtcactccggtccagatggcaggcaagaaggactaccctgcactgctttccttggatgagaatgaactcgaagagcagtttgtgaaaggacacggtccagggggccaggcaaccaacaaaaccagcaactgcgtggtgctgaagcacatcccctcaggcatcgttgtaaaggtagatcacagaaggccgctgaggggagaggccccgcccaagggttccacagcctccagagatttctcccaagtgtgaatgggatcagccgaagtgcattatttttctggcttgggccaccctctaccagccaggcagtagagagcaccgcagatctcgtcccatccctgagccattcctccctaaggcagaacctcctacaacagcctgggaagcctgtttccaggatcttttggagccagggtatggctgccatccttgaatttggcagacagcactggtgcttggctgctgccccggaagcaacgtcttgacaaagctaagcagtggctgataaaggcaggcgcccgggcagcatggttctttcaaatccgttcccactgcaggaaggctgccgagatccccagcattgctatgggatccaagtccctgaggaggcggcaagcaggcatgggttgtctgctggcagtcccagcccttaactgtcatggctggttaacattagggtggccacatcctccacgcctctctgtcccctttggtaaatgtcggtgatacctcctcttctggacagagaggactgagggcgagatcatggaggatcatggaggccaggcattttccaacctcagaagaaaaaatgctgtgcacagctgcctataggagtcttcctttttacataaaaaaacaagtctcgggccaggcacagtggctcatgcctgtaatcccagcactttgggaggccgaggtgggtggatcacctgaggtcaggagttcgagaccagtctggtcaacatggcaaaaccccatctctactgaaaatacaaaaattagccgggtgtggtggcgcgtgcctgtaatcccagttactcggaggctaaggcaggagaatcgcttgaaccctggaggcagacattgcagtgagccgagatcatgctactgcataccagcctgggcaacagacaagattccctcttaaaaaaaaaaaaaagaaggttggtcagaggggctcccagtccatctgcctcagggatcacgagagagtcctggaagcagcacagaagagagatagccaagtgccatcagacaagatcagttgatcagaacagaaagctagctcggaaaatcctacaagagaaagtagatgttttctacaatggtgaaaacagtcctgttcacaaagaaaaacgagaagcggcgaagaaaaaac

SEQ ID NO: 4516 - DNA, 3939 bp, Homo sapiens
actcgcgcagcgcgggcctccgccggccgcattgtccgcccgcccgccttgtcccgcgtcgccgctcttcgcgtgcccgcgcgccccgggcccggccgctgtgtcgccctgagcggagcgccgcccgcgggatccccacgcggaaagggggcgcgccccggcggcggcctggcctcggacgcccccggccgggctagaagccgccgcggcagcagattctcttcaggggaagagtccacatcccacctcatcatgtcccgaagaagccagcgcctcacgcgctactcccagggtgacgatgacggcagcagcagcagcggagggagctcggtggctgggagtcagagcaccctgtttaaagacagtcctctcaggaccttgaagaggaaatccagcaacatgaagcgcctgtccccagcgccacagctgggcccgtcctctgatgcacacacctcctactacagtgagtcgctggtccacgagtcctggttcccacccaggagctccctggaggaactgcatggtgacgccaactggggtgaggacctgcgggtgcggaggaggagaggcacgggtggctcagagagcagcagggccagcgggcttgtggggcgcaaggccaccgaggacttcctgggctcttcctcgggctactcctctgaggacgactacgtgggctactcggatgtggaccagcagagttccagctcgcggctccgaagcgccgtctcacgggcgggctccttactctggatggtggccacttcgccaggccggctcttcagacttctctactggtgggctggcaccacctggtaccgcctgaccacagctgcctccctccttgacgtcttcgttttaaccaggcgcttctcgtccctgaagacgttcctctggttcctgctgccgctgctcttgctgacgtgcctgacgtatggtgcttggtatttctacccctatgggctgcagacattccaccctgctttggtttcctggtgggcagcgaaggacagcaggaggccggatgagggctgggaagccagagactcatcgccacatttccaggctgagcagcgtgttatgtcccgggtacactctctggagcggcgtctggaagctcttgctgctgaattttcctccaactggcagaaggaggccatgcggctggaacgtctggagctgcggcaaggggctcctggccagggaggtggtggtggcctgagccacgaggacaccctggcgctgctggaggggctagtgagccgccgtgaagctgccctgaaggaggatttccgcagggaaactgctgctcgcatccaggaagaactgtctgccctgagagcagagcatcagcaagactcagaagacctcttcaagaagatcgtccgggcctcccaggagtccgaggctcgcatccagcagctgaagtcagagtggcaaagcatgacccaggagtccttccaggagagctctgtgaaggagctgaggcggctggaggaccagctggccggcctgcagcaggagctggcggctctggcactgaagcagagctcggtggcggaagaagtgggcctgctgccccagcagatccaggccgtgcgggacgacgtggaatctcagttcccggcctggatcagtcagttccttgcccgaggtggagggggccgcgtggggctccttcagagagaggagatgcaagctcagctgcgagagctggagagcaagatcctcacccatgtggcagagatgcagggcaagtcggccagggaagccgcggcctccctgagcctgacgctgcagaaagaaggtgtgattggagtgacagaggagcaggtgcaccacatcgtgaagcaggccctgcagcgctacagtgaggaccgcatcgggctggcagactacgccctggagtcaggaggggccagcgtcatcagcacccgatgttctgagacctacgagaccaagacggccctcctcagcctcttcggcatccccctgtggtaccactcccagtcaccccgagtcatcctccagccagatgtgcacccaggcaactgctgggccttccaggggccacaaggcttcgccgtggtccgcctctctgcccgcatccgccccacagccgttaccttagagcatgtgcccaaggccttgtcacccaacagcactatctccagtgcccccaaggacttcgccatctttgggtttgacgaagacctgcagcaggaggggacactccttggcaagttcacttacgatcaggacggcgagcctattcagacgtttcactttcaggcccctacgatggccacgtaccaggtggtggagctgcggatcctgactaactggggccaccccgagtacacctgcatctaccgcttcagagtgcatggggagcccgcccactagccctgcttactggtgcctgctgccagccatctgggagtgggtgaacagcaccccgccgcttcccccacacgcttgctcggcgctctgacttctaggagcacaagagaggagcctgtggccccatgcagatgaaaaggacgggcagggtctcctgagcagcaggtggctcgaggcggttagcaggctccagcagctcccttcttccttccctctgtgcccgtggcgtctgcttcccatcctgggagtgtgtatatatgtagcatatcatgggggactgggaagttgggagaggtaggacctgactggtcttggctggggtcaggggctggtgcctgggagctgatgaagcaggtgccagggctgtgggaggggcaagctacggcctgggctaggtgagctgcctctgcccctgggcaaggaagcgaggccctctgggaggagggtgcttagctccagagcaggatgggacttccccaggcaggaagcacttgatggagagctgcccagctctcctacaaggttagtgccctccacctagggaagcatgaaccacagggtccctgagggccttcgacaaaagtgtgtatttgtcccggggagggtagcagtgggccatggggcttcttgtgccctaaaggggactggctgctgtgatcttctaaggggcccagggccaaccctgtaggcttcccctctgctggggacggtagttgcttttctctctcctgatgctaggttggggcccaccctgctccctgttcctgctagggcctgccagtgcccctgagcttgctttccacattctcccagggtatggagacctagacctgtctttggggccattagcatctggggttatagcaagaagagtggggagcatggaactcctgggctcttgtggggacgttcagggtatcggggtgcgaggtctgtctgcaccggcccccacatctaaccaggccctgatgtaggggtcgtccgctcaggctgcccccttgggctcttgcagctcttgttcaggtagtcgcccttctggtttgttctctgtggggcagttggtgggggctgggggaagaggctggcagaagttaccctggatagggaagggggaggaggggacttttagagccagcaggccccactgtattatgtatatatttttcaaggtctgtttttctaactgaaaagctaagggcttgattcctagccccgttctgtggggcactgggtgatactcagtttcttgttcctggccgtggagaggggcctggggcactggttccggctgtgtctggtggtctggctgcggggaaggggcaagaaggcgggcaggccttcactgcagcactgagcctcaaatccgctctggagcatgaggctggatgcagtggtggtgaggccgccccgctccatcccgaggcagccagggtttgttttgcgctctcctgtcacaaatgctgcactattggttcttaagttttttatctccagatcctaatttatgcctatgcaaaaaataaatgacgcccaaga

SEQ ID NO: 4517 - DNA, 1823 bp, Homo sapiens
cggctttcctcctcctgctccaccatgtggagccgacggagggccgcctcaggcccacggtctgcggggtggaggagctacggcgccgcgcgggagcgggaggcagcactgcggaaggcgcggagggagcagcagctggtcagcaagaggctgctgagaaacgacgccccagaggaagctggagagggatgtgtggctgcgatcctcggggaaaccgaggtgcagcagttcctgcggcaagcccagcgggggacagaggaaaaggagagagagggggctctggtcagccttcgtcgaggcttgcagcaccctgaaacacagcaaaccttcatccggctggagggcagcatgcggaccctggtcgggctcctgaccagcaaccaggccctgctgcagcttgaggcggctcggtgcctgcatgagctctctcactccgagcagtccactgttgctgaggcctgcctgccagccacttcttacctcctcacctacctctccagtcacagctcagacttcatagagctgtgtctgtatacactgggtaacctgatcgtggagagtgaggctgtgagaaggcagctcctgccacagggcattgttccagccttggctgcctgcatccagtccccccatgtggctgtgctggaagctctcggatatgccttgtcccagcttctacaggctgaggaagctccagagaagatcattccccctgcttctgccagcagctccatcttggcctccactctccctcagcacatgctacaaatgttgcaacctggcccaaagctcaaccctggggtcgctgtggagtttgcctggtgccttcattacatcatctgcagccaggtcagcaatcctctgctcattggccatggggctctgtctactctggggttgctgctgttggacttggctggggctgtccagaaaaccgaggatgcaggactggagctgctggcatgccccgtgcttcgatgtctaagcaacctgctaactgaggcagcagtggagactgtgggagggcaaatgcagctcagagatgagcgtgttgtggcagccttatttatccttctgcagttctttttccagaaacagcccagtctgctcctgagggctttggctcctcaacaacctcactgcaaacagtcctagtttctgtacctccttgctctccctggatctgattgagcctctcttacagctgttgccagtatctaacgtggtgagcgtaatggtgctcacagttctgtgcaatgttgcagaaaagggtcctgcttactgccagcggctgtggccagggcccctgcttcccgccttgctgcacacactagccttttctgacactgaagtagtaggccagagtttggagctgctgcatctgctgttcctgtatcagccagaggctgttcaggtcttcctgcagcagtcagggctgcaagccctggaaaggcatcaggaagaggcccagctccaggatcgtgtgtatgctctccagcagacagctcttcaagggtgatcttgtttctcaatgtcactcattcccctctctcttaacatcaagcttgtttgtccagtagagcctttggagatttaggaccataatgaggtctcatgttctctgctcccacacctaagccaagacctttgggtcccagctcctccccttccactcagcactatccaggcaggaggaccaaaagggactcagtgtggtctacttactctggggccctagaatccctgcccccccgccacccttcatgtttgcttcagcagctggtagcttttgatgagacagaataaagttttatttttatatt

SEQ ID NO: 4518 - DNA, 3915 bp, Homo sapiens
gaaggggccatgttgatgggtgacccggggagaggtacccggccagaggcgagtcctgcggagtggtagcgcgcacggcctgcggtgtgacacccagcccctgccagtcccccatggccccgtggagccgagaggcggtgctgagtctctatcgggctctgttgcgccagggccgacagcttcgctacactgatcgagacttctactttgcctccatccgccgtgaattccgaaaaaatcagaagctagaggacgctgaggcccgggagaggcagctggagaagggcctggtctttctcaacggcaaattggggaggatcatttaggatcctccaagggaaagaggacaaaggtgccttctgtagacactcctgctctcttccatccccatcttacagatgtattaagaagcctcagatgagcaatggcaggcgctggtgagcgcaaaggcaagaaggatgacaatggcattggcacggccattgactttgtgctctccaatgcccggctggtgctgggggtgggtggagcggccatgctgggcatcgccacgctggcagttaagcggatgtacgatcgggcgatcagtgcccctaccagccccacccgcctgagccattcggggaaaaggagctgggaagaacccaactggatgggctccccacgactgctgaacagggacatgaagacgggcctgagccggtccttgcagacccttcccacagactcctccaccttcgacacagatacattctgcccgccccggcccaagccagtggccaggaagggccaggtagacttgaagaagtcacgactccgcatgtccctgcaggagaaacttcttacttactaccggaaccgggcagccatccctgctggagagcaggctcgggccaagcaagctgctgtggacatatgtgccgagctccggagcttcctgcgggccaagttgcctgacatgccgcttcgggacatgtacttgagtggcagcctctacgatgacctgcaggtggtgacagctgaccacatccaactcattgtgccccttgtgctggagcagaacctgtggtcatgtattcctggtgaagacaccatcatgaatgtccctggcttcttcctggtgcgtcgtgagaatccagagtactttcctcgtgggagcagttactgggaccgctgtgtagtagggggctacctctctccaaagacagtcgcagatacatttgagaaggtagtggctggctccatcaattggccagccatagggtccctcttggactatgtgatccgcccggccccacccccagaagccctcacactggaggtgcagtatgagcgtgacaaacatctcttcattgacttcctgccatcagtgaccctcggtgacacagtcttggtggccaaaccacaccggctagcccagtatgacaacctgtggcggctgagcctgcgtcccgcggagacggcacgcctgcgggctctggaccaggctgactcgggctgccgatctctgtgcctcaagatcctcaaggccatatgcaagtccaccccggctctgggccacctcactgccagccagctaaccaatgtcatcctccacttggcccaggaggaggctgactggtctccggatatgctggccgaccgtttcctgcaggccttgaggggacttatcagctacttagaggctggagtcctgcccagtgccctaaaccccaaggtgaacttatttgcagagctcacccctgaagaaatagacgaattaggatacactctgtattgctcattgtctgagccagaggtgctgctgcagacgtagggcaggtgaaggccaaagcgggtgttggtggtcaggccctggattctccgttagatacacttggctacctagttggtgcctcacagggttcctgctgcctggtgtcttgctgatcatcaccctggtcacttcatgctgattagaatgacatctctttcgtctcctattttgttacccaactcttcctatttttgttaccaatcactgtgctctctgccgccccctggctccaggctaatttttctggaatgaattgagaaggtggcgtgctggcctgagctgatggaccacttggtgttttgcgttttggcccatgtttgctgcctctatctggtctgccttgcccgtttgcctgttcctattcagtgtcttttctattttttcctctctcgttcatgccttctgttttgctcttgtccctggagcatatctgcctaattaagatgttgccttttagttgaatgccactgaagagctgtgatagcatgtttcaaagctgaactctacagagcgagtgctgagacagtatttagggtttctgggagtgaggctggtagaagagttggcctttgaccacggttcctggagtagaagtccatcctccccccaacctcctgacccattcataaatgctgagaatgtctctcatgggaacactgttaatgacccacacaggataagctgaatgcaaagttatttgcaggttgaatttcttggtggctattagcagaagtgcagagtagggaaccagagctggttaagggcctagtgaagggtttgtgtgcccagtgtctgctcgtcatctgtggctgcaggggtcagacagacaaggatggggactgccagggcaccacttcatcatgaatgctggttttcacaccttttccttattttattgccaatcaggacaaggccttgaaggaacgcagccttagacatcaggtgaggatgatggaggtagacagtcgactgaatgtcagctggaaaatccagtcactagttggggtttggtggccatgttttctacccagacaggccctgcttttctaggatgtggccttagagcaagaacagacccaacagccagcccttcatcctccagcgtctgccataggaatgtgagaggggtgtttgctgagcgctccgggcacggccagagggcaagtgagcatgcacggacctcttccccctgtcctgtttctcacccagcacctggggagatcggtgctaccaaggaagagagcacacagataagacagaggggaggaggtgggcatttcctacattcctccttgtttgccgctgctgagattgcagtatttattgcaatgtaaatgtatcctgaaggtggggaggaatgtttaatctaccatgtccgtgtgtcatcttggtttgtgtttttccctgtttgtagcaagactctgatgataattctgtttctcatctgcccattcagtattttgttttccttccgtcaagttgtcttattttttcaatgactacctctccatcattgaggttctggtgaagctctctgcagctgtctcattccttcccaacgatagtaacaggaaatgactctttagcatcgatacctcaacatcaatttagggtagagattcctgcccctcttttgtcacagattaggaaattgagaactagggttaaccttgactatatttagaggtctttttgcctcttttccccttaacaaggatttcttatggtggtttcagtttcatttgcataaaggtattgagagggaacaaaaaacataaagctgagaatcttgagagagctcatctaccctgtctgttggtcagactcaaatgagagttaaaaaaaaaaaaaaaaatctgtatgcctgagtaccatcctggatgaatctagaaggtatggggtagagcttgacagggttcctgtgtacccactgggtatccgttagaggtaagggagaggagaggattgatagagtgttgcaaaagtatagattattcattgagataaaggatttggtttccctgccatgagtattaaaaaaatttaagttttcccaagcttgcatctctgaccaaatttcacataaaacattggaagga

SEQ ID NO: 4519 - DNA, 1973 bp, Homo sapiens
atgttgatgggtgacccggggagaggtacccggccagaggcgagtcctgcggagtggtagcgcgcacggcctgcggtgtgacacccagcccctgccagtcccccatggccccgtggagccgagaggcggtgctgagtctctatcgggctctgttgcgccagggccgacagcttcgctacactgatcgagacttctactttgcctccatccgccgtgaattccgaaaaaatcagaagctagaggacgctgaggcccgggagaggcagctggagaagggcctggtctttctcaacggcaaattggggaggatcatttaggatcctccaagggaaagaggacaaaggtgccttctgtagacactcctgctctcttccatccccatcttacagatgtattaagaagcctcagatgagcaatggcaggcgctggtgagcgcaaaggcaagaaggatgacaatggcattggcacggccattgactttgtgctctccaatgcccggctggtgctgggggtgggtggagcggccatgctgggcatcgccacgctggcagttaagcggatgtacgatcgggcgatcagtgcccctaccagccccacccgcctgagccattcggggaaaaggagctgggaagaacccaactggatgggctccccacgactgctgattagaatgacatctctttcgtctcctattttgttacccaactcttcctatttttgttaccaatcactgtgctctctgccgccccctggctccaggctaatttttctggaatgaattgagaaggtggcgtgctggcctgagctgatggaccacttggtgttttgcgttttggcccatgtttgctgcctctatctggtctgccttgcccgtttgcctgttcctattcagtgtcttttctattttttcctctctcgttcatgccttctgttttgctcttgtccctggagcatatctgcctaattaagatgttgccttttagttgaatgccactgaagagctgtgatagcatgtttcaaagctgaactctacagagcgagtgctgagacagtatttagggtttctgggagtgaggctggtagaagagttggcctttgaccacggttcctggagtagaagtccatcctccccccaacctcctgacccattcataaatgctgagaatgtctctcatgggaacactgttaatgacccacacaggataagctgaatgcaaagttatttgcaggttgaatttcttggtggctattagcagaagtgcagagtagggaaccagagctggttaagggcctagtgaagggtttgtgtgcccagtgtctgctcgtcatctgtggctgcaggggtcagacagacaaggatggggactgccagggcaccacttcatcatgaatgctggttttcacaccttttccttattttattgccaatcaggacaaggccttgaaggaacgcagccttagacatcaggtgaggatgatggaggtagacagtcgactgaatgtcagctggaaaatccagtcactagttggggtttggtggccatgttttctacccagacaggccctgcttttctaggatgtggccttagagcaagaacagacccaacagccagcccttcatcctccagcgtctgccataggaatgtgagaggggtgtttgctgagcgctccgggcacggccagagggcaagtgagcatgcacggacctcttccccctgtcctgtttctcacccagcacctggggagatcggtgctaccaaggaagagagcacacagataagacagaggggaggaggtgggcatttcctacattcctccttgtttgccgctgctgagattgcagtatttattgcaatgtaaatgtatcctgaaggtggggaggaatgtttaatctaccatgtccgtgtgtcatcttggtttgtgtttttccctgtttgtagcaagactctgatgataattctgtttctcatctg

SEQ ID NO: 4520 - DNA, 3572 bp, Homo sapiens
catgccagttacttcctcaggaaaatattttcttgccttcttctttcagtatggttttaaatttgggaacagtggataacccaagtgtcccacaggccaaggtacattccaatggcagcatgatccctgcacccaaagccagcccctaaagcctaccccttgtgcacccgcagcctggtaagtgagcttggctgcttgtgaggagctacaagtgaaagagaagttattttaaataaatcccaaagtttgaggcagactgtccaggactgttcccaggaagaagcaggagttacccacaggaaaagtctctgacctggtcccctcaggcccagctacctgcgcccaccagcagtgaaggttgatgtactggcccagcatctccacctcccccatgcaaccaggtccctggtaccgtgtctcccgttgcatgtctggcttctgcctgtgctcctcctgccacgagcatcctccctgtccctcctcattccaccgtgtctctcctgcacacatagcctctgtcccagggcgatttatccacttgagtacaggagctgctcagacctctcagcccagccctctgtgactgccccagccccatcctaccccacccaaagctgccttcctggctgtaggagctccctcgtctagccaaggccctatgggtccccatccgaggatccacaagcaatgacttcccaaatgacctccactgcaagaagaatccttaccactgtttccagagccgtgaacgatgctgtgatgggcccaggtctcagcaccaccctctgtgacctaaaaagaaaagctcaatttccatctgtcttctttcccaggaccaaggggacacagtaatgtgaagtcaaatacttaaccgagcaaagggccagtattgttatcagtcaaggacaaacctcccacctcacagacagccaagcagtgagggaaagacagacagacataggtaggaaggtgctctgcaggcacaaggcccagagaagcccctctccgggaacttcccctgctccttccaggaacagtgagcccagtgagcagccccagccagctcttcaaggccttcaaggggtctttccatgactgagtcacctccaggagctcacctgacccccagagaagacctaccccaggcagctccgtgccctggcttctccccatgccccaaatccccccccgccatccctcctggtcctcgtctacatcaagggcctcttcccctcttcctgccagctctcaggacaggtgactgggaggccttgaaccctcagcctcttcctttaaaaaaaacaaaacaaaacaaaactgtgggccatttatttgggattttggagttgtttggtttttgtttgtatatcttaatagttcgaaagtaagaagggagccctgctatggatgttaagtccaaattactcggttagtgggagcaaaacctatgacttccaaggggatgaggagaggttcagaggacaggaggagcctcccccattgaaaaaaaaaaatgggtcaggacattccctggatgaggacaatgctaggggtggcatctcacatggctgctgctattcctggtgcttccccacacttttgacagatggagtccttctcctaccgcctcctgccacctcaccctacaggcattctctatgtaggaaacaagagccttattttatagagtggggagctgagacacagcctcaggtaacactgacacagctcccgaatgaggctgggacactctgcaaacctctcctcatggtgctaagggtggcatgctcttgacaggaaacctaaatgaccactcctctcatttggaaagtaatccactgcagtaaaagtttcagacatgcaagagagagtttttttttttttactacaaatttttgctcccccataaaattattttattagagggagtatccaagttttaaaagtatatagaattttttggttgtaagagaaatacatactcattaggatcccgattaaattccttgagtagactggtgcctaccagaaagcaaagcaaagttaaacaaaacgaaacaaaatccttcatatacaaaaagaactttctgtttgtattggcagaggtagtgaggtgattcaggtaggctgaaaatcctgggttgcgggagcctcactttattccattcccacccgctttgatgtctatgcttggctctctgggctgcccctggtactgccgaatcctacacatctcttatcagctttcctcaaactttaaggaggctctgtgagggatgggtcatgggaagacccaagctttccctccgccaggattgcaaaagcaagtagacttggtctatgcagctcttcttccagcaatttctttatttggaattagaacttcctttgttagtatctttgatcttttgactcaagcacattttggaagggctcccttacaaaagtagaatttaaaacagaggatacagttaaagagcaacccaaaggacgcttaagaaaccgagaccacttcaccaaacaggactaaggaacactttcgtgcacagaagtcagccgcaatccaggcacaggacgaagatgggatacacgtgctcatctgtctgtcctcctttcctctccctccccgacgttctagttagcttgttgacttgttaaaccttctgttcttaaaatgaaaagctagcttacctcaaagaatcttgtttccattcggaaaccaacgattttgtgttttagaatggacagccctcccctcaccactccctaccttggcctggtgtccttgagacatacggtctttgcttagtcgtgtgttggctgctttgagcaggaacaaggcctccaggccctgaggtgggaaggaaggattggatgccactgccctcctccccactttagcatgtaggggccagcccatctcttccagcagggtcctgctgagttaccatagcaaccagcaactccagggtaccacaacagacaatggctcagcgagccgacgtgtggggatgatgcaggggttttggcccagccagaggacccagagttgagcttcaaatgctagagaaggggagaaacaggatggaagggtggtttaaggaaccggcaggggtctttgagtcacatagagaagccgttgaaggaggtagggcaggttatctctgttccagtcacccccttccagccccatcccacttctgtttcaaactaaagctcccacctcgaacattgaccctttgttagaacaaagcaaagcatatctttagacaacagtgttaaaatgagcctcaaatgtatgtggatgagatctctaagaagagggtcttctggttttgatttttaaagaagagtatcctagtaaaatattaaaaaaaaattaaaaagtttttaaaaaggaaacctgtgctatttaaattggagcccagttgtaacttggtaaaggcaagcttctgtacctttgttataattaattgtatacctgtgtatgtaaatataaggcattcctattttgcagttcagaacaaaaaaaacttatttgtaatatagaataaagtttattaaaaaataat

SEQ ID NO: 4521 - DNA, 1882 bp, Homo sapiens
gcgggaagtctgaagccggtaaacatggccgtcaccgacagcctcagccgggctgcgactgtcttggcaactgtgttgctcttgtccttcggcagcgtggccgctagtcatatcgaggatcaagcagaacaattctttagaagtggccatacaaacaactgggctgttctggtgtgtacatcccgattctggtttaattatcgacatgttgcaaataccctttctgtttatagaagtgtcaagaggctaggtattcctgacagtcacattgtcctaatgcttgcagatgatatggcctgtaatcctagaaatcccaaaccagctacagtgtttagtcacaagaatatggaactaaatgtgtatggagatgatgtggaagtggattatagaagttacgaggtaactgtggagaattttttacgggtattaactgggaggatcccacctagtactcctcggtcaaaacgtcttctttctgatgacagaagcaatattctaatttatatgacagggcatggtggaaatggtttcttaaaatttcaagattctgaagaaattaccaacatagaactcgcggatgcttttgaacaaatgtggcagaaaagacgctacaatgagctactgtttattattgatacttgccaaggagcatccatgtatgaacgattttattctcctaacataatggctctagctagtagtcaagtgggagaagattcactctcgcatcaacctgatcctgcaattggagtccatcttatggatagatacacattttatgtcttggaatttttggaagaaattaacccagctagccaaactaatatgaatgacctttttcaggtatgtcccaaaagtctgtgtgtgtctactcctggacatcgcactgatctttttcagagggatcctaaaaatgtactgataactgatttctttggaagtgtacggaaagtggaaattacaacagagactattaaattgcaacaggattcagaaatcatggaaagcagctataaggaagaccagatggatgagaaactaatggaacctctgaaatatgctgaacaacttcctgtagctcagataatacaccagaaaccgaagctgaaagactggcatcctcctgggggctttattctgggattatgggcacttattatcatggttttcttcaaaacttatggaattaagcatatgaagttcattttttagacttgatgatgaatgaagaatgcatggaggactgcaaacttggataataatttatgtcattatatatttttaaaaatgtgtttctcttgtatgaattggaaataagtataaggaaactaaatttgaatcaactattaattttataacttaaagaaaaataattgttaatgcaactgcttaatggcactaaatatattccagttttgtattttgtgtattataaaagcgaatgagacagagatcagaatacattgactgtttttgaaaatagtaatttccccttatccccttttcatttggaaaagaaacaattgtgaagacattaaattctcactaacagaagtaactttggttaattattttttgtatatcctcccaatcttttgacttatgcacatattttttcccaatatggagatcatatggaatgtactattttgtaatgtcttttttcattttacaatgtattatcaaccttttccctctcaaaaatacattgtgaatgactgcatagtattcactttatgaatatttaattcatttcacagtcttctattgttggaccacttacattgtaccaaatgttttcctttggtttattctttaatgtattaatattttactgctggtcactcatggaatcctgcagctttaattaaaagcaaagatg

SEQ ID NO: 4522 - DNA, 860 bp, Homo sapiens
ccgagagctcgcagctccggcccggcggcgatggcgcggagcgtgcgcgtgctggtggacatggacggcgtcctggccgacttcgaggccggcctcctgcggggcttccgccgccgcttccctgaggagccgcacgtgccgctggagcaacgccgcggcttcctggcccgcgagcagtaccgcgccctgcggcccgacctggcggataaagtggccagtgtgtacgaagccccgggctttttcctggacctggagcccatcccgggagccttggacgctgtgcgggagatgaacgacctaccggacacgcaggtcttcatctgcaccagccccctgctgaagtaccaccactgtgtgggtgagaagtaccgctgggtggagcagcacctggggccccagttcgtagaacgaattatcctgacaagggacaagacggtggtcttgggggacctgctcattgatgacaaggacacagttcgaggccaggaggagaccccaagctgggagcacatcttgttcacctgctgccacaatcggcacctggagtgacaactggagggagatcttagatagcaagcgcggagctgcgcagcgggaatgagcggggatgccgcgggcagcagctggagctaaaggaagggcaggcccacaggggccaccgcagagccgagtcggggcggcatcgtgctggtgcctctggccccgtggagtggagcaggcagataccgttaagcgctgtgctaccgggccccaggcccagccacccggtacctcccgagaggctgtccctggaccctggctggcatggaaatacagtgggaaaaccagtcgggacctttaataaaagaccttggctttct

SEQ ID NO: 4523 - DNA, 957 bp, Homo sapiens
cagaccccgagagctcgcagctccggcccggcggcgatggcgcggagcgtgcgcgtgctggtggacatggacggcgtcctggccgacttcgaggccggcctcctgcggggcttccgccgccgcttccctgaggagccgcacgtgccgctggagcaacgccgcggcttcctggcccgcgagcagtaccgcgccctgcggcccgacctggcggataaagtggccagtgtgtacgaagccccgggctttttcctggacctggagcccatcccgggagccttggacgctgtgcgggagatgaacgacctaccggaccccctgctgaagtaccaccactgtgtgggtgagaaggtgtggctgccccgcccctactccgcacgtggagctgcctaaatcctgattttaaaaagaaaccaccagaaacccagaagtaccgctgggtggagcagcacctggggccccagttcgtagaacgaattatcctgacaagggacaagacggtggtcttgggggacctgctcattgatgacaaggacacagttcgaggccaggaggagaccccaagctgggagcacatcttgttcacctgctgccacaatcggcacctggtcctgcccccgacaaggagacggctgctctcctggagtgacaactggagggagatcttagatagcaagcgcggagctgcgcagcgggaatgagcggggatgccgcgggcagcagctggagctaaaggaagggcaggcccacaggggccaccgcagagccgagtcggggcggcatcgtgctggtgcctctggccccgtggagtggagcaggcagataccgttaagcgctgtgctaccgggccccaggcccagccacccggtacctcccgagaggctgtccctggaccctggctggcatggaaatacagtgggaaaaccagtcgggacctttaataaaagaccttggctttct

SEQ ID NO: 4524 - DNA, 4256 bp, Homo sapiens
cgattttgctctaaactgctgcatctgtctatgccaaactaatcaataccgattgcaccaccaaactccattgcaaattcagctgtgaggagattccctttcagacaactttgctgaaagcagcttggaaattcggtgtcgaagggtctgccacgttttcatgcttgcattttgggctccaaattggcactgggaaggggttactgagagcacaaggctgataccaggccctacttttaaacgttcatctacttacaatcctagtatttctctaaaaaccaaaacctctttgaattaacagtttcatgctgtgaatttctagtgggagatcttttccttgatattgacgacacaattttccatgtacttttaaagcagggagtggggaaaagtattttgaggggacattttcatcatcagttcagctttttttttttggttgttgctcttttttgggggggttgggtttgttggtttcactgaaacatttaactacctgtaaaatctaaacatggctgttagtgtcacaccaattcgggacacaaaatggctaacactggaagtatgtagagagttccagagggggacttgctcacggccagacacggaatgtaaatttgcacatccttcgaaaagctgccaagttgaaaatggacgagtaatcgcctgctttgattcattgaaaggccgttgctccagggagaactgcaaatatcttcatccacccccacatttaaaaacgcagttggagataaatggacgcaataacttgattcagcagaagaacatggccatgttggcccagcaaatgcaactagccaatgccatgatgcctggtgccccattacaacccgtggtatgtcgagagtaccaacgtggcaattgcaaccgaggagaaaatgattgtcggtttgctcatcctgctgacagcacaatgattgacaccaatgacaacacagtcactgtgtgtatggattacatcaaagggagatgctctcgggaaaagtgcaaatactttcatccccctgcacatttgcaagccaagatcaaggctgcccaataccaggtcaaccaggctgcagctgcacaggctgcagccaccgcagctgccatgggaattcctcaagctgtacttcccccattaccaaagaggcctgctcttgaaaaaaccaacggtgccaccgcagtctttaacactggtattttccaataccaacaggctctagccaacatgcagttacaacagcatacagcatttctcccaccagttcccatggtgcacggtgctacgccagccactgtgtccgcagcaacaacatctgccacaagtgttcccttcgctgcaacagccacagccaaccagatacccataatatctgccgaacatctgactagccacaagtatgttacccagatgtagaattttcatcactaaacaatcatgctaaagaggaaaggacagtgtgcttggttagagtaaaggacgaggtcattagccatattgtatatatcgtcaagcaacacacacaaaagttcctcagccacaagacatccacatattgcatgttaaccagaagaaaagacaacattttccggaaatccactgcacactgttgcctatacactttgtacatttaattgatatttgtgctgaggtgatattcctgtctaaaagaacaacattgtctttcttttctagcacagagttatgcattcaaagatgcatacctagttagtttcctatatattcatgccatcttgaaaagacagactatggtgtaaccatgattctattatgtattggtacgtctgtagaccaagatataattttttaaaaataagtttatttctttcaaggtttacaaataacaaaggtgcaccttgtatttaaaattgccattatagatgagagcgtgcatgcacagtcatttttgtttaagagtaatatttttaatgtaatagattgtaagacgtggtgagggagggatctgacagagatgaatgtgccaagcaaaaccacaactgtgtatattttaaagcacatcatggctttaagtaccatgttgttaaggattctcatgaagtgccatagactgtacatcaaattagagtattatttcttcagtgttattgttttcagagccacattttgttgcatatttgctagtactaatcagtcaaagggcaccattctttttttttttttttgaaaccaaagctgtctcagaaatggccaatttaactttacagtaacaatagacagcacaacacaaactctctcaatacagataaactcacacatactggagatatatatataatagatatatataaaattattttaatgcattgtagtgtaatatttatgcatactatactgtataacatgttattcaacaagggattgccatttctgagacacaaaaacacaaaaatgaggaaattatttgcttctatttatagcctatgtcaaaagtcaattgactataaatgctttgcaaaaatgtttcacgtttgcttaaatgcttcatcacagtcacattcaaaatagtgactctaaacaaagaagaaagcagcactgtcatcagatgcatgataaaccaaaatatgaaaatgggaaatgtttaattaacctagtaattgggtgggttaagtacatgggtgaattttatatgtgatttttgttttgttttgttttgttcagattaactgcttatagccttagaaagccttttacaaaattaaaaaaaaaatagatgtgcattcagtttttaagaatggaatcatccaaaggaattcctttttttgaggtttggatgttgcagctagtaaaggatatttttgctctgttcagcagttctaaaaattgctgaagtaggggccaggtcactggtagttatagtatggaatgggagaagtgaaagttcagttatagaactttccatacttccaagtttactgcaagtttttatgcttgagagagatgctttctaatataagactgatgtgttgattttactgattgtactgtacatctattaaagccttagattattacattacgggttggaacccataccaatgtaatttcaatcgtgttaagaaagtaatggtgacttcacatgttattgtagttagttacattatagaatattacttatttttcttgttaaaatgtagtttttcatttcctacatttattagattttcattttctattaacaattgaataccatttcagtttatagacttgttttattagattttaccaatgaatttttcaaaatacaaaaaaaagtagtttttccttcataacatactcagttttgaattacatgtagtgtcacatgaatattcgtattgttaactaaatgatttatattttactgatttaatattacagtgtaagaatgtcagtcattgttagttcttgtctagttttcattaaaagaacaaagatcttttatatggatatcttataaatatataatcattgctaagtaagaagttaagtagttgctatcgcaacaatcctggcagacaattgagtaatattttgatgatttattttgtttgtaattagttattataagaagatctagatcctagatattagaataaaatttattttctactgtatccatttcaaatgttaaaatattgtttaatatttttgaaatccctgagtatcaggccttgttataaataagctgcataatcaataaatagaacaagggactttttgttgataatccaaatactcaaagtttacgtaatgaaaattatagcgtgtgtgcaaactcttgagggttgattatgctgcaatttagcatgttggaacgtctagggagaaggttgactttttgcacttctgtatatagtcaaaagagagaaacctgtataatagtaagatcttattttgaataaaaacgtctataattacaaggagttttgttaaggctaatacaatgacagactgagcaaaattgcttgcaaaagtggcacagagttagcactccataccccttcaaacatgttgctttgctttcttgtggacagcttgtagtttgccaggattttttcagctggaaagatacgccatcctttcaaaccctcatgactgacaaaaactccatggggccaaatctgcctgaagatcattaccaaaaatagcaggtacttctaccattaaggtgaaatcatggatcagatattccttacatttttcaaaactactgcatgtttaaaacttcaac

SEQ ID NO: 4525 - DNA, 916 bp, Homo sapiens
ggctgctgagcactgagcagcgctcagaatggaagccatcgccaaatatgacttcaaagctactgcagacgacgagctgagcttcaaaaggggggacatcctcaaggttttgaacgaagaatgtgatcagaactggtacaaggcagagcttaatggaaaagacggcttcattcccaagaactacatagaaatgaaaccacatccgtttggaaacgatgtgcagcacttcaaggtgctccgagatggagccgggaagtacttcctctgggtggtgaagttcaattctttgaatgagctggtggattatcacagatctacatctgtctccagaaaccagcagatattcctgcgggacatagaacaggtgccacagcagccgacatacgtccaggccctctttgactttgatccccaggaggatggagagctgggcttccgccggggagattttatccatgtcatggataactcagaccccaactggtggaaaggagcttgccacgggcagaccggcatgtttccccgcaattatgtcacccccgtgaaccggaacgtctaagagtcaagaagcaattatttaaagaaagtgaaaaatgtaaaacacatacaaaagaattaaacccacaagctgcctctgacagcagcctgtgagggagtgcagaacacctggccgggtcaccctgtgaccctctcactttggttggaactttagggggtgggagggggcgttggatttaaaaatgccaaaacttacctataaattaagaagagtttttattacaaattttcactgctgctcctctttcccctcctttgtcttttttttcatccttttttctcttctgtccatcagtgcatgacgtttaaggccacgtatagtcctagctgacgccaataataaaaaacaagaaaccaa

SEQ ID NO: 4526 - DNA, 2305 bp, Homo sapiens
tggcggccgccagcggctacacggacctgcgtgagaagctcaagtccatgacgtcccgggacaactataaggcgggcagccgggaggccgccgccgctgccgcagccgccgtagccgccgcagccgcagccgccgctgccgccgaaccttaccctgtgtccggggccaagcgcaagtatcaggaggactcggaccccgagcgcagcgactatgaggagcagcagctgcagaaggaggaggaggcgcgcaaggtgaagagcggcatccgccagatgcgcctcttcagccaggacgagtgcgccaagatcgaggcccgcattgacgaggtggtgtcccgcgctgagaagggcctgtacaacgagcacacggtggaccgggccccactgcgcaacaagtacttcttcggcgaaggctacacttacggcgcccagctgcagaagcgcgggcccggccaggagcgcctctacccgccgggcgacgtggacgagatccccgagtgggtgcaccagctggtgatccaaaagctggtggagcaccgcgtcatccccgagggcttcgtcaacagcgccgtcatcaacgactaccagcccggcggctgcatcgtgtctcacgtggaccccatccacatcttcgagcgccccatcgtgtccgtgtccttctttagcgactctgcgctgtgcttcggctgcaagttccagttcaagcctattcgggtgtcggaaccagtgctttccctgccggtgcgcaggggaagcgtgactgtgctcagtggatatgctgctgatgaaatcactcactgcatacggcctcaggacatcaaggagcgccgagcagtcatcatcctcaggaagacaagattagatgcaccccggttggaaacaaagtccctgagcagctccgtgttaccacccagctatgcttcagatcgcctgtcaggaaacaacagggaccctgctctgaaacccaagcggtcccaccgcaaggcagaccctgatgctgcccacaggccacggatcctggagatggacaaggaagagaaccggcgctcggtgctgctgcccacacaccggcggaggggtagcttcagctctgagaactactggcgcaagtcatacgagtcctcagaggactgctctgaggcagcaggcagccctgcccgaaaggtgaagatgcggcggcactgagtctacccgccgccctcctgggaactctggctcatccttacgtagttgcccctccttttgttttgagggttttgtttttgttcattggggggtttttgttttttgttttttgttttttttgattctatatatttttccttggttttgttgcctgttagggctgaagaatagaattggccaggacctaggttctcatattcttggtattcctcctggatggaaaggctgttggcatcaataggggacagaggctgatgctggagtggccagtagaggtggtggagcagagcagccatcttttaagtggggctgtatcaggctgggtttatttaaaagcaacaaaatgttttggttaagaaaattattttgctttcagtgtaaatcttcgcagtgttctaaacaaagttcagtcttctgctcgcccctttccctcactgatgtctgcacttggttgaggtctcctggagcctcacaggctctgctgttctccacttctcacctgccatccacgccctgcaagctcatgcaaacaccctttcttcctcctgcggcagagttgttcaggttgcctgggcaggggcttaaacagtgccagcccctgccatcccaaagctattgttaagccccccaggcgtcctccacccacgcccactagcctgccatgtccacagttccttgggctgctgaggggctagtgcagtggtcctgacctctcttatcaagagcacacttctttgctggttgctccttttgagcatatgcgtgtgattatttggaacagttagacttgccacgttgggtcagttttagaaattgtttctagctagagggactggtgtccttccaagtctagcatttggggtatggaaaattgttgtggtgtgtggtagggtttttgttttcttttttgagttttttttccccctttagtctcctggctttttcctttcccttcccttctccactggccagcttgggcctcatcctcatgtcatccttctaggaaggcgcctgccccatcttgtctgccggcagcatgcatccaaggccagagctcaggcctgcagactgggctggtgcctcctccgcttcagggtatgggagttggtgaaggggctttc

SEQ ID NO: 4527 - DNA, 1609 bp, Homo sapiens
aggaaacgggtatttcatgtctcagggagtaggtttgtgcagttacagcttttctgttggtatgcataattaataattggagctgcaaagcagatcgtgacaagagatggacggtcagaagaaaaattggaaggacaaggttgttgacctcctgtactggagagacattaagaagactggagtggtgtttggtgccagcctattcctgctgctttcattgacagtattcagcattgtgagcgtaacagcctacattgccttggccctgctctctgtgaccatcagctttaggatatacaagggtgtgatccaagctatccagaaatcagatgaaggccacccattcagggcatatctggaatctgaagttgctatatctgaggagttggttcagaagtacagtaattctgctcttggtcatgtgaactgcacgataaaggaactcaggcgcctcttcttagttgatgatttagttgattctctgaagtttgcagtgttgatgtgggtatttacctatgttggtgccttgtttaatggtctgacactactgattttggctctcatttcactcttcagtgttcctgttatttatgaacggcatcaggcacagatagatcattatctaggacttgcaaataagaatgttaaagatgctatggctaaaatccaagcaaaaatccctggattgaagcgcaaagctgaatgaaaacgcccaaaataattagtaggagttcatctttaaaggggatattcatttgattatacgggggagggtcagggaccatgcactgttgtgaggaaaaattacctgtcttgactgccatgtgttcatcatcttaagtattgtaagctgctatgtatggatttaaaccgtaatcatatctttttcctatctatctgaggcactggtggaataaaaaacctgtatattttactttgttgcagatagtcttgccgcatcttggcaagttgcagagatggtggagctagaaaaaaaaaaaaaaaagcccttttcagtttgtgcactgtgtatggtccgtgtagattgatgcagattttctgaaatgaaatgtttgtttagacgagatcataccggtaaagcaggaatgacaaagcttgcttttctggtatgttctaggtgtattgtgacttttactgttatattaattgccaatataagtaaatatagattatatatgtatagtgtttcacaaagcttagacctttaccttccagccaccccacagtgcttgatatttcagagtcagtcattggttatacatgtgtagttccaaagcacataagctagaagaagaaatatttctaggagcactaccatctgttttcaacatgaaatgccacacacatagaactccaacatcaatttcattgcacagactgactgtagttaattttgtcacagaatctatggactgaatctaatgcttccaaaaatgttgtttgtttgcaaatatcaaacattgttatgcaagaaattattaattacaaaatgaagatttataccattgtggtttaagctgtactgaactaaatctgtggaatgcattgtgaactgtaaaagcaaagtatcaataaagcttatagactt

SEQ ID NO: 4528 - DNA, 3478 bp, Homo sapiens
gtgctcgtggggagctggccgagtggaaaacgtccacattgacccaaccgcagtgaagggagagcgcctccagtggtgtggtgcgtggagaaatgggaaggagagagttctgatgagaccctttttgctcttcctgctgcatctgagcctgtgatacgctcctctgcagaaaatatggacttgaaggagcagccaggtaacactatttcggctggtcaagaggatttcccatctgtcctgcttgaaactgctgcttctcttccttctctgtctcctctctcagccgcttctttcaaagaacatgaataccttggtaatttgtcaacagtattacccactgaaggaacacttcaagaaaatgtcagtgaagcttctaaagaggtctcagagaaggcaaaaactctactcatagatagagatttaacagagttttcagaattagaatactcagaaatgggatcatcgttcagtgtctctccaaaagcagaatctgccgtaatagtagcaaatcctagggaagaaataatcgtgaaaaataaagatgaagaagagaagttagttagtaataacatccttcataatcaacaagagttacctacagctcttactaaattggttaaagaggatgaagttgtgtcttcagaaaaagcaaaagacagttttaatgaaaagagagttgcagtggaagctcctatgagggaggaatatgcagacttcaaaccatttgagcgagtatgggaagtgaaagatagtaaggaagatagtgatatgttggctgctggaggtaaaatcgagagcaacttggaaagtaaagtggataaaaaatgttttgcagatagccttgagcaaactaatcacgaaaaagatagtgagagtagtaatgatgatacttctttccccagtacgccagaaggtataaaggatcgttcaggagcatatatcacatgtgctccctttaacccagcagcaactgagagcattgcaacaaacatttttcctttgttaggagatcctacttcagaaaataagaccgatgaaaaaaaaatagaagaaaagaaggcccaaatagtaacagagaagaatactagcaccaaaacatcaaacccttttcttgtagcagcacaggattctgagacagattatgtcacaacagataatttaacaaaggtgactgaggaagtcgtggcaaacatgcctgaaggcctgactccagatttagtacaggaagcatgtgaaagtgaattgaatgaagttactggtacaaagattgcttatgaaacaaaaatggacttggttcaaacatcagaagttatgcaagagtcactctatcctgcagcacagctttgcccatcatttgaagagtcagaagctactccttcaccagttttgcctgacattgttatggaagcaccattgaattctgcagttcctagtgctggtgcttccgtgatacagcccagctcatcaccattagaagcttcttcagttaattatgaaagcataaaacatgagcctgaaaaccccccaccatatgaagaggccatgagtgtatcactaaaaaaagtatcaggaataaaggaagaaattaaagagcctgaaaatattaatgcagctcttcaagaaacagaagctccttatatatctattgcatgtgatttaattaaagaaacaaagctttctgctgaaccagctccggatttctctgattattcagaaatggcaaaagttgaacagccagtgcctgatcattctgagctagttgaagattcctcacctgattctgaaccagttgacttatttagtgatgattcaatacctgacgttccacaaaaacaagatgaaactgtgatgcttgtgaaagaaagtctcactgagacttcatttgagtcaatgatagaatatgaaaataaggaaaaactcagtgctttgccacctgagggaggaaagccatatttggaatcttttaagctcagtttagataacacaaaagataccctgttacctgatgaagtttcaacattgagcaaaaaggagaaaattcctttgcagatggaggagctcagtactgcagtttattcaaatgatgacttatttatttctaaggaagcacagataagagaaactgaaacgttttcagattcatctccaattgaaattatagatgagttccctacattgatcagttctaaaactgattcattttctaaattagccagggaatatactgacctagaagtatcccacaaaagtgaaattgctaatgccccggatggagctgggtcattgccttgcacagaattgccccatgacctttctttgaagaacatacaacccaaagttgaagagaaaatcagtttctcagatgacttttctaaaaatgggtctgctacatcaaaggtgctcttattgcctccagatgtttctgctttggccactcaagcagagatagagagcatagttaaacccaaagttcttgtgaaagaagctgagaaaaaacttccttccgatacagaaaaagaggacagatcaccatctgctatattttcagcagagctgagtaaaacttcagttgttgacctcctgtactggagagacattaagaagactggagtggtgtttggtgccagcctattcctgctgctttcattgacagtattcagcattgtgagcgtaacagcctacattgccttggccctgctctctgtgaccatcagctttaggatatacaagggtgtgatccaagctatccagaaatcagatgaaggccacccattcagggcatatctggaatctgaagttgctatatctgaggagttggttcagaagtacagtaattctgctcttggtcatgtgaactgcacgataaaggaactcaggcgcctcttcttagttgatgatttagttgattctctgaagtttgcagtgttgatgtgggtatttacctatgttggtgccttgtttaatggtctgacactactgattttggctctcatttcactcttcagtgttcctgttatttatgaacggcatcaggcacagatagatcattatctaggacttgcaaataagaatgttaaagatgctatggctaaaatccaagcaaaaatccctggattgaagcgcaaagctgaatgaaaacgcccaaaataattagtaggagttcatctttaaaggggatattcatttgattatacgggggagggtcagggaagaacgaaccttgacgttgcagtgcagtttcacagatcgttgttagatctttatttttagccatgcactgttgtgaggaaaaattacctgtcttgactgccatgtgttcatcatcttaagtattgtaagctgctatgtatggatttaaaccgtaatcatatctttttcctatctatctgaggcactggtggaataaaaaacctgtatattttactttgttgcagatagtcttgccgcatcttggcaagttgcagagatggtggagcta

SEQ ID NO: 4529 - DNA, 2883 bp, Homo sapiens
atggaagacctggaccagtctcctctggtctcgtcctcggacagcccaccccggccgcagcccgcgttcaagtaccagttcgtgagggagcccgaggacgaggaggaagaagaggaggaggaagaggaggacgaggacgaagacctggaggagctggaggtgctggagaggacagagttttcagaattagaatactcagaaatgggatcatcgttcagtgtctctccaaaagcagaatctgccgtaatagtagcaaatcctagggaagaaataatcgtgaaaaataaagatgaagaagagaagttagttagtaataacatccttcataatcaacaagagttacctacagctcttactaaattggttaaagaggatgaagttgtgtcttcagaaaaagcaaaagacagttttaatgaaaagagagttgcagtggaagctcctatgagggaggaatatgcagacttcaaaccatttgagcgagtatgggaagtgaaagatagtaaggaagatagtgatatgttggctgctggaggtaaaatcgagagcaacttggaaagtaaagtggataaaaaatgttttgcagatagccttgagcaaactaatcacgaaaaagatagtgagagtagtaatgatgatacttctttccccagtacgccagaaggtataaaggatcgttcaggagcatatatcacatgtgctccctttaacccagcagcaactgagagcattgcaacaaacatttttcctttgttaggagatcctacttcagaaaataagaccgatgaaaaaaaaatagaagaaaagaaggcccaaatagtaacagagaagaatactagcaccaaaacatcaaacccttttcttgtagcagcacaggattctgagacagattatgtcacaacagataatttaacaaaggtgactgaggaagtcgtggcaaacatgcctgaaggcctgactccagatttagtacaggaagcatgtgaaagtgaattgaatgaagttactggtacaaagattgcttatgaaacaaaaatggacttggttcaaacatcagaagttatgcaagagtcactctatcctgcagcacagctttgcccatcatttgaagagtcagaagctactccttcaccagttttgcctgacattgttatggaagcaccattgaattctgcagttcctagtgctggtgcttccgtgatacagcccagctcatcaccattagaagcttcttcagttaattatgaaagcataaaacatgagcctgaaaaccccccaccatatgaagaggccatgagtgtatcactaaaaaaagtatcaggaataaaggaagaaattaaagagcctgaaaatattaatgcagctcttcaagaaacagaagctccttatatatctattgcatgtgatttaattaaagaaacaaagctttctgctgaaccagctccggatttctctgattattcagaaatggcaaaagttgaacagccagtgcctgatcattctgagctagttgaagattcctcacctgattctgaaccagttgacttatttagtgatgattcaatacctgacgttccacaaaaacaagatgaaactgtgatgcttgtgaaagaaagtctcactgagacttcatttgagtcaatgatagaatatgaaaataaggaaaaactcagtgctttgccacctgagggaggaaagccatatttggaatcttttaagctcagtttagataacacaaaagataccctgttacctgatgaagtttcaacattgagcaaaaaggagaaaattcctttgcagatggaggagctcagtactgcagtttattcaaatgatgacttatttatttctaaggaagcacagataagagaaactgaaacgttttcagattcatctccaattgaaattatagatgagttccctacattgatcagttctaaaactgattcattttctaaattagccagggaatatactgacctagaagtatcccacaaaagtgaaattgctaatgccccggatggagctgggtcattgccttgcacagaattgccccatgacctttctttgaagaacatacaacccaaagttgaagagaaaatcagtttctcagatgacttttctaaaaatgggtctgctacatcaaaggtgctcttattgcctccagatgtttctgctttggccactcaagcagagatagagagcatagttaaacccaaagttcttgtgaaagaagctgagaaaaaacttccttccgatacagaaaaagaggacagatcaccatctgctatattttcagcagagctgagtaaaacttcagttgttgacctcctgtactggagagacattaagaagactggagtggtgtttggtgccagcctattcctgctgctttcattgacagtattcagcattgtgagcgtaacagcctacattgccttggccctgctctctgtgaccatcagctttaggatatacaagggtgtgatccaagctatccagaaatcagatgaaggccacccattcagggcatatctggaatctgaagttgctatatctgaggagttggttcagaagtacagtaattctgctcttggtcatgtgaactgcacgataaaggaactcaggcgcctcttcttagttgatgatttagttgattctctgaagtttgcagtgttgatgtgggtatttacctatgttggtgccttgtttaatggtctgacactactgattttggctctcatttcactcttcagtgttcctgttatttatgaacggcatcaggcacagatagatcattatctaggacttgcaaataagaatgttaaagatgctatggctaaaatccaagcaaaaatccctggattgaagcgcaaagctgaatga

SEQ ID NO: 4530 - DNA, 2050 bp, Homo sapiens
cgcggctctgagacgcggccccggcggcggcggcagcagctgcagcatcatctccaccctccagccatggaagacctggaccagtctcctctggtctcgtcctcggacagcccaccccggccgcagcccgcgttcaagtaccagttcgtgagggagcccgaggacgaggaggaagaagaggaggaggaagaggaggacgaggacgaagacctggaggagctggaggtgctggagaggaagcccgccgccgggctgtccgcggccccagtgcccaccgcccctgccgccggcgcgcccctgatggacttcggaaatgacttcgtgccgccggcgccccggggacccctgccggccgctccccccgtcgccccggagcggcagccgtcttgggacccgagcccggtgtcgtcgaccgtgcccgcgccatccccgctgtctgctgccgcagtctcgccctccaagctccctgaggacgacgagcctccggcccggcctccccctcctcccccggccagcgtgagcccccaggcagagcccgtgtggaccccgccagccccggctcccgccgcgcccccctccaccccggccgcgcccaagcgcaggggctcctcgggctcagtggttgttgacctcctgtactggagagacattaagaagactggagtggtgtttggtgccagcctattcctgctgctttcattgacagtattcagcattgtgagcgtaacagcctacattgccttggccctgctctctgtgaccatcagctttaggatatacaagggtgtgatccaagctatccagaaatcagatgaaggccacccattcagggcatatctggaatctgaagttgctatatctgaggagttggttcagaagtacagtaattctgctcttggtcatgtgaactgcacgataaaggaactcaggcgcctcttcttagttgatgatttagttgattctctgaagtttgcagtgttgatgtgggtatttacctatgttggtgccttgtttaatggtctgacactactgattttggctctcatttcactcttcagtgttcctgttatttatgaacggcatcaggcacagatagatcattatctaggacttgcaaataagaatgttaaagatgctatggctaaaatccaagcaaaaatccctggattgaagcgcaaagctgaatgaaaacgcccaaaataattagtaggagttcatctttaaaggggatattcatttgattatacgggggagggtcagggaagaacgaaccttgacgttgcagtgcagtttcacagatcgttgttagatctttatttttagccatgcactgttgtgaggaaaaattacctgtcttgactgccatgtgttcatcatcttaagtattgtaagctgctatgtatggatttaaaccgtaatcatatctttttcctatctatctgaggcactggtggaataaaaaacctgtatattttactttgttgcagatagtcttgccgcatcttggcaagttgcagagatggtggagctagaaaaaaaaaaaaaaaagcccttttcagtttgtgcactgtgtatggtccgtgtagattgatgcagattttctgaaatgaaatgtttgtttagacgagatcataccggtaaagcaggaatgacaaagcttagacctttaccttccagccaccccacagtgcttgatatttcagagtcagtcattggttatacatgtgtagttccaaagcacataagctagaagaagaaatatttctaggagcactaccatctgttttcaacatgaaatgccacacacatagaactccaacatcaatttcattgcacagactgactgtagttaattttgtcacagaatctatggactgaatctaatgcttccaaaaatgttgtttgtttgcaaatatcaaacattgttatgcaagaaattattaattacaaaatgaagatttataccattgtggtttaagctgtactgaactaaatctgtggaatgcattgtgaactgtaaaagcaaagtatcaataaagcttatagactt

SEQ ID NO: 4531 - DNA, 2226 bp, Homo sapiens
gagccgtcaccacagtaggtccctcggctcagtcggcccagcccctctcagtcctccccaacccccacaaccgcccgcggctctgagacgcggccccggcggcggcggcagcagctgcagcatcatctccaccctccagccatggaagacctggaccagtctcctctggtctcgtcctcggacagcccaccccggccgcagcccgcgttcaagtaccagttcgtgagggagcccgaggacgaggaggaagaagaggaggaggaagaggaggacgaggacgaagacctggaggagctggaggtgctggagaggaagcccgccgccgggctgtccgcggccccagtgcccaccgcccctgccgccggcgcgcccctgatggacttcggaaatgacttcgtgccgccggcgccccggggacccctgccggccgctccccccgtcgccccggagcggcagccgtcttgggacccgagcccggtgtcgtcgaccgtgcccgcgccatccccgctgtctgctgccgcagtctcgccctccaagctccctgaggacgacgagcctccggcccggcctccccctcctcccccggccagcgtgagcccccaggcagagcccgtgtggaccccgccagccccggctcccgccgcgcccccctccaccccggccgcgcccaagcgcaggggctcctcgggctcagtggttgttgacctcctgtactggagagacattaagaagactggagtggtgtttggtgccagcctattcctgctgctttcattgacagtattcagcattgtgagcgtaacagcctacattgccttggccctgctctctgtgaccatcagctttaggatatacaagggtgtgatccaagctatccagaaatcagatgaaggccacccattcagggcatatctggaatctgaagttgctatatctgaggagttggttcagaagtacagtaattctgctcttggtcatgtgaactgcacgataaaggaactcaggcgcctcttcttagttgatgatttagttgattctctgaagtttgcagtgttgatgtgggtatttacctatgttggtgccttgtttaatggtctgacactactgattttggctctcatttcactcttcagtgttcctgttatttatgaacggcatcaggcacagatagatcattatctaggacttgcaaataagaatgttaaagatgctatggctaaaatccaagcaaaaatccctggattgaagcgcaaagctgaatgaaaacgcccaaaataattagtaggagttcatctttaaaggggatattcatttgattatacgggggagggtcagggaagaacgaaccttgacgttgcagtgcagtttcacagatcgttgttagatctttatttttagccatgcactgttgtgaggaaaaattacctgtcttgactgccatgtgttcatcatcttaagtattgtaagctgctatgtatggatttaaaccgtaatcatatctttttcctatctatctgaggcactggtggaataaaaaacctgtatattttactttgttgcagatagtcttgccgcatcttggcaagttgcagagatggtggagctagaaaaaaaaaaaaaaaagcccttttcagtttgtgcactgtgtatggtccgtgtagattgatgcagattttctgaaatgaaatgtttgtttagacgagatcataccggtaaagcaggaatgacaaagcttgcttttctggtatgttctaggtgtattgtgacttttactgttatattaattgccaatataagtaaatatagattatatatgtatagtgtttcacaaagcttagacctttaccttccagccaccccacagtgcttgatatttcagagtcagtcattggttatacatgtgtagttccaaagcacataagctagaagaagaaatatttctaggagcactaccatctgttttcaacatgaaatgccacacacatagaactccaacatcaatttcattgcacagactgactgtagttaattttgtcacagaatctatggactgaatctaatgcttccaaaaatgttgtttgtttgcaaatatcaaacattgttatgcaagaaattattaattacaaaatgaagatttataccattgtggtttaagctgtactgaactaaatctgtggaatgcattgtgaactgtaaaagcaaagtatcaataaagcttatagactt

SEQ ID NO: 4532 - DNA, 4623 bp, Homo sapiens
gagccgtcaccacagtaggtccctcggctcagtcggcccagcccctctcagtcctccccaacccccacaaccgcccgcggctctgagacgcggccccggcggcggcggcagcagctgcagcatcatctccaccctccagccatggaagacctggaccagtctcctctggtctcgtcctcggacagcccaccccggccgcagcccgcgttcaagtaccagttcgtgagggagcccgaggacgaggaggaagaagaggaggaggaagaggaggacgaggacgaagacctggaggagctggaggtgctggagaggaagcccgccgccgggctgtccgcggccccagtgcccaccgcccctgccgccggcgcgcccctgatggacttcggaaatgacttcgtgccgccggcgccccggggacccctgccggccgctccccccgtcgccccggagcggcagccgtcttgggacccgagcccggtgtcgtcgaccgtgcccgcgccatccccgctgtctgctgccgcagtctcgccctccaagctccctgaggacgacgagcctccggcccggcctccccctcctcccccggccagcgtgagcccccaggcagagcccgtgtggaccccgccagccccggctcccgccgcgcccccctccaccccggccgcgcccaagcgcaggggctcctcgggctcagtggatgagaccctttttgctcttcctgctgcatctgagcctgtgatacgctcctctgcagaaaatatggacttgaaggagcagccaggtaacactatttcggctggtcaagaggatttcccatctgtcctgcttgaaactgctgcttctcttccttctctgtctcctctctcagccgcttctttcaaagaacatgaataccttggtaatttgtcaacagtattacccactgaaggaacacttcaagaaaatgtcagtgaagcttctaaagaggtctcagagaaggcaaaaactctactcatagatagagatttaacagagttttcagaattagaatactcagaaatgggatcatcgttcagtgtctctccaaaagcagaatctgccgtaatagtagcaaatcctagggaagaaataatcgtgaaaaataaagatgaagaagagaagttagttagtaataacatccttcataatcaacaagagttacctacagctcttactaaattggttaaagaggatgaagttgtgtcttcagaaaaagcaaaagacagttttaatgaaaagagagttgcagtggaagctcctatgagggaggaatatgcagacttcaaaccatttgagcgagtatgggaagtgaaagatagtaaggaagatagtgatatgttggctgctggaggtaaaatcgagagcaacttggaaagtaaagtggataaaaaatgttttgcagatagccttgagcaaactaatcacgaaaaagatagtgagagtagtaatgatgatacttctttccccagtacgccagaaggtataaaggatcgttcaggagcatatatcacatgtgctccctttaacccagcagcaactgagagcattgcaacaaacatttttcctttgttaggagatcctacttcagaaaataagaccgatgaaaaaaaaatagaagaaaagaaggcccaaatagtaacagagaagaatactagcaccaaaacatcaaacccttttcttgtagcagcacaggattctgagacagattatgtcacaacagataatttaacaaaggtgactgaggaagtcgtggcaaacatgcctgaaggcctgactccagatttagtacaggaagcatgtgaaagtgaattgaatgaagttactggtacaaagattgcttatgaaacaaaaatggacttggttcaaacatcagaagttatgcaagagtcactctatcctgcagcacagctttgcccatcatttgaagagtcagaagctactccttcaccagttttgcctgacattgttatggaagcaccattgaattctgcagttcctagtgctggtgcttccgtgatacagcccagctcatcaccattagaagcttcttcagttaattatgaaagcataaaacatgagcctgaaaaccccccaccatatgaagaggccatgagtgtatcactaaaaaaagtatcaggaataaaggaagaaattaaagagcctgaaaatattaatgcagctcttcaagaaacagaagctccttatatatctattgcatgtgatttaattaaagaaacaaagctttctgctgaaccagctccggatttctctgattattcagaaatggcaaaagttgaacagccagtgcctgatcattctgagctagttgaagattcctcacctgattctgaaccagttgacttatttagtgatgattcaatacctgacgttccacaaaaacaagatgaaactgtgatgcttgtgaaagaaagtctcactgagacttcatttgagtcaatgatagaatatgaaaataaggaaaaactcagtgctttgccacctgagggaggaaagccatatttggaatcttttaagctcagtttagataacacaaaagataccctgttacctgatgaagtttcaacattgagcaaaaaggagaaaattcctttgcagatggaggagctcagtactgcagtttattcaaatgatgacttatttatttctaaggaagcacagataagagaaactgaaacgttttcagattcatctccaattgaaattatagatgagttccctacattgatcagttctaaaactgattcattttctaaattagccagggaatatactgacctagaagtatcccacaaaagtgaaattgctaatgccccggatggagctgggtcattgccttgcacagaattgccccatgacctttctttgaagaacatacaacccaaagttgaagagaaaatcagtttctcagatgacttttctaaaaatgggtctgctacatcaaaggtgctcttattgcctccagatgtttctgctttggccactcaagcagagatagagagcatagttaaacccaaagttcttgtgaaagaagctgagaaaaaacttccttccgatacagaaaaagaggacagatcaccatctgctatattttcagcagagctgagtaaaacttcagttgttgacctcctgtactggagagacattaagaagactggagtggtgtttggtgccagcctattcctgctgctttcattgacagtattcagcattgtgagcgtaacagcctacattgccttggccctgctctctgtgaccatcagctttaggatatacaagggtgtgatccaagctatccagaaatcagatgaaggccacccattcagggcatatctggaatctgaagttgctatatctgaggagttggttcagaagtacagtaattctgctcttggtcatgtgaactgcacgataaaggaactcaggcgcctcttcttagttgatgatttagttgattctctgaagtttgcagtgttgatgtgggtatttacctatgttggtgccttgtttaatggtctgacactactgattttggctctcatttcactcttcagtgttcctgttatttatgaacggcatcaggcacagatagatcattatctaggacttgcaaataagaatgttaaagatgctatggctaaaatccaagcaaaaatccctggattgaagcgcaaagctgaatgaaaacgcccaaaataattagtaggagttcatctttaaaggggatattcatttgattatacggatctttatttttagccatgcactgttgtgaggaaaaattacctgtcttgactgccatgtgttcatcatcttaagtattgtaagctgctatgtatggatttaaaccgtaatcatatctttttcctatctatctgaggcactggtggaataaaaaacctgtatattttactttgttgcagatagtcttgccgcatcttggcaagttgcagagatggtggagctagaaaaaaaaaaaaaaaagcccttttcagtttgtgcactgtgtatggtccgtgtagattgatgcagattttctgaaatgaaatgtttgtttagacgagatcataccggtaaagcaggaatgacaaagcttgcttttctggtatgttctaggtgtattgtgacttttactgttatattaattgccaatataagtaaatatagattatatatgtatagtgtttcacaaagcttagacctttaccttccagccaccccacagtgcttgatatttcagagtcagtcattggttatacatgtgtagttccaaagcacataagctagaagaagaaatatttctaggagcactaccatctgttttcaacatgaaatgccacacacatagaactccaacatcaatttcattgcacagactgactgtagttaattttgtcacagaatctatggactgaatctaatgcttccaaaaatgttgtttgtttgcaaatatcaaacattgttatgcaagaaattattaattacaaaatgaagatttataccattgtggtttaagctgtactgaactaaatctgtggaatgcattgtgaactgtaaaagcaaagtatcaataaagcttatagactt

SEQ ID NO: 4533 - DNA, 1913 bp, Homo sapiens
gtacaaaaggacatgatattccatgttagctatatttctctctgaaaaaaaaattccttcttttagaaaagtttatcaaacatttaatctaggagaataaactattgacaactacagaatttgttcccgcagaaaatacctaaagtctctgctcatttcatgtttactaatatttcattagtcaaagcaagtcacttaaccaagctcaaagccaagagacagagatatatatcccatctcccacattaacacatactctactgagagttacattcaagtcatatggtaaagtttatggatgtaaagttctattatagagagggagtgaagaattagagaaagtaatccggtctatcacatatattattggtttggactcagaaacaaatggtttgaataaacaacttaagaagcctgatgagttataagggacttttgtgttagtgattgataccacatttacaatcacagtctctctaatcactttcaggggttttcatcatagattagttttgaattcatcaattatggtaagcactgaatagaaaataagggtcagataaaacacagtaggttagagatgaagagtgcgaattctattccagctctatcactgagggtgaaatctcacacatttctactgattttctcccccctcagtattatgatctcaaaaaaggagtactactcttcttttttattttttcttagtatagaaagcatacaaaaggcattgtagaattctgtgcgtagcataaattacaagaggacgattaaaatccccacaatcgtctagaagtaatttgttttcaaactttggggatatacctttctaatcattttttttcctgtgcatatataccctttttgtttttggtaaaacactgtgaacactgtttctacttttgtctcttaaatctgtgttgtgagtaacattctatgcctttaaataatcttcagtgtcatttttgtgaagatttattccacattcaccatcctttttttgtgaaatttaaatcagatgtcataaagtctttaaaaagcagaattactttgaaaataaaggtattattattatagaattttagagattaaagaaaaaacagaaactaacatttaatgaagacctactctgtgccatgccatgtgcttagaactttgtttaagccatttcatttaataacctttcaacctaatgaagcaatatagcatgatggttaaactctgtgggctataggctgtcaagttcagctgcacagcggctaactagctttatgacttttcaaatgtttatcttctttttggcttagtttctctgttacaaagtggcaataataataatagcactcacttccaaaagattgttgtaggattaaatgattggataggttcaaaatgttaggaacagtagtattcaataaacatagttattatttgctatctttcccactactccataaaccctctattaaaatacaaatccacattgattttaactgctttggtgtagaagtggattctaagaagaggcaatgtgaaataaatggaaaagccaaggattttatgttttttaatcctggctcccagccttctaataattttgcctctgggaattttgtcaagatttacaggctgggcgtggtggctcacgcctgtaatcccagcactttgggaggccaagggaggtggatcacctgaagtcaggagtttgagaccagcctagccaacatggcaaaaccccaactctactaacaatacaaaaattaaccgggcgtggtggcacacgcctaatagtcccagctactttggaggctaaggcagaaggatcgcttaaacccgggagacggaggttgcagtgagccaagatcgcaccactgcactgcaatctgggttacggagtgagactccgtctc

SEQ ID NO: 4534 - DNA, 2991 bp, Homo sapiens
cgactgcagagcgcggtgctcttacagcctgttccaagtgtggcttaatccgtctccaccaccagatctttctccgtggattcctctgctaagaccgctgccatgccagtgacggtaacccgcaccaccatcacaaccaccacgacgtcatcttcgggcctggggtcccccatgatcgtggggtcccctcgggccctgacacagcccctgggtctccttcgcctgctgcagctggtgtctacctgcgtggccttctcgctggtggctagcgtgggcgcctggacggggtccatgggcaactggtccatgttcacctggtgcttctgcttctccgtgaccctgatcatcctcatcgtggagctgtgcgggctccaggcccgcttccccctgtcttggcgcaacttccccatcaccttcgcctgctatgcggccctcttctgcctctcggcctccatcatctaccccaccacctatgtccagttcctgtcccacggccgttcgcgggaccacgccatcgccgccaccttcttctcctgcatcgcgtgtgtggcttacgccaccgaagtggcctggacccgggcccggcccggcgagatcactggctatatggccaccgtacccgggctgctgaaggtgctggagaccttcgttgcctgcatcatcttcgcgttcatcagcgaccccaacctgtaccagcaccagccggccctggagtggtgcgtggcggtgtacgccatctgcttcatcctagcggccatcgccatcctgctgaacctgggggagtgcaccaacgtgctacccatccccttccccagcttcctgtcggggctggccttgctgtctgtcctcctctatgccaccgcccttgttctctggcccctctaccagttcgatgagaagtatggcggccagcctcggcgctcgagagatgtaagctgcagccgcagccatgcctactacgtgtgtgcctgggaccgccgactggctgtggccatcctgacggccatcaacctactggcgtatgtggctgacctggtgcactctgcccacctggtttttgtcaaggtctaagactctcccaagaggctcccgttccctctccaacctctttgttcttcttgcccgagttttctttatggagtacttctttcctccgcctttcctctgttttcctcttcctgtctcccctccctcccacctttttctttccttcccaattccttgcactctaaccagttcttggatgcatcttcttccttccctttcctcttgctgtttccttcctgtgttgttttgttgcccacatcctgttttcacccctgagctgtttctctttttcttttctttctttttttttttttttttaagacggattctcactctgtggcccaggctggagtgcagtggtgcgatctcagctcactgcaacccccgcctcctgggttcaagcgattctcctgccccagcctcccaagtagctgggaggacaggtgtgagctgccgcacccagcctgtttctctttttccactcttcttttttctcatctcttttctgggttgcctgtcggctttcttatctgcctgttttgcaagcaccttctcctgtgtccttgggagccctgagacttctttctctccttgcctccacccacctccaaaggtgctgagctcacatccacaccccttgcagccgtccatgccacagccccccaaggggccccattgccaaagcatgcctgcccaccctcgctgtgccttagtcagtgtgtacgtgtgtgtgtgtgtgtgtgtttggggggtggggggtgggtagctggggattgggccctctttctcccagtggaggaaggtgtgcagtgtacttcccctttaaattaaaaaacatatatatatatatatttggaggtcagtaatttccaatgggcgggaggcattaagcaccgaccctgggtccctaggccccgcctggcactcagccttgccagagattggctccagaatttttgccaggcttacagaacacccactgcctagaggccatcttaaaggaagcaggggctggatgcctttcatcccaactattctctgtggtatgaaaaagaaaaaaaaaaaaaaagaaggagtcggggccgggcgtggtggctcacgcctgtaatcccagcactttgggagaccaagtcaggcaatcatctgaagtcaggagttcaagaccagcctggccaacatggtgaaagcatgtctctattaaaaatacaaaaattagccgggcgtggtggcgggcgcctgtaatcccaggtatttggggggactgagacaggagaatcccttcaacccgggaggtggaggttgcagtaagtcaagatggcaccactgtgctccagcctgggggacagagcgagactccatctcaaaaaaaaaaaggaatcggacgaagaaccacaggatgttgaagacaactgtctgaagtatttgtgagggacagcgatgtggccctctgtgttaagaataacgtgtcctgctttggcagagagaagaaaatagccactgcccgctttcaaggcaagatcgaccttttctgttttgttttgtttttctttctttttcctggccatgaggacaaaaattactgagtggcccttaaagagggaagtttgttttcagctgttctcttttgcccgtaggtgggagggtggggattgctgcgtcctagctagaggaatggctttgcttgaatgtgtagtgcacacgcacgggtgtttctgtgtgctagttgcttcttgctgctgcttcctgcttgtctgggactcacatacataacgtgatatatatatatatatataaatgtataaatatatattttatttttttttaaatccttggagcttctggttcctatcagttcctgttgttaatcgtagaaccgttgtcccttcccccattcccgtatccatcatgttctttttcttttaaatatcaatataaaggtaaaag

SEQ ID NO: 4535 - DNA, 6030 bp, Homo sapiens
cacgggggctcccgcgtggccgtctcggcgcctgcgtgacctccccgccggcgggatgtggcgactacgtcgggccgctgtggcctgtgaggtctgccagtctttagtgaaacacagctctggaataaaaggaagtttaccactacaaaaactacatctggtttcacgaagcatttatcattcacatcatcctaccttaaagcttcaacgaccccaattaaggacatcctttcagcagttctcttctctgacaaaccttcctttacgtaaactgaaattctctccaattaaatatggctaccagcctcgcaggaatttttggccagcaagattagctacgagactcttaaaacttcgctatctcatactaggatcggctgttgggggtggctacacagccaaaaagacttttgatcagtggaaagatatgataccggaccttagtgaatataaatggattgtgcctgacattgtgtgggaaattgatgagtatatcgattttgagaaaattagaaaagcccttcctagttcagaagaccttgtaaagttagcaccagactttgacaagattgttgaaagccttagcttattgaaggacttttttacctcaggtcacaaattggttagtgaagtcataggagcttctgacctacttctcttgttaggttctccggaagaaacggcgtttagagcaacagatcgtggatctgaaagtgacaagcattttagaaagggtctgcttggtgagctcattctcttacaacaacaaattcaagagcatgaagaggaagcgcgcagagccgctggccaatatagcacgagctatgcccaacagaagcgcaaggtgtcagacaaagagaaaattgaccaacttcaggaagaacttctgcacactcagttgaagtatcagagaatcttggaacgattagaaaaggagaacaaagaattgagaaaattagtattgcagaaagatgacaaaggcattcatcatagaaagcttaagaaatctttgattgacatgtattctgaagttcttgatgttctctctgattatgatgccagttataatacgcaagatcatctgccacgggttgttgtggttggagatcagagtgctggaaagactagtgtgttggaaatgattgcccaagctcgaatattcccaagaggatctggggagatgatgacacgttctccagttaaggtgactctgagtgaaggtcctcaccatgtggccctatttaaagatagttctcgggagtttgatcttaccaaagaagaagatcttgcagcattaagacatgaaatagaacttcgaatgaggaaaaatgtgaaagaaggctgtaccgttagccctgagaccatatccttaaatgtaaaaggccctggactacagaggatggtgcttgttgacttaccaggtgtgattaatactgtgacatcaggcatggctcctgacacaaaggaaactattttcagtatcagcaaagcttacatgcagaatcctaatgccatcatactgtgtattcaagatggatctgtggatgctgaacgcagtattgttacagacttggtcagtcaaatggaccctcatggaaggagaaccatattcgttttgaccaaagtagacctggcagagaaaaatgtagccagtccaagcaggattcagcagataattgaaggaaagctcttcccaatgaaagctttaggttattttgctgttgtaacaggaaaagggaacagctctgaaagcattgaagctataagagaatatgaagaagagttttttcagaattcaaagctcctaaagacaagcatgctaaaggcacaccaagtgactacaagaaatttaagccttgcagtatcagactgcttttggaaaatggtacgagagtctgttgaacaacaggctgatagtttcaaagcaacacgttttaaccttgaaactgaatggaagaataactatcctcgcctgcgggaacttgaccggaatgaactatttgaaaaagctaaaaatgaaatccttgatgaagttatcagtctgagccaggttacaccaaaacattgggaggaaatccttcaacaatctttgtgggaaagagtatcaactcatgtgattgaaaacatctaccttccagctgcgcagaccatgaattcaggaacttttaacaccacagtggatatcaagcttaaacagtggactgataaacaacttcctaataaagcagtagaggttgcttgggagaccctacaagaagaattttcccgctttatgacagaaccgaaagggaaagagcatgatgacatatttgataaacttaaagaggctgttaaggaagaaagtattaaacgacacaagtggaatgactttgcggaggacagcttgagggttattcaacacaatgctttggaagaccgatccatatctgataaacagcaatgggatgcagctatttattttatggaagaggctctgcaggctcgtctcaaggatactgaaaatgcaattgaaaacatggtgggtccagactggaaaaagaggtggttatactggaagaatcggacccaagaacagtgtgttcacaatgaaaccaagaatgaattggagaagatgttgaaatgtaatgaggagcacccagcttatcttgcaagtgatgaaataaccacagtccggaagaaccttgaatcccgaggagtagaagtagatccaagcttgattaaggatacttggcatcaagtttatagaagacattttttaaaaacagctctaaaccattgtaacctttgtcgaagaggtttttattactaccaaaggcattttgtagattctgagttggaatgcaatgatgtggtcttgttttggcgtatacagcgcatgcttgctatcaccgcaaatactttaaggcaacaacttacaaatactgaagttaggcgattagagaaaaatgttaaagaggtattggaagattttgctgaagatggtgagaagaagattaaattgcttactggtaaacgcgttcaactggcggaagacctcaagaaagttagagaaattcaagaaaaacttgatgctttcattgaagctcttcatcaggagaaataaattaaaatcgtactcataatcagctctgcatacatctgaagaacaaaaacatcaacgtcttttgtccagcctctttttcttctgctgttccacctttctaaacatacaataaagtcatgggataaaaataatcgatgtatgttacgggcgctttaaccatcagctgcctctcgaatggaagaacagtggtaatggattaacatcctattttgttgtactaaagtgacaaatcggaataatataattggtatggccattaggttcagtccttgaagataagaaacttgttctctgtttgttgtcttatttgtggtggcactcgtttaatggattaactgaggttgctcaatgttcagtttcttttccagaaatacaatgctaggtgttttgaaataaaacttatatagcaattgtttaaagttatcaattgtatataaaatcacagtagcctgctaaatcattgtatgtgtctgtagtattctattcccagaaactatttgaccatgataattcagtttatattcaccacatgaaagaaaaatgggtaacagaagaacccttaaaacaggttaatttggattgtaacgttcagtgaaagaaatttcaacccttcatagccagcgaagaaatttgccttggaagccaagtcagtaccagcttacctatttgattcagttgctgttttctcactctctatatccatttgaaattgatttattttagatgttgtatacttacgttaggctttctgttaatagtggtttttctcctgttgacagagccaccggattatgacacaggatgaggaagattaaggataatcaattgactaatttcatttagaatattatcaaacatttcaactaggtatcagaaaaaggctttctttcataagactattttaaatagaaattatttcaacaattaaagtaatgttgaccatccccctctcagctgaataaagaaaaatttagttcaatttattgcaatttaattacaatactaccttcacaacattttcatgtgttttaaataaatattttttaattggctaaaggacattcaagcaaagaaatgctttctttacttaaaatgtctatctcatttgctgccttttcactaagcctttactttgttaataaaagtgtccattgtgtgatgtttttgattttacagtttgctaaatcttattttcttggagttgctttttggtaacagccccattgctactccccattttattgttttacatcaatgcatgcttcgttgtgatccctcaagatgtaacacttggtatgctcggttgaggatatgaaaaaatacttccgaaaccaggaattcaatgtatgtttgttttatactgtttgataagaaaagtaggtccagccttaagcagcacagatgcgctggtagatgcatagtcaggaactttttttatttcttttaggtctagggacaggagtgaatagaaagggaggagagctctattatgttctatacacagattaggagatgaccttactgggtacacccctctaaccagtgcttacaggttaatgcatgttaatgaatatttttgcagttgtaaagcataacaattacaactacacatctatttctaaagaataaaacaggaccatatttatttacttctgtcaactatagaaagaaagaccttcagctgtatttccacagatttctcccaagggaaaaggctaatattagtcactactgttatcacatccctttgtataagttttaaaaagagatggagggagatcttcatttctttgaggagatcagtattgtaacgtatgtgaatagatgataacaattaatattactaaaagtcccacatgagagtcctgacgccctctccatgccccacagtaatgtggcttctttcatgggtttttttttcttctttttagctgatctcatcctaagcatgctttatttttccttgaaagctaggtatttatcaactgcaaatgttattgaaagaaaataaaattcagtctcaaaagtaaaccctgtgtcttgggtctgtagttcaaaagtcagaaatgattctaatttaaacaaaaagatactaaatatacagaagttaaattcgaactagccacagaatcatttgtttttatgtcagaatttgcaaagagtggagtggacaaagctctgtttggaagactgaacaactgtaaatagatgatatccaaacttaatttggctaggacttcaattttaaaaatcagtgtacctaggcagtgcacagcacgaaataagtggcccttgcagcttccccgtttaacccactgtgctatagttgcgggtggaacagtcaacctttctagtagtttatgatattgccctctttgtattcccattttctacagttttttccgcagacttctttctgcaaattattcagcctccaaatgcaaatgaatgatataaaaataagtagggaacatggcagagagtggtgcttcccagcctcacaatgtgggaatttgacataggatgagagtcagagtataggtttaaaagataaaatctttagttaataattttgtatttatttattctagatgtatgtatctgaggaaagaaatctggtatttttgctttccaataaaggggatcaaagtaatggtttttctctcagttctctaagctggtctatgttatagctctagcagtatggaaatgtgctttaaaatatgcttaccttttgaatgatcatggctatatgttgttgagatatttgaaacttaccttgttttcacttgtgcactgtgaatgaactttgtattatttttttaaaaccttcacattacgtgtagatattattgcaacttatattttgcctgagcttgatcaaaggtcatttgtgtagatgagtaattaaaaaatatttaaatcac

SEQ ID NO: 4536 - DNA, 4094 bp, Homo sapiens
gccgcggatcgcgtggtctgcttggctcgccgcgcctctcccccgtccgtccatattgctgcagcccccgagccgggaagcccgggccgccccgggggcgggggggagggagggacgggactagaagcctgccgggctcggggtgggggcgtcttgcgaggaacgggcggggggggacgcacgcctaggaggcctggactgcagagtggggggccttcctccccccccgccccgctagtgggcctcggatttacggcggctgcatctaactgggagggggccgcacctcgcgtgaaccccgacccttctctgcagggactggggcccagcgccccggaggaaggcgtcgcgggcgctctgctagccaaggtgaacccgtggactaagaacgcattgccgccggtcctgaccaccgtgaacggacagtcccccccagaacactctgctccagccaaggtggtgagggcagctgttcctaaacagcgcaaaggcagcaaggttggtgactttggagatgcaatcaattggcccacacctggagagatagcccacaagagtgttcagccacagtcccacaagcctcagcctacccgtaaactgccacccaagaaggacatgaaggaacaggagaaaggagaagggagtgatagtaaggagagtccaaaaaccaaatcagatgaatcaggggaggaaaagaatggagatgaggattgccagcgaggcgggcagaagaagaaaggaaacaaacacaagtgggttccattacaaatagacatgaagcctgaagtgcccagagagaaactggcttcacgccccactcgcccaccggagcctagacacatacctgccaatcgcggagagatcaaagggtctgagtctgccacctacgtgcccgtggccccccccaccccagcctggcaaccagagatcaaaccggagcctgcctggcacgaccaggatgagacatcgagtgtgaagagtgatggggctggtggggcgcgggcttccttccgtggccgtggacgggggcgtggtcgcggccggggacgcggccggggtggcactcgaacccattttgactaccagtttggctaccgaaagtttgatggtgtggaggggcctcgtacgcccaagtacatgaacaacatcacctactactttgacaatgtcagcagcaccgagctttacagtgtggatcaggaactgctcaaagactacatcaagcgccagattgaatactacttcagcgtggacaatttagagcgagacttcttcctgcgaaggaaaatggatgctgatggtttcctacccatcacccttattgcttccttccaccgagtgcaggcccttaccactgacatttcactcatctttgcggccctaaaggacagcaaggtggtggagatcgttgatgagaaagttcgtaggagggaggaaccagaaaagtggcctcttcccccaatagtggattattcacagactgatttctcccagcttctcaactgccctgaatttgttccccgtcagcactaccaaaaggagacagagtcggcacctggctctcctcgtgcagtcaccccagtgccaaccaaaacagaggaggtcagcaacctaaagacactacccaagggcctgtctgccagcctgcctgacctggattctgagaactggattgaagtgaagaagaggcctcggccatccccagcacggcccaagaagtcagaggagtccagattttcccacctgacctctctgcctcagcagctgccttcccagcagctgatgtccaaggatcaggatgagcaagaggaactggattttctgtttgacgaggagatggagcagatggatgggcggaagaacaccttcactgcctggtctgatgaggaatctgactatgagattgatgacagggatgtcaacaagatcctcattgtcacccagacaccacattacatgcgccggcacccagggggggaccgcacaggcaaccacacctcgcgtgccaagatgagcgccgaactggccaaggtcattaatgatggcctcttctactatgagcaggacctgtgggctgaaaagtttgaacctgagtattcccagatcaagcaagaagtcgagaacttcaaaaaggtcaatatgatcagccgggagcagtttgacacactgacccctgagccccctgtggatcccaaccaggaagttcctcctgggccacctcggttccagcaagttcctacggatgccctggccaacaagttgtttggtgctcctgagccctccaccatcgcccgctctctaccaaccactgtcccagagtcaccaaactaccgcaacaccaggacccctcgcactccccggacaccacagctcaaagactcaagccagacatcacggttttacccagtggtgaaagaaggacggacactggatgccaagatgcctcgaaaaagaaagacaagacacagttcaaacccacccttggagagccatgtgggctgggtgatggattcccgtgagcacaggccccgtactgcttccatcagctccagcccctcagaagggacgcctacagttggcagctatggctgtacccctcagtcattgcccaagttccagcatccttcccatgaactgctcaaggaaaatggcttcacacaacacgtctaccataagtatcgtaggcgctgccttaatgagcggaaacgcttgggcattggccagtctcaggagatgaacacactcttccgcttctggtccttcttcctccgagatcacttcaacaaaaagatgtatgaggagttcaagcagctggctctggaggacgccaaagaaggctacagatatggtttggagtgcctttttcgatactacagttatggcctggaaaagaagttccggctggacatattcaaggattttcaggaggaaacggtgaaggactatgaagctggccaactgtatgggctggagaagttctgggccttcttgaaatattccaaagccaaaaatttggacattgaccccaaactgcaagaatacctcggcaaattccgacgtcttgaagacttccgagtagatccccccatgggtgaggagggcaaccacaagcgacactcagtggtagcaggaggtggcggcggtgagggcaggaagcggtgcccctcccagtcttccagcaggcctgctgccatgatcagccaaccccctacaccacccaccggccagcctgtccgggaagatgccaaatggacaagccagcactcgaacacacagactttgggaaagtgaaaagctccttagccctggggcttgaggggggaaaggggtagggtgggtaagagtccatgggggtgcccagtcccaggaaaggggacaatgaagggacaggcctggagttactaggacaggcctttgtgctgagtagcaatgtatacaccatttgggctatcagaggtacccctgggcaggagcctctacatccccttccccctcctctctccatgactcttgacatcctagcttcttctaaggggggagggaaaggggggagatttttatatatatatacatatatatatatcaagttttaaattattgatagttcatctggattaccaaaatcactctgcagccctgcccgaggctagtaggctgcaaccctggtccccacccctaacctcctgctccccctcaagccaactatgcagcccacaagaaggccctgcgggcccccccattgcccagcactgtctcatagaaggctctggtggtacctctgggccccaggagcatcagccccttgatcatctggggtttgtcatcaccatattttctccctgctgttcccaccatgcccttctgccatcttctgggagaaggaaaccaaaggatctaaaactggggtttgggggaaggtttcagcctctccccactccccttgccccacaccctttactccccagcccagagagacgctgcttttaccaggaaagactattgaaagatgttttattttatttttctctgacctttccatccttgaaaaaatggggaaaaaagaagaaaaaagacaaaatcgaccataaaagacc

SEQ ID NO: 4537 - DNA, 2657 bp, Homo sapiens
gtgaccccaggccctggtcactccatgctttggagggtgcttttgtcaaagaggcctcctttccctcacccagagctggatttccaagaggctcccatacctagctgccctggcagactcccagggaggaaaaacagcgtggccttggcagctgccccgaggaaggagcccacaggtgacagggagaagccattgccattccctgtcctggcccccttcagcaaccctgaacactctgctccagccaaggtggtgagggcagctgttcctaaacagcgcaaaggcagcaaggttggtgactttggagatgcaatcaattggcccacacctggagagatagcccacaagagtgttcagccacagtcccacaagcctcagcctacccgtaaactgccacccaagaaggacatgaaggaacaggagaaaggagaagggagtgatagtaaggagagtccaaaaaccaaatcagatgaatcaggggaggaaaagaatggagatgaggattgccagcgaggcgggcagaagaagaaaggaaacaaacacaagtgggttccattacaaatagacatgaagcctgaagtgcccagagagaaactggcttcacgccccactcgcccaccggagcctagacacatacctgccaatcgcggagagatcaaagggtctgagtctgccacctacgtgcccgtggccccccccaccccagcctggcaaccagagatcaaaccggagcctgcctggcacgaccaggatgagacatcgagtgtgaagagtgatggggctggtggggcgcgggcttccttccgtggccgtggacgggggcgtggtcgcggccggggacgcggccggggtggcactcgaacccattttgactaccagtttggctaccgaaagtttgatggtgtggaggggcctcgtacgcccaagtacatgaacaacatcacctactactttgacaatgtcagcagcaccgagctttacagtgtggatcaggaactgctcaaagactacatcaagcgccagattgaatactacttcagcgtggacaatttagagcgagacttcttcctgcgaaggaaaatggatgctgatggtttcctacccatcacccttattgcttccttccaccgagtgcaggcccttaccactgacatttcactcatctttgcggccctaaaggacagcaaggtggtggagatcgttgatgagaaagttcgtaggagggaggaaccagaaaagtggcctcttcccccaatagtggattattcacagactgatttctcccagcttctcaactgccctgaatttgttccccgtcagcactaccaaaaggagacagagtcggcacctggctctcctcgtgcagtcaccccagtgccaaccaaaacagaggaggtcagcaacctaaagacactacccaagggcctgtctgccagcctgcctgacctggattctgagaactggattgaagtgaagaagaggcctcggccatccccagcacggcccaagaagtcagaggagtccagattttcccacctgacctctctgcctcagcagctgccttcccagcagctgatgtccaaggatcaggatgagcaagaggaactggattttctgtttgacgaggagatggagcagatggatgggcggaagaacaccttcactgcctggtctgatgaggaatctgactatgagattgatgacagggatgtcaacaagatcctcattgtcacccagacaccacattacatgcgccggcacccagggggggaccgcacaggcaaccacacctcgcgtgccaagatgagcgccgaactggccaaggtcattaatgatggcctcttctactatgagcaggacctgtgggctgaaaagtttgaacctgagtattcccagatcaagcaagaagtcgagaacttcaaaaaggtcaatatgatcagccgggagcagtttgacacactgacccctgagccccctgtggatcccaaccaggaagttcctcctgggccacctcggttccagcaagttcctacggatgccctggccaacaagttgtttggtgctcctgagccctccaccatcgcccgctctctaccaaccactgtcccagagtcaccaaactaccgcaacaccaggacccctcgcactccccggacaccacagctcaaagactcaagccagacatcacggttttacccagtggtgaaagaaggacggacactggatgccaagatgcctcgaaaaagaaagacaagacacagttcaaacccacccttggagagccatgtgggctgggtgatggattcccgtgagcacaggccccgtactgcttccatcagtaagatggccccagtgtgtgtttcctgtttcccaaagcaagctttgagagccacctacctatgaccaatgctctctactccctgcagagatggcacagactgcaaataggcatgcttttgaagaaaatatacaattgatctttgaacaacgaagggcgtggggtgcccagctgcacacagttgaaaatccgtgtataacttttgactctccaaaagcctactgttaaccagaagccttaccaataacatatagtcaattagcacatgttttgcatattatatgtattacatactgtattcttacaataagctaaataa

SEQ ID NO: 4538 - DNA, 2525 bp, Homo sapiens
gaagagctcccaccttctctggatgtgcctgggcttggactggctagaatctttctctggactgttgcatgtacagtgcctccatcctggaggcaagagagttgggagtggctcgaatcagagccgtgcccaagatatccctgctgttgcatcgtttgaagctgacgtcctgtgtctgtacactgctgccactgttgtgtcctcgctctgcttgctgttgcctcacgccaggccccgtcctgccgtgacacccttcatcctacccttggaaccccaaggccaagttggttcaaactgttggagaacagagttggcctgcatctggaacacacttgtcctcagcttaccatctcctcacaccccagagtggaaaggtgaacacctgcagctgaggcttggaaacgtttcttgtgttgccctgaaaaatctttgagacctcagggaggctctgtctctcttaaaaggtggagaaagatgccattctctccctaaggtctggtggagtctccccatcttgcatacccttctgcaagccatctatctctgctcactctccaattgacccgcctgggaacaagggatgaggaggagttgggggctggggggaatcctgccagttggtgaagccctgtggcaggaaggtatatgtggacatagagtatacctgattctctttcttcagccactgactgcttgggttgggctgtgaatgataatggaatggctggagtctgctgttgtcagaaggcagggagggtgatgaaggactgacccacatggactgggatgtgtgtcggttatgggcatgactgcacgttcactctcagtgggatctgggcaacatggagttcattgtcctgttgcttacttactgcaatgtctttggccctccttttcaactggttcctctgttgggcccaaaggttgggagtaggagacagtatcccaggctgacaagggcttgccctttaccttgggcaccttgttaatttttagcctgtgcccttccccacctttgccctcccagtggttggtatgtgggaagcccatctcagttcctgtgacttcatgtctcaaaccaaggatgagcgtctggtctctgctatgatggtggtatccgaggcctttccctgcccagtctggtgcctgccccacattgtaccggacactggattcctggacccccttctcctttcctttctttccttcaggtcacgcagccctgtactgtatccagcaccacagaaacctcagtgtttttcctctgctggtttggggcacaaggaagccttagggtatggggaaaggctgttattacctagagtttactcccaggccagggggctgccatcttcttcacagacatccctgaaaggaagcccctttggggcagggaggtgaggacttcatctcaacatcggctggtggttggtaggggagctttttcttttctttcctttttttttgttttcgtttttggttttgtttttggtaacatgttaggagttaatgttgcaaagagtagtttacatcttcactttctgaagacacttgaatttaggaccgagtatctgtgacaagcatgccagaagtggcaggggccatacgggctaccccttcacacctccctcgtcccatggggatccaagacctgagataaagcaacagcctgcccagatccctctgttcatcctatcccttccaaggttggtccatgccaacataacctctgggcatcagacatcagcaggtctgtgtgcctcagccctgttaaggggcaggtttctctttagccctcttcctgcacttgggagcaaaggcactaccagtagagaagggccatccagccgtgccccagcctggacccctggggctcagatagaggtgctgagcccctgtgtcaaagttgttaaatgtttttgttttgttccattgtagctcttttttttttttttttccctttcctggtgattgattttacaaaagaaagtaagctgcttagaaggccctggaagggaagtgaggaggagggacaaggaagatgactagttacggagggtgagggttgttttttgccaaaaagcctgggtagagtgatctgaattatctggcaccctcctgaatggaaccccagagtacctcctgtgtggaagggtccctggattttccctaacacccaccctctcccccttcagccatgctgatggcagagaagataagaacttggagcccatttctcactggagaggaaaacttgtcatctggctttgcggagaaggttccaccttacgctcgtagtacattatctttactatgtgctaggatatcatatttaaaaggacaaaaaaatgtaaaatacttgaatgagcttgtattataacattaatattattgagagtatctgctttccaggctgaagtgattcattcattattctagtcctgctttagtcctttgtaatttgtggtaattatgcttttctttttaatacaaaaaaatgtataaaaataaacacttgaaaaggc

SEQ ID NO: 4539 - DNA, 1094 bp, Homo sapiens
gtgctgcacttagctgcatttctaagtttctgattcttgcaagtttgtggaaacagaggagtctttaacccacatcagccttgatctaagtgtaccactttacttaaaagttcgtgggatctggagctcctggtctagcaagccatgaaaatgccaataaatgtttgtaataaagcttttatttaaacatccattttgttcgaccttgaagctttactaatatgctgaagaacaaacagccgacgccagtgaatattcgggcttcgatgcagcaacaacagcagctagccagtgccagaaacagaagactggcccagcagatggagaatagaccctctgtccaggcagcattaaaacttaagcagagcttaaagcagcgcctgggtaagagtaacatccaggcacggttaggccgacccataggggccctggccaggggagcaatcggaggacgaggcctacccataatccagagaggcttgcccagaggaggactacgtgggggacgtgccaccagaaccctacttaggggcgggatgtcactccgaggtcaaaacctgctccgaggtggacgagccgtagctccccgaatgggcttaagaagaggtggtgttcgaggtcgtggaggtcctgggagagggggcctagggcgtggagctatgggtcgtggcggaatcggtggtagaggtcggggtatgataggtcggggaagagggggctttggaggccgaggccgaggccgtggacgagggagaggtgcccttgctcgccctgtattgaccaaggagcagctggacaaccaattggatgcatatatgtcgaaaacaaaaggacacctggatgctgagttggatgcctacatggcgcagacagatcccgaaaccaatgattgaagcctgcccatcctcccatgagagactcttgttagtcaacacatctgtaaataaccttgagataacagatgagaagaaatctgattgatgctggatggacctatcacaataggctgtggacttacttgccaccagcttgtgcatttagtgtgttccttttactttttgatactgtgttgtatgaaacccttttgtcctttg

SEQ ID NO: 4540 - DNA, 1830 bp, Homo sapiens
ctaggacaactcaaaatattttttcaaatctcccctacattgttcctgtgtcagaaaaactcagtctcctgacacatgaggtcagctagctcattagacttgataagtttaaggacaggtgagatgactttccagaagggtctccaataaacttaatttgaaaactgtcttgtcttcacacccctgatgctctgtgctcttgttaccacctccctatcttaccaaatggggttatctgtcatgtattttaattatgaacttagtgaatctcaaatgttaggtaattttatcttaggattgattaaggttttttaaaattatagttgccagttaattattttcctttattgatagaataaaatttgttaaaatagcatttagagatgatcatgtgatagaggattcattatgtgtgctttccatgtgttgctttctacccattgtgtttcctttttttccagatttctcctctttgccctgcccttcagcttttctcagctaggccccactgctctaaggggcatttactacagcacctattaaacttacttgtaactgtctctttttttttttttttcccctttgggccaggtcggggtatgataggtcggggaagagggggctttggaggccgaggccgaggccgtggacgagggagaggtgcccttgctcgccctgtattgaccaaggagcagctggacaaccaattggatgcatatatgtcgaaaacaaaaggacacctggatgctgagttggatgcctacatggcgcagacagatcccgaaaccaatgattgaagcctgcccatcctcccatgagagactcttgttagtcaacacatctgtaaataaccttgagataacagatgagaagaaatctgattgatgctggatggacctatcacaataggctgtggacttacttgccaccagcttgtgcatttagtgtgttccttttactttttgatactgtgttgtatgaaacccttttgtcctttgatttggttttttgtttttgtttttttaggggggagggggggtttcccctcctttgcccagacttctctttgaacacaaatgcattagccttgtggctagaacaccctcttcctacctctgtctcccctcacttgtcatatgctctgacatgctaacatttcttttgttcatccctgttgcccccacagaaacatcccagaaaaaccggtcagtgttccttcctccctgatccttaggtttctgaaatagggttctgttacatcctcttcgatagcctgtttaaaatgtttagaaggtctggagctcaaaaatgcgttcttccacattgataatttagtaaactgagaacattgacatcactacagggcagcataagaggttgcttacatgtggtagcagctctggtttgattcaagttgctaccatgtacattgacagcacatataccataaccagcgtgttgggttgaattgcactttctacctttgtatgagatttacagactttccttctgggtttgtatcatgaccagaggggtactatagggttggtttatactgcaatatagaggatcagaagccatttgatttggtaggtgtgtcagaagggagaatgatggcagacgaactgctggaagaggtcagaagatagccatgctaaaatgcaattatatcctcatgtttatcccaaactaatcttggacttttccactcattagctttgttttgcccttgtttcccttgaaggtttaagttcaaccatattctgtcaactgttcagtttcagtggaatcttgtatttctggttcattataacaaactgttcgcttaaa

SEQ ID NO: 4541 - DNA, 2533 bp, Homo sapiens
tattacctgaaaacttaaaagaaggcctgaaggaatcttcctggagttcattaccatgtactaaaaacagaccttttgattttcattcagtgatggaagagtctcagtctctcaatgaacctagcccaaagcagagtgaagaaataccagaggtcacttcagagcctgtcaaaggaagcttaaaccgtgctcagtcagcacagtctataaattcaacagaaatgcctgccagagaggactgtttaaaaagagtgtcctcagaacctgttctgtcagttcaagaaaaaggtgttctgctgaaaagaaagttgtctcttttagaacaggatgtgattgtaaatgaagatggaagaaataagctgaaaaaacaaggagaaactcccaatgaagtctgtatgttttccttagcttatggtgatattccagaagaattaatcgatgtctcagatttcgagtgttctctctgcatgaggttgttttttgagccagtaacaaccccttgcggacattcgttctgtaagaattgtcttgagcgttgtttagatcatgcaccatattgtcctctttgcaaagaaagcttaaaagagtatctagcagataggaggtactgtgtcacacagctgttggaagaattaatagtgaagtatctgcctgatgaactgtctgagagaaaaaaaatatatgatgaagaaactgctgaactctcacacttgaccaagaatgttccaatatttgtttgcactatggcctaccccactgtgccttgccctctccatgtatttgagccaagatacagattgatgattcgaagaagtatacagactggaaccaaacagtttggcatgtgtgtcagtgatacacaaaatagttttgcagattatggttgtatgttacaaattagaaacgtgcatttcttaccggacggaaggtctgtggttgatacagttggaggaaagcggtttagggttttaaaaagaggaatgaaagatggatattgcactgccgacattgaatatctggaagatgttaaggttgagaatgaagatgagattaagaatctcagagagcttcatgatttggtttactctcaagcctgcagctggtttcagaatttaagagacagatttcgaagccaaattcttcagcatttcggatcaatgcccgagagggaggaaaaccttcaggcagcccctaatggacctgcatggtgttggtggcttcttgcagttctccctgtagacccacgataccagctgtcggttttgtcaatgaagtctttgaaagaacggttgaccaagatacagcatatactgacctatttttctagagaccaatctaagtaactaactctttggatctccctttaaagtgaccctaatctggctgcattgatggccagattgtctgctgcctttgcacatctagtgctggtttcagaaatttaatgaaacttttctttttccttcgacctcctgaatcatgtggttctgcaaatgaataccttcaactaggatttagaccactaagaacttgcacagaaaaacacgcattgaatgtgtgtcgaacctctacattgtgaagttgcactatgtaccatactctaaaatgaaataagaactctttatgtctgtgagagagtgtgtgtgtgtgtgtgcgtgcgtgtgtgcttgtgggggttgggtagtgtgtgtgtattttctctggctttaaaattttaaaacaaacaaacaaaaaagccatagagagcagaacttgccgagggtcatttattgcccaagtttacaagagtagcgatacaagtttttgcaaattgaatttgcctcagatatatctgtcctaatgcttatatttgcacaagtatgtaaaatatcgtgttgaggatcattctttgttggaaatactgctcttgctgaactgtcttgaccattgactatgacacagtttcttatttatgtaaatacttgcatcacagtggccgacaggcattggatgcagaacctagagccagttttcaggaacaattgtaaacctgacatggtactgtgcatctattcataaaacactcaaaactgtgaaaatatggtttacatttaattgtacataaaggtaaagggagaactcaattcagtaccagttagtttgtacattttagggggcttttcacattaactgcccatttgtgtaatttatagtttgacatgatgtgtttgttttaaaaaaaaatgcatagtataaacccattaaggatctgggaaaagagaagaagtttaatatagaactaagcttttaaagtttgtttttgtttttaattctggtctcggtgcaaatgttagttatgccttattcatatcacagttagatcaccatgctgcaacatggtttatattcatgctgccctagaaacttttgtaattatttgttgcaaatttgtgactgtccttattaactttcttttatgtaagtaatttgtaaaagtttcttaaaatttttgcttttgcttatttaattttgaataaaagctaaattcctaata

SEQ ID NO: 4542 - DNA, 3272 bp, Homo sapiens
ttcggcttgctcggcggagcaagatggcggacatctccctggacgaactcatcaggaagcgcggggcggcggcgaaaggacggcttaatgccagaccgggagttggaggtgtccgatctcgagttgggatccagcaaggccttctcagccagtcaacacgcacagccaccttccagcagagatttgatgcccggcagaagattggcctctcagatgcccggctcaaactgggagtcaaggatgcccgggagaagcttttgcagaaagatgcccgatttcgaatcaaagggaaagtgcaggatgccagagagatgttgaactctcgcaagcagcagaccacggtgccccagaagccccgccaggttgctgatgcccgggagaagatcagcttgaagaggagttcccctgctgccttcataaacccacccattgggacagtgacccctgctctgaagctcaccaaaaccatccagaatttatatgacctggatgaagatgatgatggtatagcttccgttcctactaaacagatgaagtttgcagcctcaggcggctttctccaccacatggctgggctaagcagttccaagctttccatgtccaaggccctccctctcaccaaagtggttcagaatgatgcatacacagctcctgctctcccttcctctattcgaacaaaagccttgaccaacatgtcccggacactggtgaacaaggaagaaccccccaaagagctgccagctgctgagcctgttctcagcccattggaaggcaccaagatgactgtgaataatctgcaccctcgagtcactgaggaggacattgttgagcttttctgtgtgtgtggggccctcaagcgagctcgactggtccatcctggggtagcggaggtggtgtttgtgaaaaaggacgatgccatcaccgcatataagaagtacaacaaccggtgtctggacgggcagccgatgaagtgcaaccttcacatgaatgggaatgttatcacctcagaccagcccatcctgctgcggctgagtgacagcccatcaatgaaaaaggagagcgagctgcctcgcagggtgaactctgcctcctcctccaacccccctgccgaagtggaccctgacaccatcctgaaggcactcttcaagtcctcaggggcctctgtgaccacgcagcccacagaattcaaaatcaagctttgagcaggggagtgaggcagccagaagtgggggcagaggagggtggctctgtttccccaaggcaaagcttatgaccaatgggccatcggactggagacccctgattgtgggaagggttgccagggataaagagcttcctcactggatgggacccgcctttctgtgttgtgttctgccctgtgctcttctctctacgttaacgtttcctgtagtatgtttcttcatctcatcgccaaggtaggcttgtgtttttcagtgtgtgcctccccgagcctcagccccaagctgatttcttatctggaaatggtacactgaattctctgggtggctttcttgtggccccatgggatgcagcgtgggggctgtctgaaggaccctgctttttccaggggccgaggggctgcctttcctttgtgtgtattaagcttttcaaacaatggaggggatggagagccctggtgtcctgacgggagccaggtcggcctgagagctgtgccgctcctctgtcttgtcagtggaggtgcctgggtggggagcaggtctcaggcctcttgtcctctccccagtggctccaggcctcactagtggcaagggcaggatgaggctgcaccgctgggaagagtctatctaagctcttggcttggagtcccgtgtcgtctccacccagaggaagttctccagagttcacctttcccttttccttgagttgtgctgaatgccccaccccagctctctttcccttctgggtgtctttgctgggagggggctgtgttgtgagccctcccggttctcacctcgcctggcacttaaccacaccctggttttgtgtagccgccagctctcttctggttgggcctttgaaaggctcagcctcccattgtgcagtgcttgggtttggagcttatttgaatggaagaggtcagtttgttcctggctctccatttctggcctcagttgtctacaggacagtggtcagggatgcctggaggcatatatccagctgccaccaaggggcactgtttgttcccacttatgtgagtgaccccatccatccatgaccagaggattattttcctgccttggcagaggaggaggagtcaagggagcagggcagctctaccaggcaaggtgtttccccagcataggcgcagacagttgggacgaaacttcagagcccaggcagtccctgaatgaccaggccagtgttgtcactgagtggtcccctgctggttgggagtgaagagaatccaggctggcagagctggagccagttggggagcacggttctgggagctctgcaaaatcagtagcaagtgctggaaaaggcacatgccgaagatactcaagagctcccaagatttgcttgaggctagcccagtgaaaaaaaccagagactcatgtttccaggggtcagtctgtcaggcaggaaggacccaggatttgaacccagcttcagtgtgcaggctctgaggctgcccaggacgggaaagtccaaggaaggggcctggtggtgctccacttgcagttctttaaagaatgctgctttttattctcctaaccctttcaagtgggtgcagacttctcgttagcagctggaagacattcctcccacacttttcccttcctggcccaagagagcatccagaaggcagtaggacctggtttttcaggtactgggagccgggggctcactgcttgcactgtgcttagggtagggatggtaaatatcctccctgcatggctttatcctccctctcatcccaaagcaggtatcttctggttgtcacagagtttcattgagtccagctgcagccacgtggccatctggagctggtgctataggtgaccatctggtacattgaggggacctgtttgcctcctccactctataagcagtcatcttgggagaccgggaggagaaggtggtgggctagtcctgtgtcctcctccacttcccatgcctctatgttacccatctgtgtctcctgtgcagaaggagaggaaggggcattaagagatgaagggtgattatgtattacttatccatttctgaataaacatttgttattccta

SEQ ID NO: 4543 - DNA, 3439 bp, Homo sapiens
cgagagttggtccgcggacgccggaagtagttcgtcgctccctagcggccgaaggggcgggctcgcggggtctcgactgctttcggcttgctcggcggagcaagatggcggacatctccctggacgaactcatcaggaagcgcggggcggcggcgaaaggacggcttaatgccagaccgggagttggaggtgtccgatctcgagttgggatccagcaaggccttctcagccagtcaacacgcacagccaccttccagcagagatttgatgcccggcagaagattggcctctcagatgcccggctcaaactgggagtcaaggatgcccgggagaagcttttgcagaaagatgcccgatttcgaatcaaagggaaagtgcaggatgccagagagatgttgaactctcgcaagcagcagaccacggtgccccagaagccccgccaggttgctgatgcccgggagaagatcagcttgaagaggagttcccctgctgccttcataaacccacccattgggacagtgacccctgctctgaagctcaccaaaaccatccaggttccacagcagaaagccatggcaccacttcatccccatcctgccggaatgagaatcaatgttgtcaataaccaccaggccaaacagaatttatatgacctggatgaagatgatgatggtatagcttccgttcctactaaacagatgaagtttgcagcctcaggcggctttctccaccacatggctgggctaagcagttccaagctttccatgtccaaggccctccctctcaccaaagtggttcagaatgatgcatacacagctcctgctctcccttcctctattcgaacaaaagccttgaccaacatgtcccggacactggtgaacaaggaagaaccccccaaagagctgccagctgctgagcctgttctcagcccattggaaggcaccaagatgactgtgaataatctgcaccctcgagtcactgaggaggacattgttgagcttttctgtgtgtgtggggccctcaagcgagctcgactggtccatcctggggtagcggaggtggtgtttgtgaaaaaggacgatgccatcaccgcatataagaagtacaacaaccggtgtctggacgggcagccgatgaagtgcaaccttcacatgaatgggaatgttatcacctcagaccagcccatcctgctgcggctgagtgacagcccatcaatgaaaaaggagagcgagctgcctcgcagggtgaactctgcctcctcctccaacccccctgccgaagtggaccctgacaccatcctgaaggcactcttcaagtcctcaggggcctctgtgaccacgcagcccacagaattcaaaatcaagctttgagcaggggagtgaggcagccagaagtgggggcagaggagggtggctctgtttccccaaggcaaagcttatgaccaatgggccatcggactggagacccctgattgtgggaagggttgccagggataaagagcttcctcactggatgggacccgcctttctgtgttgtgttctgccctgtgctcttctctctacgttaacgtttcctgtagtatgtttcttcatctcatcgccaaggtaggcttgtgtttttcagtgtgtgcctccccgagcctcagccccaagctgatttcttatctggaaatggtacactgaattctctgggtggctttcttgtggccccatgggatgcagcgtgggggctgtctgaaggaccctgctttttccaggggccgaggggctgcctttcctttgtgtgtattaagcttttcaaacaatggaggggatggagagccctggtgtcctgacgggagccaggtcggcctgagagctgtgccgctcctctgtcttgtcagtggaggtgcctgggtggggagcaggtctcaggcctcttgtcctctccccagtggctccaggcctcactagtggcaagggcaggatgaggctgcaccgctgggaagagtctatctaagctcttggcttggagtcccgtgtcgtctccacccagaggaagttctccagagttcacctttcccttttccttgagttgtgctgaatgccccaccccagctctctttcccttctgggtgtctttgctgggagggggctgtgttgtgagccctcccggttctcacctcgcctggcacttaaccacaccctggttttgtgtagccgccagctctcttctggttgggcctttgaaaggctcagcctcccattgtgcagtgcttgggtttggagcttatttgaatggaagaggtcagtttgttcctggctctccatttctggcctcagttgtctacaggacagtggtcagggatgcctggaggcatatatccagctgccaccaaggggcactgtttgttcccacttatgtgagtgaccccatccatccatgaccagaggattattttcctgccttggcagaggaggaggagtcaagggagcagggcagctctaccaggcaaggtgtttccccagcataggcgcagacagttgggacgaaacttcagagcccaggcagtccctgaatgaccaggccagtgttgtcactgagtggtcccctgctggttgggagtgaagagaatccaggctggcagagctggagccagttggggagcacggttctgggagctctgcaaaatcagtagcaagtgctggaaaaggcacatgccgaagatactcaagagctcccaagatttgcttgaggctagcccagtgaaaaaaaccagagactcatgtttccaggggtcagtctgtcaggcaggaaggacccaggatttgaacccagcttcagtgtgcaggctctgaggctgcccaggacgggaaagtccaaggaaggggcctggtggtgctccacttgcagttctttaaagaatgctgctttttattctcctaaccctttcaagtgggtgcagacttctcgttagcagctggaagacattcctcccacacttttcccttcctggcccaagagagcatccagaaggcagtaggacctggtttttcaggtactgggagccgggggctcactgcttgcactgtgcttagggtagggatggtaaatatcctccctgcatggctttatcctccctctcatcccaaagcaggtatcttctggttgtcacagagtttcattgagtccagctgcagccacgtggccatctggagctggtgctataggtgaccatctggtacattgaggggacctgtttgcctcctccactctataagcagtcatcttgggagaccgggaggagaaggtggtgggctagtcctgtgtcctcctccacttcccatgcctctatgttacccatctgtgtctcctgtgcagaaggagaggaaggggcattaagagatgaagggtgattatgtattacttatccatttctgaataaacatttgttattcct

SEQ ID NO: 4544 - DNA, 1005 bp, Homo sapiens
ccgctgggcctgcaggtctctgtcgagccgcggacgcgggtctctgttccgctggatggggtttgttaaagttgttaagaataaggcctactttaacagataccaagtgaaatttagaagacgacgagagggtaaaactgattactatgctcggaaacgcttggtgatacaggataaaaataaatacaacacacccaagtataggatgattgttcgtgtaactgacagagatatcatttgtcagattgcttatgcccgtatagagggggatatgatagtctgcgcggcatatgcacacgaactgccaaaatacggtgtgaaggttggcccgacaaattatgctgctgcatattgtactggcctgctgctggcccgcaggcttcttgataggtttggcatggacaagatctatgacggccaagtggaggtgactggcgataaatacaatgtggaaagtactgatggtcagccaggtgccttcacctgctgtatggatgcaggtcttgccagaactaccactggcaataaagtttttggcgccctgaagggagttgtggatggaggcttgtctgtccctcacagcaccaaatgattccctggttatgattctgaaagcaaggaatttaatgcaggagtacaccagaagcacttcatgggccagaatgttgcagattacatgcgctacttaatggaagaagatgacgatgcttacaagaaacagttctctcaatacataaagaacagcgtaactccagacatgatggaggagatgtataagaaagctcatgctgctatacgagagaatccagtctatgaaaagaagcccaagaaagaagttaaaaaggagaggtggaaccttcccaaaatgccccttgctcagaagaaggatcaggtagctcaaaagaaggcaagcttcctcagagctcaggagcgggctgctgagagctaaaccaaacaattttctatgatgatttttcagatacagacaataaacttagggccagc

SEQ ID NO: 4545 - DNA, 770 bp, Homo sapiens
ggccgtggaggcgctggcttccccactggcctcaagtggagcttcatgaataagccctcagatggcaggcccaagtatctggtggtgaacgcagacgagggggagccgggcacctgcaaggaccgggagatcttacgccatgatcctcacaagctgctggaaggctgcctggtggggggccgggccatgggcgcccgcgctgcctatatctacatccgaggggaattctacaatgaggcctccaatctgcaggtggccatccgagaggcctatgaggcaggtctgattggcaagaatgcttgtggctctggctatgattttgacgtgtttgtggtgcgcggggctggggcctacatctgtggagaggagacagcgctcatcgagtccattgagggcaagcagggcaagccccgcctgaagccccccttccccgcagacgtgggagtgtttggctgccccacaactgtggccaacgtggagacagtggcagtgtcccccacaatctgccgccgtggaggtacctggtttgctggctttggcagagaacgcaactcaggcaccaactattcaacatctctggccatgtcaaccacccttgcactgtggaggaggagatgtctgtgcccttgaaagaactgattgagaagcatgctggcacagacaggcctgggcacagctgcggtgatcgtcatggaccgctcgacggacatcgtgaaagccatcgcccgcctcattgagttctataagcacgagagctgtggccagtgtac

SEQ ID NO: 4546 - DNA, 2997 bp, Homo sapiens
gtttgtctacagattttgagcgttcgaagttgacccctgactaagtatactttgctgctccctcagcctttgaaaaaatgtctgtcacatatgatgattccgttggagtagaagtgtccagcgacagcttctgggaggtcgggaactacaagcggactgtgaagcggatcgacgatggccaccgcctgtgcagcgacctcatgaactgcctgcatgagcgggcgcgcatcgagaaggcgtatgcgcagcagctcactgagtgggcccggcgctggaggcagctcgtggagaaagggccccagtacgggaccgtggagaaggcctggatggccttcatgtccgaggcagagagggtgagcgagctgcacctcgaggtgaaggcctcactgatgaacgatgacttcgagaagatcaagaactggcagaaggaagcctttcacaagcagatgatgggcggcttcaaggagaccaaggaagctgaggacggctttcggaaggcacagaagccctgggccaagaagctgaaagaggtagaagcagcaaagaaagcccaccatgcagcgtgcaaagaggagaagctggctatctcacgagaagccaacagcaaggcagacccatccctcaaccctgaacagctcaagaaattgcaagacaaaatagaaaagtgcaagcaagatgttcttaagaccaaagagaagtatgagaagtccctgaaggaactcgaccagggcacaccccagtacatggagaacatggagcaggtgtttgagcagtgccagcagttcgaggagaaacgccttcgcttcttccgggaggttctgctggaggttcagaagcacctagacctgtccaatgtggctggctacaaagccatttaccatgacctggagcagagcatcagagcagctgatgcagtggaggacctgaggtggttccgagccaatcacgggccgggcatggccatgaactggccgcagtttgaggagtggtccgcagacctgaatcgaaccctcagccggagagagaagaagaaggccactgacggcgtcaccctgacgggcatcaaccagacaggcgaccagtctctgccgagtaagcccagcagtgtgagcagctacgagaagacccagagctatcccaccgactggtcagacgatgagtctaacaaccccttctcctccacggatgccaatggggactcgaatccattcgacgacgacgccacctcggggacggaagtgcgagtccgggccctgtatgactatgaggggcaggagcatgatgagctgagcttcaaggctggggatgagctgaccaagatggaggacgaggatgagcagggctggtgcaagggacgcttggacaacgggcaagttggcctatacccggcaaattatgtggaggcgatccagtgatgagtcggggacaggccagcggggggacggaggcggcgggcccaggagcctcagccagccacgtgggcatccactccttttcctgcaagagatgatggttccattgctcttggcttcatggtgttcctggaaggcagatgagctggtcatttcgcctgggactcggcacctttccgagtgcagctggagggatctgagcgcaggaagacgcagaacaacagaaatagccgcccctccccgcccactgtgcctgttggcctatcatagatctctatgttcttgactttgtctctcctttccgagtcaatggtgggttacactgatcttgttccactgattactctctctgacgagtccatcacctgcaacttaaatgaacaagcttacatcccattttgagtgaagattttgaggtttttaatttaaaggctgtgtacagttatacttttttatacacctgttcatttctacttaaattatggcacagattgatgcgcaccagtcttgaggaaacgatctccctattcccttaccctgttactcagccacgccgtgtgtaggcttagcctcaggtggcagatgtttgaggaaaggaattatgccaggaaggtgggaccgggttatggtcgggtttctattgggaatgctctttgtgcttttgggcatctgaatggaagctttacatagaaccttaggtagaactcccccaaatcgccatatttaaaaattattttcactctattcttgcttaaaactgtactcttttgcaaattaacaattttatcactgattcagagttaaaaagaagactaacttttcaagcaaatgcatctgtaaagatgctttagattagactgtcatgtctcagtgtctatctgtatatattatttgatattcagagaatctaaagcactcgtctactgttttaatgagatttaacagcttttaacagtgagtttcgtttgtaaactgcttgaagtctgtggcattcaggcacacgtctggctggccggctgggtctcctcccgggctcagtgggcctggggcctctctgacgtggtgcctgctggagggaggctcgtcgtcaccagctgactgctggtccggcttctgaccggcctttgtcctggctccgtagcagaacactgtaaaagtgcccgcgtctttgcagtagttgcagatttcagtcgtcgtgttacttgtgcacaaacagaagctgggtcttacccgcagcacgagtgtctcgggctgcccggagtcgcccgggagcaggtgctgcagccagagttacgcgggggccacgcgggccggcgggggtggggggaacgtgggggaacctgtgtttcacgtgactcagcagtgcccgccgccgtcaccagctatgcattcactccgtttccagtgagcagatgtcttgcttggaaagtggacctgtgtctgtgtctgtcctgagaacttaccagcagaaatcctcatttctgtgctacggatttaccaaaaattgtcaagtctttttcagtttaacagttcctttacatgtgtagtatttgaggaaaaaaatcaataaacagttgatctcgtg

SEQ ID NO: 4547 - DNA, 1548 bp, Homo sapiens
caacctccacctgttcagcgggcacctcagcaccctcagattgagcttccccaacctctttaagttcctggcctggaacagcccacccctcacctccgagtttgtggcgctcctcccggccctggtggacgctggcacagccctggagatgctgcacgcgctgctggacctgccctgcttgacggcggtgctggacctgcagctcaggtcagcaccggctgcatccgagaggccactctgggacacctctctcagggcccccagctgcctggaggccttccgggacccgcagttccagggtcttttccaatacctgctgcgccccaaggccagtggcgccactgagaggttggcgccactccaccagctgctgcagcccatggccggctgtgcccgcgtggcccagtgtgcccaggccgtgcccacgctgctgcaggcattcttctcagcagtgacccaggtggctgacgggtccctgatcaaccagctggcgctgctgctcctgggcaggagcgactcgctctacccggccccagggtacgctgccggtgtgcacagtgtgctgagttctcagttcctggccctgtgtacgctgaaaccctccctggtggtggagctggcaagagacctgctggagttcctgggcagcgtgaatggtctctgcagcagggcgagcctcgtcaccagcgtggtgtgggccatcggcgagtacctgtcggtgacctacgatcggaggtgcaccgtggagcagatcaacaagttcttcgaagccctggaggctctgctattcgaggtcacccagtgccgcccctctgctgccctgcccaggtgtcccccccaggtggtcaccgtgctgatgaccacgctgacgaagctggcctcccggagccaagatctgatccccagggcctctttattgctgtcaaagatgaggaccctggctcacagtccagccaccagctccacgcacagcgaggagggcgcggaagccatccgtacccgggccacagagctgctgaccctgctgaagatgcctagcgtggcccagtttgtgctcacacccagcacggaggtgtgcagcccccgctatcaccgcgatgccaacacggccctgcccctggccctgcgcacggtcagccggctggtggagagggaggccggcctcatgccagggtgaagggacagtggccagggacttcggtgcagattaagagcctgggcagccagcttgctactgaggccaggctgataggagctcaggagggcgcgggagtcctgggagaggaggcaaggcccacggtgggcttggcaccctcacagacacgcggggctggcccccctgctcaccctctgggctttgtctccgagccttttgctcccaggcaacactgagctgagctgaggggtgccatggagcggctctgattggaggcttgaggccctgtggctgggtcgggtggaggctgctgggtctgtttcctagtcttttgtttttggacagttgatgggcaagaagagctgcagtaaaagtaaatctcctttaataag

SEQ ID NO: 4548 - DNA, 5764 bp, Homo sapiens
cccggaagttgaccggggtgcggagctcctgggctgcagctcctggagtttccgaggttcgtgcgcgtctggtggcggcggcgtgatgttctcggcaggagcggagagtttgctccaccaggccagggagatccaggacgaggagctgaagaagttctgttcccggatctgtaaactgctgcaggcggaggacttggggccggacaccctcgactccctgcagaggctcttcctcatcatctcagccacgaagtacagccggaggctggagaagacatgcgtagacctgctgcaggccaccctcggcctgcctgcatgccccgagcagctccaggtgctttgcgccgccatcctgcgagagatgtccccctctgacagcctcagcctggcctgggaccacacgcagaacagccggcagctgagcctggtggcctccgttctcttggcccagggtgacagaaacgaggaggtcagagccgtgggccagggcgtgctacgagcgctggagagccggcagcctgagggacccagcctcagacacctcctccccgtcatggccaaggtcgtggtcctcagcccgggcaccctccaggaggaccaggccaccctgctcagcaagcggctggtcgactggctgcgctacgccagcctccagcaagggctcccacactccggcggcttcttctccacgcccagggcccggcagccgggccccgtcaccgaggtggacggggcggtagccacagacttcttcacggtgctctccagcggccaccgcttcacagacgaccagtggctgaacgtgcaggccttctctatgctgcgggcgtggctgctgcacagcggccccgagggcccgggcaccctggacacagatgacaggtcagagcaggagggctccactctgtcggtgatctccgccacctcctctgccggccgcctgctgccgccccgggagcggcttcgggaggtggccttcgagtactgccagcgcctcattgagcaaagtaaccgacgagccctgaggaagggggactccgacctgcagaaagcttgcctggtggaggccgtgctggtgctggacgtgctgtgccggcaggacccgtccttcctgtaccgaagtctctcctgcctgaaggccctgcacgggcgggtgcgcggggacccggcctctgtgcgggtgctgctgcccctcgcccacttcttcctgagccacggggaagcggctgcagtggactcggaagccgtctaccagcacctgttcaccaggatcccggtggagcagttccacagccccatgctggcctttgaattcatccagttctgcagggacaacctccacctgttcagcgggcacctcagcaccctcagattgagcttccccaacctctttaagttcctggcctggaacagcccacccctcacctccgagtttgtggcgctcctcccggccctggtggacgctggcacagccctggagatgctgcacgcgctgctggacctgccctgcttgacggcggtgctggacctgcagctcaggtcagcaccggctgcatccgagaggccactctgggacacctctctcagggcccccagctgcctggaggccttccgggacccgcagttccagggtcttttccaatacctgctgcgccccaaggccagtggcgccactgagaggttggcgccactccaccagctgctgcagcccatggccggctgtgcccgcgtggcccagtgtgcccaggccgtgcccacgctgctgcaggcattcttctcagcagtgacccaggtggctgacgggtccctgatcaaccagctggcgctgctgctcctgggcaggagcgactcgctctacccggccccagggtacgctgccggtgtgcacaggcctgatgcatgcaggcccatcctggttccactctgagcctgggcctgaggccagcgctggtgccagccttctccccagtgagaacagtttctctgaggctggcagtcttctgtgttcctctatcggagggtgcagcatacacctaccactcagacgcttcccgggtttctccaggcccttggcctggatggggatggggtcataggtctgcacagagcaggcgtagacccggctttctgggcagtgtgctgagttctcagttcctggccctgtgtacgctgaaaccctccctggtggtggagctggcaagagacctgctggagttcctgggcagcgtgaatggtctctgcagcagggcgagcctcgtcaccagcgtggtgtgggccatcggcgagtacctgtcggtgacctacgatcggaggtgcaccgtggagcagatcaacaagttcttcgaagccctggaggctctgctattcgaggtcacccagtgccgcccctctgctgccctgcccaggtgtcccccccaggtggtcaccgtgctgatgaccacgctgacgaagctggcctcccggagccaagatctgatccccagggcctctttattgctgtcaaagatgaggaccctggctcacagtccagccaccagctccacgcacagcgaggagggcgcggaagccatccgtacccgggccacagagctgctgaccctgctgaagatgcctagcgtggcccagtttgtgctcacacccagcacggaggtgtgcagcccccgctatcaccgcgatgccaacacggccctgcccctggccctgcgcacggtcagccggctggtggagagggaggccggcctcatgccagggtgaagggacagtggccagggacttcggtgcagattaagagcctgggcagccagcttgctactgaggccaggctgataggagctcaggagggcgcgggagtcctgggagaggaggcaaggcccacggtgggcttggcaccctcacagacacgcggggctggcccccctgctcaccctctgggctttgtctccgagccttttgctcccaggcaacactgagctgagctgaggggtgccatggagcggctctgattggaggcttgaggccctgtggctgggtcgggtggaggctgctgggtctgtttcctagtcttttgtttttggacagttgatgggcaagaagagctgcagtaaaagtaaatctcctttaataagcgtctgtatgaagagtgcgcgatcagttccgttacctgccctgcaccctggggagaggaccagggatgggaacccctggcagctgctgccagtcctggaggctcagcccggcgtgccactgctgctacagaaaccaggtcatttgtgcacagcccggaaggcagcggcgcgagttcccgggtgtggtcaccgctctgggtggtgcgcttgtcaatgccccttttgatgcccttgaatagcctgaagatgaaggggaccgggggagggttgcaagcgccatggcctatgcaggctgcggcctctggccattcggagggaaggccccagggagccacctgagtggagctcagaacactggattcgcgcgaaggggaggtgtctgggcgtgcggccccagccccgccaccttcctgggccctgtggtcccaccctccggactaccaaggcacagctgtgtcgcacgttccgcccggtgcctgggacgggctcagccgccagggggcgccgccgccccgagagcctcacgccccgcccccaggctcaaactcttccccctccccactctggctccgcccccggtctcctcttttgctctggccccgcccacctcccctccggcctcggccccgcccccaatcccccatagctctgcgactaagaaaccacaggctgaaggcgactgcagggtcctgccccttgcccagcctcaggactatggagggggcgagtgacgcgcaaggaacggagcaggggacaccgtgcgggctcaggagctccccagatgcccgagccgaaccgcggggtcctcaccgccaggttccagcccaggaagcgctcgcctgccccacagcctgggccttgggtcgcgttccgagctccaggacggctggtgtcccccgcggcctgcgatgacagcccagggccgctgagccggggccgcaggaaaggctggcgctggcaggcgcttccgtcggcagcactgtgtttgtgtttccacgtggaaacagcagcgcacgtgtacaactgtgcataccaaggcgtgcgtgccagtgcgcgggtctcgggatcacttcccagtgcggtgcacgaccccgcctgcagcagtgggtgtgggggcgctgctgggctcatcccgaagctcagagagcgtggggctgcccctaggctcggaatgagtctcccactgagtccgcagctcccctcctgccctggggcggggcttccctgacctgaaggcgtcgggggtgtcctggctcccagctcccaggcactcgtggggccaccgcccaggccagctggtgctaagtccgcagcctgtgcagcagcgcccggcttaggactgggagtgtgacttgaagggccgtcccgctcatccaagggacaaggaggagctcatggccacagggcctcggagggcatgaccccagcccagggaggagcaaccttcaggtggcctccaggaggcagctgggaaaagggcaaagctcaccagctctcaactttttttttaaataaactgaaattttagaatagtttttcagatttacagaaaagatgataaaccttagaaacattatatgctaagtgaaagtgagaagtgacagcctgctggcagtcctcacagccctcgctcgctcttggcgcctcctctgcctgggctcccactttggcagcacttgaggagcccttcagcccgccactgcactgtgggagcccctttcagggctggccaaggccggagccggctccctcagcttgcggggaggtgtggagggagaggcgcggtgggaaccagggctgcacgcggtgcttgcgggccagcgcgagttccgggtgggcgtgggctctgtgggccccgcactcggagccgccggctagccccgccagcctgggcagtgaggggcttagcacctggaccagcagctgctgtgctcgatttctcactgggccttagctgccttcctgcggggcagggctggggacctgcagcccgccatgcctgagcctcccccctcccctccgtgggttcctgcgcagtccgagcctccccaacgagtgttgccacctgctcagggcacccagtcccatcgaccacccaagggctgaggagtgcctttggagcagggcacgggactggcaggcagctctacctgcagcccctgtgcaggatccactgggtgaaagccagctgggctcctgagtctggtggggacttggagaacctttatgtctagctaagggattgtaaataaaccaattggcactctgtatctagctcaaggtttgtaaacacaccaatcagcaccttgtgtctagctcagggtttgtgaatgcaccaatagacactctgtatctagctactctggtggggacttggaaaacctttttgtcaacactctgtatctagttaatctggtggggacatggagaacctttgtgtctagctcagggattgtaaacgcaccaatcagcaccctgtcaaaacagaccactcggctctaccagtcagcaggatgtgggtggggccagatgagaataaaagcaggctgcccgagccagcagtgacaacccactcgggtccccttccacaccgggatgctttgtttgttcgctctttgcaataaatcttgctgctgctc

SEQ ID NO: 4549 - DNA, 2158 bp, Homo sapiens
tgctgccagatccagccctgccatgtggcttgctcttctctactctggagaccatcacaggccagcatcctgccggaaagggcactggtgtcctgcaggaagagatgaaactctgcagctggtttaaacacctgccagcatccatcgtcgagttccagccaacactccgaacccttgcacatcccatcagtcaggaatacctgaaagacacgctgcagaaatggatccacatgtgtaatgaagacattaaaaatgggatcaccaacctgctcatgtacgtgaagagcatgaagggtctcgcgggaatccgggacgccatgtgggagttacttaccaatgagtccaccaatcacagctgggatgtgctatgtcggcggcttctggagaagccgctcttgttctgggaagatatgatgcagcaactgttccttgaccgattacagactctgacaaaagaaggctttgactccatctccagtagctccaaggagctcttggtttcagctttgcaggaacttgaaagcagcaccagcaactccccttcaaataagcacatccactttgagtacaacatgtcgctcttcctctggtctgagagtcctaatgacctgccttccgatgcggcctgggtcagcgtggcaaaccggggtcagtttgccagtagcggcctctccatgaaagcacaagccatcagcccttgtgtacagaacttctgttctgccctggattctaagctgaaggttaaactagatgacctcctggcttacctcccctctgatgactcatcactgcccaaggacgtttctcccacacaggccaagagttctgcctttgacagatacgcagatgcggggaccgtgcaggagatgctgcggactcagtccgtggcatgcatcaagcacatcgtggactgcatccgggcagagctacagagcattgaagagggtgtgcaagggcaacaggatgccctcaacagtgccaagctgcactcagttcttttcatggccagactctgccagtccctgggagagctgtgcccccatctgaagcagtgcatcctgggaaaatcagagagctcagagaaaccagcaagggagtttagggctctgagaaaacagggaaaggtgaaaactcaggaaatcattcctacacaggccaagtggcaagaggttaaagaagtactcctccagcagagcgtgatgggctaccaggtctggagcagtgcagttgtgaaagttttgattcatggattcacccagtcattacttctagatgatgctggctcagttctggccacagccaccagctgggatgagctagaaattcaggaggaggcagagtctggcagcagtgtcacatccaagatccgactccctgcacagccgtcctggtatgtacagtccttcctgtttagtttatgccaggaaattaatcgggttggaggccatgccttgccaaaggtgacattacaggagatgctgaaaagctgtatggttcaagtagtagctgcctatgagaaactctccgaagaaaaacagattaagaaagaaggtgcatttccagtcacccagaaccgggcgctgcagctgctttatgatctgcgttacctcaacattgttctgacagccaagggtgacgaggtgaagagtggccggagcaagccagactccagaattgagaaagtgactgaccacctggaagccctcattgatccatttgacctggacgttttcacgccacacctcaacagcaaccttcatcgcctggtgcagcgaacttctgttctgtttggattggtgactggtacagagaatcagctcgccccccggagcagtacgttcaactcccaagaaccccataacatcctgccactggcatccagtcagatcaggtttggacttctcccactgagcatgacaagcactcgaaaggctaaatcaaccagaaacatcgaaacaaaagctcaggttgtccccccggcacgctccacagctggtgacccgacagttcctggctccttgttcagacagcttgtcagtgaagaagacaacacgtctgcaccttcattattcaaacttggctggctctctagtatgactaagtaacatggcaacacatctgtctctccctaaataaatactaccacattatttcttct

SEQ ID NO: 4550 - DNA, 878 bp, Homo sapiens
gcgccgcgtagcttccatccgccagctgccatgagcgagcgcctccgtcccaggaaaaggagaaggaatggcaacgaagaagacaaccatcttcccccccagaccaaaagaagtagcagaaaccctgtctttcaggattcctgggacacagagacagtacctgtaatgagaaacagtaaagaaaacagactaagaggaaacaaagcgttctgcgcgtcttcaggcagtgacagtggtgggagcagcagcagcagcagcagcagcatcaatagcccggacagggccagcgggccggaaggcagcttgagccagaccatggccggatccagccctaacacgcctcagcccgtgcccgagcagtccgcgctgtgccaaggcctctacttccacatcaaccagaccctgagggaggcccacttccacagcctacagcaccgagggcggcctctgacatgatgtgccggcagtttcttgccttctgtgaagggacagcgctgtgcagatttgatatttcaacttacaacttgttttaaaagaaaaattgcacacgaaaaatgcctgttggcttttcagtctatatttgaaataacaggttaacaggcagttgtttacttgtggttttgctgcactattgcaatttcaaaggggctttgaagcaattttttataggattcttttgagggagggtatcaaatctatgtcaaggtagtggtttgaggaaaactcattctgtgtgttgaatccatagtatgtcccattcagactgatttccaaatctgtcaactagaaactctactttatgtaaagggccttttaaaaatgcgggatcttcaattttttttattcaataaactagtaaagagtatctagtttccatg

SEQ ID NO: 4551 - DNA, 706 bp, Homo sapiens
atgacagatgacaaagatgtgcttcgagatgtgtggtttggacgaattccaacttgtttcacgctatatcaggatgagataactgaaagggaagcagaaccatactatgcattatccaattggtttgctatttgatcttcttgcatcaagttcagctcttccttggaacatcacagtacattttaagagttttccagaaaaagaccttctgcactgtccatctaaggatgcaattgaagctcattttatgtcatgtatgaaagaagctgatgctttaaaacataaaagtcaagtaatcaatgaaatgcagaaaaaagatcacaagcaactctggatgggattgcaaaatgacagatttgaccagttttgggccatcaatcggaaactcatggaatatcctgcagaagaaaatggatttcgttatatcccctttagaatatatcagacaacgactgaaagacctttcattcagaagctgtttcgtcctgtggctgcagatggacagttgcacacactaggagatctcctcaaagaagtttgtccttctgctattgatcctgaagatggggaaaaaaagaatcaagtgatgattcatggaattgagccaatgttggaaacacctctgcagtggctgagtgaacatctgagctacccggataattttcttcatattagtatcatcccacagccaacagattgaaggatc

SEQ ID NO: 4552 - DNA, 1636 bp, Homo sapiens
gcccgcccggccgcgatggcgggtgaaggtggttcctccgggcaaggtggagttggcgagacgccggcccggagccctggggccggttggcgggtgtggcctgcggggtccctcttggggtacatgtctgttgcttactaagtttggctttggttgaaataagaatttagcctgtatgtactgctttaactcctggaagaatgacagatgacaaagatgtgcttcgagatgtgtggtttggacgaattccaacttgtttcacgctatatcaggatgagataactgaaagggaagcagaaccatactatttgcttttgccaagagtaagttatttgacgttggtaactgacaaagtgaaaaagcactttcagaaggttatgagacaagaagacattagtgagatatggtttgaatatgaaggcacaccactgaaatggcattatccaattggtttgctatttgatcttcttgcatcaagttcagctcttccttggaacatcacagtacattttaagagttttccagaaaaagaccttctgcactgtccatctaaggatgcaattgaagctcattttatgtcatgtatgaaagaagctgatgctttaaaacataaaagtcaagtaatcaatgaaatgcagaaaaaagatcacaagcaactctggatgggattgcaaaatgacagatttgaccagttttgggccatcaatcggaaactcatggaatatcctgcagaagaaaatggatttcgttatatcccctttagaatatatcagacaacgactgaaagacctttcattcagaagctgtttcgtcctgtggctgcagatggacagttgcacacactaggagatctcctcaaagaagtttgtccttctgctattgatcctgaagatggggaaaaaaagaatcaagtgatgattcatggaattgagccaatgttggaaacacctctgcagtggctgagtgaacatctgagctacccggataattttcttcatattagtatcatcccacagccaacagattgaaggatcaactatttgcctgaacagaatcatccttaaatgggatttatcagagcatgtcacccttttgcttcaatcaggtttggtggaggcaacctgaccagaaacacttcgctgctgcaagccagacaggaaaaagattccatgtcagataaggcaactgggctggtcttactttgcatcacctctgctttcctccactgccatcattaaacctcagctgtgacatgaaagacttaccggaccactgaaggtcttctgtaaaatataatgaagctgaaacctttggcctaagaagaaaatggaagtatgtgccactcgatttgtatttctgattaacaaataaacaggggtatttcctaaggtgaccatggttgaactttagctcatgaaagtggaaacattggtttaattttcaagagaattaagaaagtaaaagagaaattctgttatcaataacttgcaagtaattttttgtaaaagattgaattacagtaaacccatctttccttaacgaaaatttcctatgtttacagtctgtctattggtatgcaatcttgtaactttgataatgaacagtgagagatttttaaataaagcctctaaatatg

SEQ ID NO: 4553 - DNA, 2721 bp, Homo sapiens
ttttaaagagctgagccaaaaaagcaacagacaaggcaagtgggcattcgaccaaatgccagactaaagaacttctcttcctcttaaatataacccatagatcagtccttcaaatcccaaaagtaagtacatgtcgcccatgctgtgcatacagggtggtgtcctagccttgaatcatttctgtgctcttagatcacattctgtccttcaccacgcacacaaaaacacacacatacacacagacgcccacacaaaccctttcttcagaggccacatttgagttgggcattatttttgacaaatactgtgtgagatctctgaaacagaatctcccaagttgagagaatggaatcagcttctcggagaagagctccattcacgctgagccaaatctgcttgagcagttatttgtacacaagtgccatcaatgttgatgggaatttggaatgaagcactgaaaacagcatgttaggccagtgagaataatccttgaaatctctgtggtaattcaatttcagcagtggttggaccacccaggagccactggaagcatggtgcatttcaaggtctgcctattttttcaacaattttctctttgaaactttaagctcttcagtcagcacaatgtcaaaatgataagcagacatgggcaattttctagtccagcaacttgagatacagtaaaaatttgaagaataaattacatatgaaaggcagttggttgggactgaactgtgactgatgatataggaatagcaccagattttatagcattctgtcattctaaaactggccatcaagtgaagtaacttaggaatggaaaaccaaacattgtatgtcctaactgatacgtgggagctaagctatgaggacgcagaggcataagaatgatacaatggactttggggacttgcagggaagagtggagtggggagggataaaagactacaaatatggtgcagtgtatactgctcgggtgatgggtgcaccaaagtctaacaaatcaccactaaagaacttactcatgtaaccaaataccacctataccccaataacttacggaaaaattaaaaaattttttaaaagtaaaactggccatcacattacctttcatgcattatttttgggatgatttcatgtgttatagaactttcacatgccaggaagatttacgtttaggaaatacattatgcccacccacccctatctgtgcttatacaacattcttttctcatacatttaatctagcctttatacggattatttgtaggaaaatcaagcctccagaaaaggacaacttgttcagaaggaaagcatggacaccattaaccacgcaagtcagctggtagagcaagcccatgatatgagggataaaatccaagagatcaacaacaagatgctctattatggggaagagcatgaacttagccccaaggaaatctctgagaagctggtgttggcccagaagatgcttgaagagattagaagccgtcaaccatttttcacccaacgggagctcgtggatgaggaggcagatgaggcttacgaactactgagccaggctgagagctggcagcggctgcacaatgagacccgcactctgtttcctgtcgtcctggagcagctggatgactacaatgctaagttgtcagatctccaggaagcacttgaccaggcccttaactatgtcagggatgccgaagacatgaacagggccacagcagccaggcagcgggaccatgaggtacagcggacactcaccatcaatgcatttcagcatcagcagtgtgatggtacaccaagaaggggctgttgatataaatttttttaaaatattggtatagttaaatacttatattttaaaatattggtgtgttttttggtgctataaattactaacttgtgtgttcctaaaatcaagttgaaactaggataattgtctagttcttgctttgataagaacgcagtagttctgatgcttgtgtccatgtgtatgggtctgttattcttgcaagtgggtaagcaatgcatagctttttttatactgagagcactagaaggccaaagcatctcaaaaccatgggttctgggtatgcataatttttggaaaggcacgataagcaaatctcacagtctggctggtcagcagctgcagggataaggagactaattgccaaggccatgcaaatgcaaagaggaaggtgaggaggattcccagatgtgatcatagcttgcaaagatggtcatctcatggggccagaattcgtgcatgcccacacctacaaagctgagaactggtagtggtcatgtgtccgcttcaagcaatgcatgtattcacagccgccagcatcaagaggggccatcttttgataggatgacacatgcatgttcaaacatattttaaaagattagggagaaaagaatactgtgaacaaatagaaaccaattatgagcaaattcacgaattcggttatgtactattgtggctggcaaaagccacttaaactaggctctctagcctgattttcagccatcattacccctcactaagaatccttgtaaaatttcttccgtaaaagttaattacactcatcaccactgtttgctaatgggagcaaacccctagccaatattttttagaataatatggttgggataactttttttttttttttttgctaaatgaatgcatgattatcttatacaataaaagtataacac

SEQ ID NO: 4554 - DNA, 899 bp, Homo sapiens
gtgagaaggaagccaggacagcgcagtccccagtcccgaacggccagggagaggaggtggcctagcgctggcggggctcaccccaatccgtctgccttttgatgccgtactctgctggttgcgcagccacctcgggatactgcacacggagaggagggaaaataagcgaggcaccgccgcaccacgcgggagacctacggagacccacagcgcccgagccctggaagagcactactggatgtcagcggagaaatggctttgagctcagcctggcgctcggttctgcctctgtggctcctctggagcgctgcctgctcccgcgccgcgtccggggacgacaacgcttttccttttgacattgaagggagctcagcggttggcaggcaagacccgcctgagacgagcgaaccccgcgtggctctgggacgcctgccgcctgcggccgagaaatgcaatgctggattctttcacaccctgtcgggagaatgtgtgccctgcgactgtaatggcaattccaacgagtgtttggacggctcaggatactgtgtgactactgacggagaagacccaggtttttcagcttctgccctatcgttcattctcagctctcagggagccagagaagccagggctccaacatgaacacttcttgtagctcactgtcatgaccagtgtttcagtcagttcttgcaggttgcctgacttacctcatttctctcatttcctgtaagcaaccaaaaataaaaggctttcttttatttcattttgtcttattttgcttttatcttgaaggcatataagacctctgtatctgccttgttcaccttcaactgcttctaattcttcctcaattccagtgtccaatgtcaatttgaaattaaaatttacagactgatttt

SEQ ID NO: 4555 - DNA, 596 bp, Homo sapiens
cggccagggagaggaggtggcctagcgctggcggggctcaccccaatccgtctgccttttgatgccgtactgtaagctccgtccatctctgctggttgcgcagccacctcgggatactgcacacggagaggagggaaaataagcgaggcaccgccgcaccacgcgggagacctacggagacccacagcgcccgagccctggaagagcactactggatgtcagcggagaaatggctttgagctcagcctggcgctcggttctgcctctgtggctcctctggagcgctgcctgctcccgcgccgcgtccggggacgacaacgcttttccttttgacattgaagggagctcagcggttggcaggcaagacccgcctgagacgagcgaaccccgcgtggctctgggacgcctgccgcctgcggccgaggtacagtgtccctgccattgccaccctgctggggcacctgcgcccccgcgggctgtgccacactcgtccttctctctctctccgcctctttcctctccccagtgccttgagagtttcacctgggctaggtcagttcggaaacttgaaataaagagttttcctttgtaagttg

SEQ ID NO: 4556 - DNA, 1058 bp, Homo sapiens
atgaagatatctaggggcagagtgtgcttggagtcagagaacaaggacgctggtgtggctggtcgtaaacagttttgtcactggccctgcaaatgccctcagcagaagccccgttgccctcctggagtgagcctggtgagagatggctgtggatgctgtaaaatctgtgccaagcaaccaggggaaatctgcaatgaagctgacctctgtgacccacacaaagggctgtattgtgactactcagtagacaggcctaggtacgagactggagtgtgtgcatgtaagtctgttgggtgcgagttcaaccaggtacattatcataatggccaagtgtttcagcccaaccccttgttcagctgcctctgtgtgagtggggccattggatgcacacctctgttcataccaaagctggctggcagtcactgctctggagctaaaggtggaaagaagtctgatcagtcaaactgtagcctggaaccattactacagcagctttcaacaagctacaaaacaatgccagcttatagaaatctcccacttatttggaaaaaaaaatgtcttgtgcaagcaacaaaatggactccctgctccagaacatgtgggatgggaatatctaacagggtgaccaatgaaaacagcaactgtgaaatgagaaaagagaaaagactgtgttacattcagccttgcgacagcaatatattaaagacaataaagattcccaaaggaaaaacatgccaacctactttccaactctccaaagctgaaaaatttgtcttttctggatgctcaagtactcagagttacaaacccactttttgtggaatatgcttggataagagatgctgtatccctaataagtctaaaatgattactattcaatttgattgcccaaatgaggggtcatttaaatggaagatgctgtggattacatcttgtgtgtgtcagagaaactgcagagaacctggagatatattttctgagctcaagattctgtaaaaccaagcaaatgggggaaaagttagtcaatcctgtcatataataaaaaaattagtgagtat

SEQ ID NO: 4557 - DNA, 2367 bp, Homo sapiens
cccggagaaggtggagggagacgagaagccgccgagagccgactaccctccgggcccagtctgtctgtccgtggtggatctaagcctcatctgtatcctcttgtgatggcgtgaaggaaagccatggcagatttccagcctggtgatgctgtacagaacacaggtggcctgcttccatgcctcctcagcttcaagaaactagaatgaaccgaagcattcctgtggaggttgatgaatcagaaccatacccaagtcagttgctgaaaccaatcccagaatattccccggaagaggaatcagaaccacctgctccaaatataaggaacatggcacccaacagcttgtctgcacccacaatgcttcacaattcctccggagacttttctcaagctcactcaaccctgaaacttgcaaatcaccagcggcctgtatcccggcaggtcacctgcctgcgcactcaagttctggaggacagtgaagacagtttctgcaggagacacccaggcctgggcaaagctttcccttctgggtgctctgcagtcagcgagcctgcgtctgagtctgtggttggagccctccctgcagagcatcagttttcatttatggaaaaacgtaatcaatggctggtatctcagctttcagcggcttctcctgacactggccatgactcagacaaatcagaccaaagtttacctaatgcctcagcagactccttgggcggtagccaggagatggtgcaacggccccagcctcacaggaaccgagcaggcctggatctgccaaccatagacacgggatatgattcccagccccaggatgtcctgggcatcaggcagctggaaaggcccctgcccctcacctccgtgtgttacccccaggacctccccagacctctcaggtccagggagttccctcagtttgaacctcagaggtatccagcatgtgcacagatgctgcctcccaatctttccccacatgctccatggaactatcattaccattgtcctggaagtcccgatcaccaggtgccatatggccatgactaccctcgagcagcctaccagcaagtgatccagccggctctgcctgggcagcccctgcctggagccagtgtgagaggcctgcaccctgtgcagaaggttatcctgaattatcccagcccctgggaccacgaagagaggcccgcacagagagactgctcctttccggggcttccaaggcaccaggaccagccacatcaccagccacctaatagagctggtgctcctggggagtccttggagtgccctgcagagctgagaccacaggttccccagcctccgtccccagctgctgtgcctagaccccctagcaaccctccagccagaggaactctaaaaacaagcaatttgccagaagaattgcggaaagtctttatcacttattcgatggacacagctatggaggtggtgaaattcgtgaactttttgttggtaaatggcttccaaactgcagattgacatatttgaggatagaatccgaggcattgatatcattaaatggatggagcgctaccttagggataagaccgtgatgataatcgtagcaatcagccccaaatacaaacaggacgtggaaggcgctgagtcgcagctggacgaggatgagcatggcttacatactaagtacattcatcgaatgatgcagattgagttcataaaacaaggaagcatgaatttcagattcatccctgtgctcttcccaaatgctaagaaggagcatgtgcccacctggcttcagaacactcatgtctacagctggcccaagaataaaaaaaacatcctgctgcggctgctgagagaggaagagtatgtggctcctccacgggggcctctgcccacccttcaggtggttcccttgtgacaccgttcatccccagatcactgaggccaggccatgtttggggccttgttctgacagcattctggctgaggctggtcggtagcactcctggctggtttttttctgttcctccccgagaggccctctggcccccaggaaacctgttgtgcagagctcttccccggagacctccacacaccctggctttgaagtggagtctgtgactgctctgcattctctgcttttaaaaaaaccattgcaggtgccagtgtcccatatgttcctcctgacagtttgatgtgtccattctgggcctctcagtgcttagcaagtagataatgtaagggatgtggcagcaaatggaaatgactacaaacactctcctatcaatcacttcaggctacttttatgagttagccagatgcttgtgtatcctcagaccaaactgattcatgtacaaataataaaatgtttactcttttgtaa

SEQ ID NO: 4558 - DNA, 2515 bp, Homo sapiens
tcttgactactgggatatctgagctgatctgtgtgttagaaatattggatgtcttaaaagatttgtaacaagatataagtacataaggaaagtaataaaacaggagagcttacatagaaagcatcttaaagagtaaataggagaaagggagttttctttggcattagacaagagtcatagccaggaaagttactcttgataaaatttttgttataatgacttcctcattaccttactttatttttaatccccttagtatgtttgtgctactgaaaggagccactaaggagcagtcttttaagattggtcaggaaattgccgaagctgtaactgctaccaatcctaaaccagtgaaattgaagtttgaaaaggtatatttgccctgtgttttacaaacaaaaaagaggtatgtgggttacatgtatgaaacactggatcagaaggacccagtatttgatgcaaaaggaatagaaacagtcagaagagattcctgccctgctgtttctaagatacttgagcgttctctaaagctgctatttgaaacgagagatataagtctaattaaacagtatgttcagcgacaatgtatgaagcttctggaaggaaaggccagcatacaagactttatctttgccaaggaatacagaggaagtttttcttataaaccaggagcttgtgtgccagcccttgaacttacaaggaaaatgctgacttatgaccggcgctctgagcctcaggttggggagcgagtgccatacgtcatcatttatgggacccccggagtaccacttatccagcttgtaaggcgcccagtggaagtcctgcaggacccaactctgagactgaatgctacttactatattaccaagcaaatccttccacccttggcaagaatcttctcacttattggtattgatgtcttcagctggtatcatgaattaccaaggggatttattgcggcactattcacaatagcaaagacttggaaccaacccaaatgtccatcaatgatagactggattaagaaaatgtggcacatatacaccatggaatactatgcagccataaaaaaggatgagttcatgtcctttgcagggacatggatgaagctggaaaccatcattctcagcaaactatcacaaggacagaaaaccaaacaccgcctgttctcactcatagatccataaagctaccagctcctcgcgaagtgaacctgaagggcggaaaggcactatttcacaatattttactaccttacactgtcctgtgtgtgatgacctaactcagcatggcatctgtagtaaatgtcggagccaacctcagcatgttgcagtcatcctcaaccaagaaatccgggagttggaacgtcaacaggagcaacttgtaaagatatgcaagaactgtacaggttgctttgatcgacacatcccatgtgtttctctgaactgcccagtacttttcaaactctcccgagtaaatagagaattgtccaaggcaccatatctccggcagttattagaccagttttaaattgtcaatatcacagtattacaggtgctatttttttcagtgcttaccactaaactgttgtgcatggtgctttttaactttcatcgagtcaaggatgttcactgtctgttatctgaagactatgaagacttctatgctaaccgaattaaaatgtacttgttgatctctgaatagctcacttcttacaatgtacaaattcctcattctgtcaccttttaaacattgttttataatgcaggtgttggatttgctccagtatgtgtaccatcttgtaaattcatttgagtagatcatgtttacttcccagtggaaggagcactgaaaacctcttaaagaaaaagcatttgtgtgttttccttgaactgtctgtatcaagacgtgttacttcgagatatccattcactttataattttgactgcaaaatattttgtaaatacacttttttacttttcaaacgagcaaaataatgtgcaatgatttttatacaaatgattttcaagttgtttggtatatttcctctaggttttgcttgactcaaagtagatcgttattttgatcaaactgtgcaaacagtagtaccacgtgtagcattttgaaacattatttttttttaaaaaatgctgtcttgctttagctattaatggggcattgtgaggaactgtgcaaagacatttttgttacaaacctgtgggcctgttgcaatactttaaaaataaaaaattttattccatttgcttgttttgtatagacatttctattgcttctaaatatacttaaaatattttctttccttatgtactgtacagttaatcttatttgccatcatcttgaacacaaaatgtgtatttagaatatttgtataactgtgtaaaataaaaaaggaattatgtggtcagtgcattgttttttaaactggaaatcattttgttttaaaagttaataatggaaaccatattaaaattgaataaaatataaaataatata

SEQ ID NO: 4559 - DNA, 10700 bp, Homo sapiens
catcatcatggcaacaagagctgcagcctgggaccgaggagcccgtgtgattcccggcggtggcggcagtggcggcagcaccagcaccgacgaaagctcgagggcttctctcctgcggccccttgccgggtgctcctgaggaggcggcggcagcagcgcctacaccgccccgcccgccgctcctcgaggtgcctctgtgtgaggggagggggccgtgccgagaaggggagggggcgccgccgccgctgcggagggagccgccgccgctgctgctgccgctgccgggtcgccagtgaagggaggcagtggcggcggcggcgaacatgttttcagtaaggatagtgactgcagactactacatggccagcccgctgcaggggctggatacctgccaatcccccctcacccaggcccctgtcaagaaggtgccggtggtgcgagtcttcggagcgaccccggcaggtcagaagacatgtcttcatctacatggcatctttccttacctctatgtgccatacgatggttatggacagcagccagaaagctatctttctcagatggcattcagtatcgacagagcacttaatgtggctttaggcaatccatcttccactgctcagcatgtgttcaaagtgtcattagtatcaggaatgcctttttatggttatcatgagaaggaaagacactttatgaagatctatctttacaatcctacaatggtgaaaaggatatgtgaacttttgcaaagcggagccataatgaataaattttaccagcctcatgaagcgcatattccctacctcctacagctcttcattgactacaatctttatggcatgaatttaataaatctggctgctgtcaagttccgaaaagcaagaaggaaaagtaatacattgcatgcaactggatcctgcaagaatcatttatcaggaaattctcttgctgatactttatttcggtgggaacaagatgaaataccaagctctttaatattggaaggtgttgaaccacagagtacatgtgaattagaagtggatgctgtagctgctgatatcttaaatcgtctggacattgaagctcaaattggtggaaaccctggtctacaggccatatgggaagatgaaaagcaacggcgaagaaacagaaatgaaacttctcaaatgagccaacctgagtcacaagatcacaggtttgtgccagcaacagaaagtgaaaaaaaatttcagaagagacttcaggaaattctcaaacagaatgatttctctgtaacattatcaggatctgtggactacagcgatggatcccaggagttctctgctgagttaacattgcactctgaggttctgtctcctgaaatgcttcagtgtacaccagccaatatggtagaagttcacaaagacaaagagtcaagcaaaggtcacactagacacaaagtggaagaagctcttattaatgaagaagcaattttgaaccttatggaaaatagtcagacttttcagcctttgacccaaagactgagtgagtcacctgttttcatggacagtagtcctgatgaggctctggtacatcttcttgctggtttggaaagtgatggatatcggggggaaagaaataggatgccatcaccatgtcgctcctttggaaataataaatatccacaaaatagtgatgatgaagaaaatgaaccacagattgaaaaagaggaaatggagcttagtttggtgatgtcccagagatgggacagcaatattgaagaacattgtgccaaaaagagatcactgtgcagaaatacccacagaagttcaactgaagatgatgactcatcttcaggagaagaaatggaatggagtgataacagtttgcttctagccagtctttctatacctcagttagatggaactgcagatgaaaatagtgacaatccattgaacaatgaaaattctagaacccactcttctgtaattgcaacaagcaagctttcagttaaaccctccatctttcacaaagatgctgctacattagaaccctcatcttctgctaagattacctttcagtgtaaacacacaagtgccctttcttcccatgttttgaacaaggaagatttaattgaagacctttcacagacaaacaaaaatacagaaaaaggtctagataactcagtcacttcttttacaaacgaaagcacttattctatgaaataccctggatctttaagcagtactgttcattcagaaaattctcataaagagaatagtaagaaagagatcctcccagtatcttcctgtgaaagtagtatttttgattatgaagaagatattccatctgttacaagacaagtaccaagtagaaaatatacaaacattagaaaaatcgaaaaggattccccttttatacatatgcaccgtcaccctaacgagaatacattgggcaaaaattctttcaacttttctgacttaaatcattcaaaaaataaagtatcctctgaaggaaatgaaaaaggaaacagcacagctctgagtagtttattcccttcatcatttactgaaaattgtgaattactgtcatgctcaggggagaatagaactatggtgcattctcttaatagcactgctgatgaaagtggactaaataaacttaaaattaggtatgaagaatttcaagaacataaaacagaaaagccaagcctcagccagcaagcagcacactatatgttttttcccagtgttgttctttctaactgtcttactagaccacagaaactatctcctgtcacatataaattacaacctggcaataaaccatcccggttaaaattgaataaaaggaaacttgcaggtcatcaggagacttctaccaaaagtagtgagactggatccacaaaagataattttatacaaaataatccttgtaatagtaatcctgagaaggataatgcattggctagtgatttaactaaaaccactcgtggagcttttgaaaataaaacacccacagatggttttatagactgtcactttggagatggaacgttagaaactgagcagtcctttggactatatggaaataaatacacacttagagccaaacgcaaggtaaattatgagactgaagacagtgagtcaagttttgtaactcacaactcaaaaattagtctacctcatcccatggaaattggtgaaagtttagatggaactctcaaatcccgaaaacgaagaaaaatgtctaaaaagctgccccctgtcatcataaagtatattattattaatagatttagagggagaaaaaatatgcttgtgaagctaggaaaaatagactctaaagaaaaacaagtaatattaacagaagaaaaaatggaactatataaaaagcttgcacctttgaaggacttttggccaaaagttcccgactcccctgcaaccaaatatcccatttatccactaacaccaaagaaaagtcacagaagaaagtcaaaacataaatctgctaagaaaaaaactggtaaacaacaaaggacaaataatgaaaatattaaaagaactttgtctttcaggaaaaaacggtcacatgctattctttctcctccctcaccatcttacaatgctgaaaccgaagattgtgacctgaattatagtgatgttatgtctaaactaggttttctttctgagagaagcacaagtcccataaattcttctccacctcgctgctggtctcccacagatccaagagctgaagaaatcatggctgctgcagaaaaagaggcaatgctttttaagggtcctaatgtatataagaagactgttaattctcgtataggaaaaactagtcgcgcaagagcacagattaagaaatcaaaagcaaagcttgctaatccctctatagttactaagaaaaggaacaaacgaaatcagacaaataaactagtagatgatggaaaaaagaaaccaagagcaaaacaaaaaacaaatgagaaaggtacatcgagaaagcatacaacacttaaggatgaaaaaataaaatctcagtctggtgctgaggttaagtttgtactgaaacaccagaatgtgtctgaatttgcaagtagttctggaggctctcaactactttttaaacagaaagatatgccactaatgggctctgctgtagatcatcccctttctgcttccctacccactggaattaatgcacaacagaagttatctggctgcttttcttctttcttagaaagcaagaagtctgtagatttgcagacattccccagttcacgagatgatttgcatccatcagttgtttgtaattctataggacctggagtctcaaaaattaatgttcaaaggcctcataatcaaagtgctatgtttactctaaaggaatcaacgttaattcaaaaaaatatatttgacctttccaatcatttatctcaggtagcacagaatacacagatatcttctggtatgtcctcaaagatagaagataatgcaaataatatacaaagaaactatttgtcatcaatcggaaagttaagtgaatatcgcaattccctagaatcaaagctggaccaagcatatacccctaattttttgcattgcaaagacagtcagcagcagattgtgtgcatagcggaacagtcaaagcacagtgaaacttgttctccgggaaatacagcttcagaggaaagccaaatgcctaataattgctttgtaacttccttgagaagtccaatcaaacaaatagcatgggagcaaaagcaaaggggctttattttagatatgtcaaattttaaacctgaaagagtaaaaccgaggtcgttatcagaagcaatttcacaaaccaaagcactttctcagtgtaaaaatcgaaatgtgtcaacaccttcagcatttggtgaaggacagtctggactggcagttctaaaagaattgttacaaaaaagacagcagaaagcacaaaatgcaaatactacacaagacccattatccaataaacatcaaccaaataaaaatatttctggttcccttgagcataacaaagcaaataaacggacacgatcggtaacgtccccaagaaaacctcgaactcccagaagtacaaaacaaaaagaaaaaatccccaaacttctcaaagtagactctttaaatttacaaaactctagccagttggataactctgtatcagatgatagtcccatctttttttcagatccaggctttgaaagttgttactcacttgaagatagtttatctcctgaacataattataattttgatattaacacaataggtcagactggattttgtagcttttattctggaagtcagtttgtcccagctgatcagaatttgcctcagaagttcctaagtgatgctgttcaggatctttttccaggacaagctatagaaaaaaatgagtttttaagtcatgacaaccagaaatgtgatgaagacaagcatcataccacagactcagcctcatggattagatctggtactttaagtcctgaaatttttgagaagtcaaccatagatagcaatgagaatcgtcgccacaaccagtggaaaaatagctttcatcctctaacaactcggtctaactcaataatggattctttctgtgttcagcaggcagaagactgtctaagtgaaaaatctagattgaataggagttcagtaagcaaagaagtgtttcttagcctcccacagccaaacaattcagactggattcaaggtcacaccagaaaagaaatgggacagtctcttgactcagccaatacctcttttactgcaatactctcctcccctgatggtgaacttgtagacgtggcctgtgaagatttagaactgtatgtttcaagaaacaatgatatgttgacaccaactcctgatagttcaccaagatctactagctctccttcacaatctaaaaatggcagcttcacccctcgaactgctaacattctgaaaccacttatgtcccccccaagtagggaagaaattatggcaactttgttggatcatgacctgtctgagactatttaccaggaaccattttgcagtaatccttctgatgtaccagaaaagcccagggagattggtggacggctcctcatggtagaaactcgacttgcaaatgatctggctgagtttgagggagacttttccttggaaggacttcgtctttggaaaacagcattctcagcaatgactcagaatccaaggccagggtcaccccttcgcagtggccaaggagttgtcaataaagggtcaagtaatagccctaagatggttgaagataaaaaaattgtgattatgccttgcaaatgtgccccaagtcgacaactggttcaagtgtggcttcaagccaaagaagaatacgaacgttccaagaaactgcctaaaaccaagccaactggagttgtaaaatctgctgagaactttagctcttcagttaacccagatgacaaacctgtagtgcctccaaaaatggatgtaagtccatgtatactccccactacagcacataccaaggaggatgttgataattctcagattgctttacaagcaccaaccacgggatgtagtcaaactgcaagtgaaagtcagatgctgccaccagttgcctctgcaagtgatcccgaaaaagatgaagatgatgatgataactattacattagttatagctcccctgattctccagtaattcccccttggcaacaaccaatatccccagattccaaagcattaaatggagatgatagaccctcatcaccagtagaggagctgccttcattggcttttgagaacttcttaaagccaataaaagatggtatacaaaaaagcccctgcagtgagcctcaagagcctctagtgatatctccaattaatactagggcaagaactgggaaatgtgaatcactttgctttcatagtacaccaatcatacagagaaaacttctggaaaggcttcctgaagcacctggccttagcccattatcaacagaaccaaaaacacagaagttgagtaataagaaaggaagtaatactgacactcttagaagagtactgttaacacaagcaaagaatcaatttgcagcagtaaataccccacagaaagaaacttctcagattgatggaccatctttaaacaatacttacggtttcaaagtcagcatacaaaacttacaggaggcaaaagctttacatgagatacaaaatcttaccctaatcagtgtggagttgcatgctcgaactagacgagacttagaaccggatcctgaatttgacccaatctgtgctctgttctactgcatctcatctgacactccactgccagatacagaaaaaacagaactcacaggtgtaatagtgattgataaagacaagacagttttcagtcaagatatcagatatcagactccattacttattagatctggaattacaggactcgaagtcacctatgctgctgatgagaaggcactttttcatgaaattgcaaatataataaagaggtatgatcctgatattctgctaggatatgagattcagatgcattcctggggttacctcttacaaagggctgccgctttaagtattgacttatgtcggatgatctctcgggtgccagatgacaaaattgagaacagatttgcagctgaaagagatgagtatggatcatatacaatgagtgagataaatattgttggccgaattacactaaatctttggagaatcatgagaaatgaggtggctctaactaactacacctttgaaaatgtgagctttcatgttcttcatcagcgttttcccctctttacctttcgagtcttgtcagactggtttgataacaagacagatctatacagatggaaaatggttgatcattatgttagccgtgtccgtggaaatctccaaatgttagaacagctggacctgattgggaaaaccagtgagatggctagactttttggcattcagtttttacatgtactgacaaggggttcacagtaccgtgtggaatcaatgatgttgcgtattgctaaaccaatgaactatattcctgtgacacctagtgttcagcaaagatcccagatgagagccccacagtgtgttcctctaattatggagcctgaatcccgcttctatagcaactctgttctcgttttggatttccaatcactttatccttctattgtgattgcatataactactgcttttccacctgccttggccatgtggagaacttgggaaagtatgatgagttcaaatttggctgtacctctctgagagtacctccagatttactttaccaagttaggcatgatatcacagtgtcccccaatggagtagcttttgtcaagccttcagtaagaaaaggtgtactaccaagaatgcttgaagaaattttgaagactagatttatggtgaagcagtcaatgaaggcttacaagcaagacagagccctgtcacgaatgcttgatgcgcgtcagttgggacttaagctgatagcaaatgtcacatttggctatacatctgctaatttttctgggagaatgccatgcattgaggttggcgatagtattgttcacaaagccagagagaccttggaacgagctattaaactggtgaatgataccaagaaatggggggctagggttgtatatggcgatactgacagtatgtttgtgctactgaaaggagccactaaggagcagtcttttaagattggtcaggaaattgccgaagctgtaactgctaccaatcctaaaccagtgaaattgaagtttgaaaaggtatatttgccctgtgttttacaaacaaaaaagaggtatgtgggttacatgtatgaaacactggatcagaaggacccagtatttgatgcaaaaggaatagaaacagtcagaagagattcctgccctgctgtttctaagatacttgagcgttctctaaagctgctatttgaaacgagagatataagtctaattaaacagtatgttcagcgacaatgtatgaagcttctggaaggaaaggccagcatacaagactttatctttgccaaggaatacagaggaagtttttcttataaaccaggagcttgtgtgccagcccttgaacttacaaggaaaatgctgacttatgaccggcgctctgagcctcaggttggggagcgagtgccatacgtcatcatttatgggacccccggagtaccacttatccagcttgtaaggcgcccagtggaagtcctgcaggacccaactctgagactgaatgctacttactatattaccaagcaaatccttccacccttggcaagaatcttctcacttattggtattgatgtcttcagctggtatcatgaattaccaaggatccataaagctaccagctcctcgcgaagtgaacctgaagggcggaaaggcactatttcacaatattttactaccttacactgtcctgtgtgtgatgacctaactcagcatggcatctgtagtaaatgtcggagccaacctcagcatgttgcagtcatcctcaaccaagaaatccgggagttggaacgtcaacaggagcaacttgtaaagatatgcaagaactgtacaggttgctttgatcgacacatcccatgtgtttctctgaactgcccagtacttttcaaactctcccgagtaaatagagaattgtccaaggcaccatatctccggcagttattagaccagttttaaattgtcaatatcacagtattacaggtgctatttttttcagtgcttaccactaaactgttgtgcatggtgctttttaactttcatcgagtcaaggatgttcactgtctgttatctgaagactatgaagacttctatgctaaccgaattaaaatgtacttgttgatctctgaatagctcacttcttacaatgtacaaattcctcattctgtcaccttttaaacattgttttataatgcaggtgttggatttgctccagtatgtgtaccatcttgtaaattcatttgagtagatcatgtttacttcccagtggaaggagcactgaaaacctcttaaagaaaaagcatttgtgtgttttccttgaactgtctgtatcaagacgtgttacttcgagatatccattcactttataattttgactgcaaaatattttgtaaatacacttttttacttttcaaacgagcaaaataatgtgcaatgatttttatacaaatgattttcaagttgtttggtatatttcctctaggttttgcttgactcaaagtagatcgttattttgatcaaactgtgcaaacagtagtaccacgtgtagcattttgaaacattatttttttttaaaaaatgctgtcttgctttagctattaatggggcattgtgaggaactgtgcaaagacatttttgttacaaacctgtgggcctgttgcaatactttaaaaataaaaaattttattccatttgcttgttttgtatagacatttctattgcttctaaatatacttaaaatattttctttccttatgtactgtacagttaatcttatttgccatcatcttgaacacaaaatgtgtatttagaatatttgtataactgtgtaaaataaaaaaggaattatgtggtcagtgcattgttttttaaactggaaatcattttgttttaaaagttaataatggaaaccatattaaaattgaataaaatataaaataatat

SEQ ID NO: 4560 - DNA, 10600 bp, Homo sapiens
gtgaagggaggcagtggcggcggcggcgaacatgttttcagtaaggatagtgactgcagactactacatggccagcccgctgcaggggctggatacctgccaatcccccctcacccaggcccctgtcaagaaggtgccggtggtgcgagtcttcggagcgaccccggcagaataaaacccaagacaagccacataaaagcaacctaaaaattaaactgtcatcatattatttgttttaaaactatggaataatatatctgaggaagatttctctcaaaattgtttttctcaatttcaaattccgggtgtacctgtgcaggtttattacaaaggtatattgcataatgctgaggtttgaagtacgactgaacccgtcacctaggaagtgagcatagtactcaataggtcagaagacatgtcttcatctacatggcatctttccttacctctatgtgccatacgatggttatggacagcagccagaaagctatctttctcagatggcattcagtatcgacagagcacttaatgtggctttaggcaatccatcttccactgctcagcatgtgttcaaagtgtcattagtatcaggaatgcctttttatggttatcatgagaaggaaagacactttatgaagatctatctttacaatcctacaatggtgaaaaggatatgtgaacttttgcaaagcggagccataatgaataaattttaccagcctcatgaagcgcatattccctacctcctacagctcttcattgactacaatctttatggcatgaatttaataaatctggctgctgtcaagttccgaaaagcaagaaggaaaagtaatacattgcatgcaactggatcctgcaagaatcatttatcaggaaattctcttgctgatactttatttcggtgggaacaagatgaaataccaagctctttaatattggaaggtgttgaaccacagagtacatgtgaattagaagtggatgctgtagctgctgatatcttaaatcgtctggacattgaagctcaaattggtggaaaccctggtctacaggccatatgggaagatgaaaagcaacggcgaagaaacagaaatgaaacttctcaaatgagccaacctgagtcacaagatcacaggtttgtgccagcaacagaaagtgaaaaaaaatttcagaagagacttcaggaaattctcaaacagaatgatttctctgtaacattatcaggatctgtggactacagcgatggatcccaggagttctctgctgagttaacattgcactctgaggttctgtctcctgaaatgcttcagtgtacaccagccaatatggtagaagttcacaaagacaaagagtcaagcaaaggtcacactagacacaaagtggaagaagctcttattaatgaagaagcaattttgaaccttatggaaaatagtcagacttttcagcctttgacccaaagactgagtgagtcacctgttttcatggacagtagtcctgatgaggctctggtacatcttcttgctggtttggaaagtgatggatatcggggggaaagaaataggatgccatcaccatgtcgctcctttggaaataataaatatccacaaaatagtgatgatgaagaaaatgaaccacagattgaaaaagaggaaatggagcttagtttggtgatgtcccagagatgggacagcaatattgaagaacattgtgccaaaaagagatcactgtgcagaaatacccacagaagttcaactgaagatgatgactcatcttcaggagaagaaatggaatggagtgataacagtttgcttctagccagtctttctatacctcagttagatggaactgcagatgaaaatagtgacaatccattgaacaatgaaaattctagaacccactcttctgtaattgcaacaagcaagctttcagttaaaccctccatctttcacaaagatgctgctacattagaaccctcatcttctgctaagattacctttcagtgtaaacacacaagtgccctttcttcccatgttttgaacaaggaagatttaattgaagacctttcacagacaaacaaaaatacagaaaaaggtctagataactcagtcacttcttttacaaacgaaagcacttattctatgaaataccctggatctttaagcagtactgttcattcagaaaattctcataaagagaatagtaagaaagagatcctcccagtatcttcctgtgaaagtagtatttttgattatgaagaagatattccatctgttacaagacaagtaccaagtagaaaatatacaaacattagaaaaatcgaaaaggattccccttttatacatatgcaccgtcaccctaacgagaatacattgggcaaaaattctttcaacttttctgacttaaatcattcaaaaaataaagtatcctctgaaggaaatgaaaaaggaaacagcacagctctgagtagtttattcccttcatcatttactgaaaattgtgaattactgtcatgctcaggggagaatagaactatggtgcattctcttaatagcactgctgatgaaagtggactaaataaacttaaaattaggtatgaagaatttcaagaacataaaacagaaaagccaagcctcagccagcaagcagcacactatatgttttttcccagtgttgttctttctaactgtcttactagaccacagaaactatctcctgtcacatataaattacaacctggcaataaaccatcccggttaaaattgaataaaaggaaacttgcaggtcatcaggagacttctaccaaaagtagtgagactggatccacaaaagataattttatacaaaataatccttgtaatagtaatcctgagaaggataatgcattggctagtgatttaactaaaaccactcgtggagcttttgaaaataaaacacccacagatggttttatagactgtcactttggagatggaacgttagaaactgagcagtcctttggactatatggaaataaatacacacttagagccaaacgcaaggtaaattatgagactgaagacagtgagtcaagttttgtaactcacaactcaaaaattagtctacctcatcccatggaaattggtgaaagtttagatggaactctcaaatcccgaaaacgaagaaaaatgtctaaaaagctgccccctgtcatcataaagtatattattattaatagatttagagggagaaaaaatatgcttgtgaagctaggaaaaatagactctaaagaaaaacaagtaatattaacagaagaaaaaatggaactatataaaaagcttgcacctttgaaggacttttggccaaaagttcccgactcccctgcaaccaaatatcccatttatccactaacaccaaagaaaagtcacagaagaaagtcaaaacataaatctgctaagaaaaaaactggtaaacaacaaaggacaaataatgaaaatattaaaagaactttgtctttcaggaaaaaacggtcacatgctattctttctcctccctcaccatcttacaatgctgaaaccgaagattgtgacctgaattatagtgatgttatgtctaaactaggttttctttctgagagaagcacaagtcccataaattcttctccacctcgctgctggtctcccacagatccaagagctgaagaaatcatggctgctgcagaaaaagaggcaatgctttttaagggtcctaatgtatataagaagactgttaattctcgtataggaaaaactagtcgcgcaagagcacagattaagaaatcaaaagcaaagcttgctaatccctctatagttactaagaaaaggaacaaacgaaatcagacaaataaactagtagatgatggaaaaaagaaaccaagagcaaaacaaaaaacaaatgagaaaggtacatcgagaaagcatacaacacttaaggatgaaaaaataaaatctcagtctggtgctgaggttaagtttgtactgaaacaccagaatgtgtctgaatttgcaagtagttctggaggctctcaactactttttaaacagaaagatatgccactaatgggctctgctgtagatcatcccctttctgcttccctacccactggaattaatgcacaacagaagttatctggctgcttttcttctttcttagaaagcaagaagtctgtagatttgcagacattccccagttcacgagatgatttgcatccatcagttgtttgtaattctataggacctggagtctcaaaaattaatgttcaaaggcctcataatcaaagtgctatgtttactctaaaggaatcaacgttaattcaaaaaaatatatttgacctttccaatcatttatctcaggtagcacagaatacacagatatcttctggtatgtcctcaaagatagaagataatgcaaataatatacaaagaaactatttgtcatcaatcggaaagttaagtgaatatcgcaattccctagaatcaaagctggaccaagcatatacccctaattttttgcattgcaaagacagtcagcagcagattgtgtgcatagcggaacagtcaaagcacagtgaaacttgttctccgggaaatacagcttcagaggaaagccaaatgcctaataattgctttgtaacttccttgagaagtccaatcaaacaaatagcatgggagcaaaagcaaaggggctttattttagatatgtcaaattttaaacctgaaagagtaaaaccgaggtcgttatcagaagcaatttcacaaaccaaagcactttctcagtgtaaaaatcgaaatgtgtcaacaccttcagcatttggtgaaggacagtctggactggcagttctaaaagaattgttacaaaaaagacagcagaaagcacaaaatgcaaatactacacaagacccattatccaataaacatcaaccaaataaaaatatttctggttcccttgagcataacaaagcaaataaacggacacgatcggtaacgtccccaagaaaacctcgaactcccagaagtacaaaacaaaaagaaaaaatccccaaacttctcaaagtagactctttaaatttacaaaactctagccagttggataactctgtatcagatgatagtcccatctttttttcagatccaggctttgaaagttgttactcacttgaagatagtttatctcctgaacataattataattttgatattaacacaataggtcagactggattttgtagcttttattctggaagtcagtttgtcccagctgatcagaatttgcctcagaagttcctaagtgatgctgttcaggatctttttccaggacaagctatagaaaaaaatgagtttttaagtcatgacaaccagaaatgtgatgaagacaagcatcataccacagactcagcctcatggattagatctggtactttaagtcctgaaatttttgagaagtcaaccatagatagcaatgagaatcgtcgccacaaccagtggaaaaatagctttcatcctctaacaactcggtctaactcaataatggattctttctgtgttcagcaggcagaagactgtctaagtgaaaaatctagattgaataggagttcagtaagcaaagaagtgtttcttagcctcccacagccaaacaattcagactggattcaaggtcacaccagaaaagaaatgggacagtctcttgactcagccaatacctcttttactgcaatactctcctcccctgatggtgaacttgtagacgtggcctgtgaagatttagaactgtatgtttcaagaaacaatgatatgttgacaccaactcctgatagttcaccaagatctactagctctccttcacaatctaaaaatggcagcttcacccctcgaactgctaacattctgaaaccacttatgtcccccccaagtagggaagaaattatggcaactttgttggatcatgacctgtctgagactatttaccaggaaccattttgcagtaatccttctgatgtaccagaaaagcccagggagattggtggacggctcctcatggtagaaactcgacttgcaaatgatctggctgagtttgagggagacttttccttggaaggacttcgtctttggaaaacagcattctcagcaatgactcagaatccaaggccagggtcaccccttcgcagtggccaaggagttgtcaataaagggtcaagtaatagccctaagatggttgaagataaaaaaattgtgattatgccttgcaaatgtgccccaagtcgacaactggttcaagtgtggcttcaagccaaagaagaatacgaacgttccaagaaactgcctaaaaccaagccaactggagttgtaaaatctgctgagaactttagctcttcagttaacccagatgacaaacctgtagtgcctccaaaaatggatgtaagtccatgtatactccccactacagcacataccaaggaggatgttgataattctcagattgctttacaagcaccaaccacgggatgtagtcaaactgcaagtgaaagtcagatgctgccaccagttgcctctgcaagtgatcccgaaaaagatgaagatgatgatgataactattacattagttatagctcccctgattctccagtaattcccccttggcaacaaccaatatccccagattccaaagcattaaatggagatgatagaccctcatcaccagtagaggagctgccttcattggcttttgagaacttcttaaagccaataaaagatggtatacaaaaaagcccctgcagtgagcctcaagagcctctagtgatatctccaattaatactagggcaagaactgggaaatgtgaatcactttgctttcatagtacaccaatcatacagagaaaacttctggaaaggcttcctgaagcacctggccttagcccattatcaacagaaccaaaaacacagaagttgagtaataagaaaggaagtaatactgacactcttagaagagtactgttaacacaagcaaagaatcaatttgcagcagtaaataccccacagaaagaaacttctcagattgatggaccatctttaaacaatacttacggtttcaaagtcagcatacaaaacttacaggaggcaaaagctttacatgagatacaaaatcttaccctaatcagtgtggagttgcatgctcgaactagacgagacttagaaccggatcctgaatttgacccaatctgtgctctgttctactgcatctcatctgacactccactgccagatacagaaaaaacagaactcacaggtgtaatagtgattgataaagacaagacagttttcagtcaagatatcagatatcagactccattacttattagatctggaattacaggactcgaagtcacctatgctgctgatgagaaggcactttttcatgaaattgcaaatataataaagaggtatgatcctgatattctgctaggatatgagattcagatgcattcctggggttacctcttacaaagggctgccgctttaagtattgacttatgtcggatgatctctcgggtgccagatgacaaaattgagaacagatttgcagctgaaagagatgagtatggatcatatacaatgagtgagataaatattgttggccgaattacactaaatctttggagaatcatgagaaatgaggtggctctaactaactacacctttgaaaatgtgagctttcatgttcttcatcagcgttttcccctctttacctttcgagtcttgtcagactggtttgataacaagacagatctatacagatggaaaatggttgatcattatgttagccgtgtccgtggaaatctccaaatgttagaacagctggacctgattgggaaaaccagtgagatggctagactttttggcattcagtttttacatgtactgacaaggggttcacagtaccgtgtggaatcaatgatgttgcgtattgctaaaccaatgaactatattcctgtgacacctagtgttcagcaaagatcccagatgagagccccacagtgtgttcctctaattatggagcctgaatcccgcttctatagcaactctgttctcgttttggatttccaatcactttatccttctattgtgattgcatataactactgcttttccacctgccttggccatgtggagaacttgggaaagtatgatgagttcaaatttggctgtacctctctgagagtacctccagatttactttaccaagttaggcatgatatcacagtgtcccccaatggagtagcttttgtcaagccttcagtaagaaaaggtgtactaccaagaatgcttgaagaaattttgaagactagatttatggtgaagcagtcaatgaaggcttacaagcaagacagagccctgtcacgaatgcttgatgcgcgtcagttgggacttaagctgatagcaaatgtcacatttggctatacatctgctaatttttctgggagaatgccatgcattgaggttggcgatagtattgttcacaaagccagagagaccttggaacgagctattaaactggtgaatgataccaagaaatggggggctagggttgtatatggcgatactgacagtatgtttgtgctactgaaaggagccactaaggagcagtcttttaagattggtcaggaaattgccgaagctgtaactgctaccaatcctaaaccagtgaaattgaagtttgaaaaggtatatttgccctgtgttttacaaacaaaaaagaggtatgtgggttacatgtatgaaacactggatcagaaggacccagtatttgatgcaaaaggaatagaaacagtcagaagagattcctgccctgctgtttctaagatacttgagcgttctctaaagctgctatttgaaacgagagatataagtctaattaaacagtatgttcagcgacaatgtatgaagcttctggaaggaaaggccagcatacaagactttatctttgccaaggaatacagaggaagtttttcttataaaccaggagcttgtgtgccagcccttgaacttacaaggaaaatgctgacttatgaccggcgctctgagcctcaggttggggagcgagtgccatacgtcatcatttatgggacccccggagtaccacttatccagcttgtaaggcgcccagtggaagtcctgcaggacccaactctgagactgaatgctacttactatattaccaagcaaatccttccacccttggcaagaatcttctcacttattggtattgatgtcttcagctggtatcatgaattaccaaggatccataaagctaccagctcctcgcgaagtgaacctgaagggcggaaaggcactatttcacaatattttactaccttacactgtcctgtgtgtgatgacctaactcagcatggcatctgtagtaaatgtcggagccaacctcagcatgttgcagtcatcctcaaccaagaaatccgggagttggaacgtcaacaggagcaacttgtaaagatatgcaagaactgtacaggttgctttgatcgacacatcccatgtgtttctctgaactgcccagtacttttcaaactctcccgagtaaatagagaattgtccaaggcaccatatctccggcagttattagaccagttttaaattgtcaatatcacagtattacaggtgctatttttttcagtgcttaccactaaactgttgtgcatggtgctttttaactttcatcgagtcaaggatgttcactgtctgttatctgaagactatgaagacttctatgctaaccgaattaaaatgtacttgttgatctctgaatagctcacttcttacaatgtacaaattcctcattctgtcaccttttaaacattgttttataatgcaggtgttggatttgctccagtatgtgtaccatcttgtaaattcatttgagtagatcatgtttacttcccagtggaaggagcactgaaaacctcttaaagaaaaagcatttgtgtgttttccttgaactgtctgtatcaagacgtgttacttcgagatatccattcactttataattttgactgcaaaatattttgtaaatacacttttttacttttcaaacgagcaaaataatgtgcaatgatttttatacaaatgattttcaagttgtttggtatatttcctctaggttttgcttgactcaaagtagatcgttattttgatcaaactgtgcaaacagtagtaccacgtgtagcattttgaaacattatttttttttaaaaaatgctgtcttgctttagctattaatggggcattgtgaggaactgtgcaaagacatttttgttacaaacctgtgggcctgttgcaatactttaaaaataaaaaattttattccatttgcttgttttgtatagacatttctattgcttctaaatatacttaaaatattttctttccttatgtactgtacagttaatcttatttgccatcatcttgaacacaaaatgtgtatttagaatatttgtataactgtgtaaaataaaaaaggaattatgtggtcagtgcattgttttttaaactggaaatcattttgttttaaaagttaa

SEQ ID NO: 4561 - DNA, 5923 bp, Homo sapiens
gttcctcttctctgccccggttccgggcggtccgctgggaggtggcgcccggagggacacccgtgcctggggtcggggccagtgctcttctcggagctccagaagttctgctgagaagcgcggcggcagcaagacgacttctccggagccgccgagctggagttagaggtggagctccgtggggccgggcccccggctgcggggcagcggctcctgcaggcggaggccccggcggagaatgagccggagccggaggtggtggtggtctcctggcagagcggtgggaccgggagcaagctgcggtggttcaccaccttgatgctgtgtgcctccttcctggggctgggattgagtgttgctatagtgggacccacgtttcaagatttggcaacaaacgtgaaccgaaatatcagtagtctgtctttcatttttgtgggtcgtgccttgggatatttgagtggctctgtgattggtggatttcttgtcgatgtcatgaattattttttacttttgggaatctcaatgtcggctaccaccgttggtctttatcttgttcctttttgcaagacagcaatattactcactgtcatgatgtctatcttcggtgtttcaattggcattctggatacaggtggtaacgtccttatcttggctatttggggggacaaaggagccccacatatgcaggccttacacttctcttttgccttgggtgcctttttggctccactgctagctaaactggctttgggtccgacagcgtctgctgaaaaccacacagagtctgacttccatcctgcactcaaccaatcatctgatgctgactcagaagctctgtttggagtacctaatgataagaatttactgtgggcttatgctgttatcggtacttacatgttcttagtttctgtcatttttttttgtctgtttttaaagaatagctcaaagcaagaaaaagcaagagcatctgctgagacatttcgaagagcaaaatatcacaacgcccttctttgtctcctttttctgttcttctttttttatgttggagctgaggtaacatatggctcttatgttttctcatttgcaaccacccatgctggcatgaaagaaagtgaagctgctgggttgaactccatcttctgggggacatttgcagcctgcaggggcctggcaatcttttttgctacctgtttacagcctggaaccatgattgtgttgagcaacattggcagcctgacttcatctttatttctggtgctttttgacaagaacccaatttgtctctggatagcaacttcagtgtatggggcttcaatggcaaccacatttccgagtggtgtttcttggattgagcagtacacgaccatccatgggaaatctgcagcattttttgtaattggtgcttccctgggagaaatggctattcctgcagtcattggaattcttcaaggaaaataccctgatttgcctgtagttctgtatacctctttgggagcatcaatagctactggtattttatttcctgtgctatataaattagccacttcacctcttgatcgccagcgaaaagaagacagaaagagtgaggaccagaaagctctgctctctagctccgggctaaatgaatatgaggaagagaatgaagaggaggatgcagaaaaatggaatgaaatggattttgaaatgattgaaacgaatgatacaatgaggcattctataatagagacatctagaagtagtctgacggagcccacagctgaagtctataatcaatacccatcaaatgcactggtgtttgagtcttctccttttaatactggcagtgcccatgtgaagcacttgccagaaaccaggacaaaagggactaacgtttagagaagatggattactcactgacatctttgaataactgccacttctaaggacgccattcagagcagagcattagcagaatttcaccatgctttggggattaaaatttttaggtccatattatagcaaatgctaaaaatttttgaaatgttctgtaattcccagagtcttccataaataaccaaatggtctcatacacgtacaataggatcttgttataacgctatcatttgacatgtgactgattaggaaatattttatggtctccacccctcagagcacccaaagaaggcattgtttttgagaaggggggtattctcagaatgagaccatgtaggagttgaattgattggttgaacaaattatcaggtatcaatatttttccaggaaagttgaggagaatagtttcataaaagagaaatgggccgggtgcagtggctaaagcctgtaatcccagcactttgggaggccgagacgggcagatcacgaggtcaggagatcgagaccatcctggctaacacagtgaaaccctgtctctactaaaaatacaaaaaattagccaggcgtggtggcaggcacctgtagtcccagctacttgggaggctgaggcaggagaatggcgtgaacccgggaggtggagcttgcagtgagccgagatcatgccacaccgtactccagcctgggcgacatctagactccgtctcaaaaaagaaatggagaggtatttttattaattgctttaccttatctgtagggttggatcaaagaatgtaatgactcatttgatttctaatttcaatgaagagaacacagaacagggcccaaggggtcgggcttcaagccttgacttcttctagccctgcactctgtcacttaacgtaggccttgtttatctcgcctcctgatctgtgattctagaaatgaaaatgagatgatttccaaattgggaatctgtaagttttaaagtttgtgcaaaatgtctgctagaaattagtacaagtgacagcatgttcttcatttcaaatgagaagtgaaaccaaaatgataaatagctttaagaatgtgctaatgataaatgattacatgtcaatttaatgtacttaatgtttaataccttatttgaataattacctgaagaatatattttttagtactgcatttcattgattctaagttgcactttttacccccatactgttaacatatctgaaatcagaatgtgtcttacaatcagtgatcgtttaacattgtgacaaagtttaatggacagttttttcccatatgtatatataaaataatgtgttttacaatcagtggcttagattcagtgaaatacagtaattcattcaattatgatagtatctttacagacattttaaaaataagttatttttatatgctaatattctatgttcaagtggaatttggagacactatgttctaattttaagaactgtttcagtgttattagattagtagtagggctgtagatggggtctttcgaggtcctttgcctacctcagtaacagaggctgggtctgagccttgctcgagattagctcttcaccaggtctgtgtggtaatcatatcgtagttaccgtaggtcacgctgcaagtgtaatttacagtgaggcatagtcttttccagtgattggaatacttgtgtcaccgatccagggtttctctttcctgagtctgaaatacctgggaaaccagttagaaggtgactgggtagcctaggagtcaaggatcagaaagggtacttcatatatatgtggcagaattggtgcaggtgatcctttgaaaaatgacaagaattgatgaaattttgtttacttcctccaattttttgctgaataacatctcctttctacctgattggagtaggcttgctttctcttacttaatttctataaatttgccattgttttgtctcaagtaaaatacagtgtctttcttgaccactgcccgcccattcaccttatatgcctgccacagtcttggttcatgtaataacctaacagctttggagatggcggtggagaagttaatggtaaaaaccttcttgctctttttatttttatttatttattaggggtgggggatggtgtctcactctgtcactcaggctggagtgcaatgacgtgatctcagctcactgcaacctctgcctccctggttcaagcgattcttctgcctcggcctcctgagtagctgggattacaggcatgcgccaccatgcccagctaatttttgtgtttttagtagagagggggtttcatcatgttacctaggctgatctcaaactcctgatctcaagtgatctgcccacctcagcctcccaaagtgttgagattacaggcatgagccactgtgcccagcccttttgctctttttatagtgtaaatttccctcagttagaacttggaaattacttctgcttcacttactgccttttctcaggttgttggaatctaggcagtagcagttacttggcagctaggaggcttgctagaataggaattccaccttcagcatttactgttacagggtagaagatgcagctcagggagagaaggatgatgataagaacatggcagaaaatctcaaaatctactctggaaaattcactatgtttccacacaccaacatgtgaatcgtcatgagatcatagggcattgttaaagttccatattggaaggaaaagacttagtacaattctaagaattagcatttatcctgctgatcagttcttagctaagtgtctgctgatacctaagtaaccaatatacccaagtgttctattgctgggtaacacagtaccacacattgaacaccttaaaacaatagacatttggtaatgtctgtacaggctgtactgaagcggcctgtacagggccgcttcagtacaggaccttacctatgtagactgaggtacgtgtttcttgctgactgtcagctgggcaccactcagcttcgagaggcctcccacagttcttgccatgtggccttctcacagatgcctctcacaacatggcagtttcttcaaagcaagcaggagaatctctaaatgagtcttgtatgacattacgtcattatgggaataacatcccatcacctttgccatattctagcgtctagaagcaaggtatgagttccaacaaaactcaagggtagaggctagaacagggatgtgactcattgcggatcaccttagagcatgcctgccacactcgggtacctgcagaatagagattctcaaaagttctaaaaactgagctaagagcaggacatgatggctcacacctgtaatcccagctactcaggaagctggggtggaagtatctcctgaggtcaggagtttgagaccagcctgggcaatatagtgagacctctgtctctaaaaaatttttaaaagagaccccttctctaaaaaacaggaaggctgggcgcggtggctcacacctgtaatcccagcactttgggaggccgaggtgggcggatcacaaggtcaggagatcaagaccatcctggctaacacggtgaaaccccatctctactaaaaatacaaaaaattagccgggcgggcgtggtggcgggtgcctgtagtcccagctactcgggaggctgaggcaggagaatggcgtgaacccaggaggcggagcttgcagtgagccgagatggtgccactgcactccagcctgggtgacagagcgagactgtctcaaaaaaaaaaaacaaaaatattcaactatgagctggggaaaaaagcttcagcggtcactgaaagtgcttacaggtacagctagtatggggatggaatatgccccattagccaggccaacagatctcatataggagaatctgttttatgtttgttggacagtgggtgagttatcgcagagttatgccttttttttctgtcactattttatgtcccttatcactgtgcctttaacctactgaaatgcagttgaggccgggtgcggtggctcacgccaagatggcgccactacactccagcctgggcaacagagggagactccatctc

SEQ ID NO: 4562 - DNA, 2269 bp, Homo sapiens
ctgctcaccatttctgagccgatgaggactcacctgggctcctcactggtcagggaactgtggcccagccgcagagtgattgctttgtcaagaagggaaacatttacctttccttcttccctctgctctctcctaattaacaattaaatggaaggagttgaaaagacatgtcagagacttcaatctcctcccggcctgaggatgaagggggctcgaacctgaatgttctcttcgctgtggccagaacctagggggctggggttgctgccagctcgactggaggcctgcttccagccccaggctgtggtgaggggcctcacagatttcacaaacaggagggcggctgaccaagcgccaaactatttagacaaacacacaccctcccttcccgccagagtttgggctgatttctcccaatgctaatgaacagctcataagtattaatagactccttggcacctaggagtcaggcagagtaacttccagtgtgaattttggccaaggaccctgatgcagcctcaggatcttccaagcccctgttgagtccagggggcatgagacacacagggaggctggggctgctcccaggaagcaggctcacaagagccagacaggctcccacagacagcttttaggtcacagaaacctctgcctgccaggtaggcatgaacacagaaaccctcccaaatcctcagactgtggagcacactccaggtgagccaggatcaatccctggtctcagagaacacttagatgggggtgaaaagcaggaactgagagcttcccacccagcacctgtccctgctaccagctaaacctgtgtcggtcagtgcaggaattgtacaggtgatgctctgagcctgtgctgaggccatgtatggactgaggaaacctcactgtgtgtatgtaaagttaattcaaacctatttccctgagtgcttacatattttcataaggaaagttctgttaggagagctgcctgaaacaacacctctgcctgtgctcccactttctcccgctggtgtggggaggagaggctgacatcgctgggtccacgttcctctgccctgggtggggtattaatgctgccattcccacgctgcctgctgtttcccctcatcctcaggagggctggtctctgtgctgcaggcagctccaccaggcctgggagcatgacaccgtctgccaatgccttgcccaggtccactggcctcacccttccgcaggcctgcgccttctgtgactctctgcctcagcaatttctctggatttctttgtcctcaggaatgtgctggggccacaggcaggtcaggccaggctttctggggagtgaatgctctctgccagtggcggatggaactggtagacacgtcccccggattcctcgcctgcaagtgggatggtgccaggaaagttctacaccatccttcccaggtcccaggaggacaagcacagttgtccacaagggaaccaagaggatgttgaaaaatcctggttggatctgaacttggaaacaaatttgaggaatctattttacttaatcctactgaaaaattccctaatgagttaaagaagaacaaagtaaaagaagataaaaaagcagttggtacttgaaatgaagatcaaatcatcaagtcctatatgtcacccacagatctgagatcactgactcccagagacacccagtttctcagtgtcagtacacactgcctgggttagtaagcacaggctgagacctgggaggaattgatgaaccaaatgtgtctgggcttttcacttcctcggcatgagtcagccaagaaagcccacctctcctccccagcagcgtgcagggcctctgcagataaatgtgcaggatagcagacctgggtgtggtgctgcctggcactgagccagcccccagattctttggctgcagagtggcctggccaactcacacaggtagcgcccttttattcttggaaaaggaagcaccaggtggaaagggaggttaaaggagggaacacaacttttttccagacccctctgcccaggatgttaaaggttgctggaaaatgcctttggtggctttaaatgtcacagatgacatattccaggatggatccagcctccactggacttggcccctctattttgattcctgcctttccccagcctcagccctgagcggcataatatctacacggggttagctgcaggtggaactcagaacacagctcctagacaagtagagtgaggcctatggcttcatcatcaaaatgtaaaattt

SEQ ID NO: 4563 - DNA, 593 bp, Homo sapiens
atgctcagggttccggagccgcggcccggggaggcgaaagcggagggggccgcgccgccgaccccgtccaagccgctcacgtccttcctcatccaggacatcctgcgggacggcgcgccggaggaggccgagacgctggcagagaccgagccagaaaggcacttggggtcttatctgttggactctgaaaacacttcaggcgcccttccaaggcttccccaaacccctaagcagccgcagaagcgctcccgagctgccttctcccacactcaggtgatcgagttggagaggaagttcagccatcagaagtacctgtcggcccctgaacgggcccacctggccaagaacctcaagctcacggagacccaagtgaagatatggttccagaacagacgctataagactaagcgaaagcagctctcctcggagctgggagacttggagaagcactcctctttgccggccctgaaagaggaggccttctcccgggcctccctggtctccgtgtataacagctatccttactacccatacctgtactgcgtgggcagctggagcccagctttttggtaatgccagctcaggtgacaacc

SEQ ID NO: 4564 - DNA, 3414 bp, Homo sapiens
caggagggagggagccagaggaaaagaagaggaggagaaggaggaggacccggggagggaggcgcggcgcgggaggaggaggggcgcagccgcggagccagtggccccgcttggacgcgctgctctccagatacccccggagctccagccgcgcggatcgcgcgctcccgccgctctgcccctaaacttctgccgtagctccctttcaagccagcgaatttattccttaaaaccagaaactgaacctcggcacgggaaaggagtccgcggaggagcaaaaccacagcagagcaagaagagcttcagagagcagccttcccggagcaccaactccgtgtcgggagtgcagaaaccaacaagtgagagggcgccgcgttcccggggcgcagctgcgggcggcgggagcaggcgcaggaggaggaagcgagcgcccccgagccccgagcccgagtccccgagcctgagccgcaatcgctgcggtactctgctccggattcgtgtgcgcgggctgcgccgagcgctgggcaggaggcttcgttttgccctggttgcaagcagcggctgggagcagccggtccctggggaatatgcggcgcgcgtggatcctgctcaccttgggcttggtggcctgcgtgtcggcggagtcgagagcagagctgacatctgataaagacatgtaccttgacaacagctccattgaagaagcttcaggagtgtatcctattgatgacgatgactacgcttctgcgtctggctcgggagctgatgaggatgtagagagtccagagctgacaacatctcgaccacttccaaagatactgttgactagtgctgctccaaaagtggaaaccacgacgctgaatatacagaacaagatacctgctcagacaaagtcacctgaagaaactgataaagagaaagttcacctctctgactcagaaaggaaaatggacccagccgaagaggatacaaatgtgtatactgagaaacactcagacagtctgtttaaacggacagaagtcctagcagctgtcattgctggtggagttattggctttctctttgcaatttttcttatcctgctgttggtgtatcgcatgagaaagaaggatgaaggaagctatgaccttggagaacgcaaaccatccagtgctgcttatcagaaggcacctactaaggagttttatgcgtaaaactccaacttagtgtctctatttatgagatcactgaacttttcaaaataaagcttttgcatagaataatgaagatctttgttttttgttttcattaaagagccattctggcactttaatgataaaatcccattgtatttaaaacatttcatgtatttctttagaacaacataaaattaaaatttaacatctgcagtgttctgtgaatagcagtggcaaaatattatgttatgaaaaccctcgatgttcatggaattggtttaaacttttatgcgcaaatacaaaatgattgtctttttcctatgactcaaagatgaaagctgtttcatttgtgtcagcatgtctcagattgaccttaccaagttggtcttactttgttaatttatctgttgtccccttcctctcctctgccctcccttcttgtgcccttaaaaccaaaccctatgccttttgtagctgtcatggtgcaatttgtctttggaaaattcagataatggtaatttagtgtatatgtgattttcaaatatgtaaactttaacttccactttgtataaatttttaagtgtcagactatccattttacacttgctttatttttcattacctgtagctttgggcagatttgcaacagcaaattaatgtgtaaaattggattattactacaaaaccgtttagtcatatctatctaatcagatcttcttttgggaggatttgatgtaagttactgacaagcctcagcaaacccaaagatgttaacagtattttaagaagttgctgcagattcctttggccactgtatttgttaatttcttgcaatttgaaggtacgagtagaggtttaaagaaaaatcagtttttgttcttaaaaatgcatttaagttgtaaacgtctttttaagcctttgaagtgcctctgattctatgtaacttgttgcagactggtgttaatgagtatatgtaacagtttaaaaaaaaagttggtattttataagcacagacaattctaatggtaacttttgtagtcttatgaatagacataaattgtaatttgggaacataaaaactactgaataaatcatgtggcctaatattgaaaatgtcactgttataaattttgtacatttttgatcaaatgtacatctcccctttgctaacggccgtctgctctcaaggatgacgtgggtttgatttctaagtgtttcacagtgtctgtaaatcaagaccaaagagcctgtcgatgagactgtttattaccagattcacttctgaattggccagaggaaatctgaatgtattatcctgtgtgtgtctaggtagagatattggaaggctgccaggggatttcgaagtttgcaacctttataggataactgatggcaatattaagacagacgcctgcttttgcaaataacttacaagactgtaaattccaaagatctgaatggggctttcctgatgttggtatctaaggcttaggcctatagattgatttacctttggaattgtgctccaaatgtctactgaagcttaaccgaagaactaataaatggactacagtagctcacgttacagggaaggagggtaggcagggaggctctgtgtgttaaaatgagggtctcactgctttaggattgaagtggctggaaagagtgatgcctggggaaggagatggagttatgagggtactgtggctggtactttctgtactaaacatttcctttttctattttaccactaattttgttttaaactgtgagccgtccaagtcagaagaagacagcaaaaaaagcaacttttccaacatacaatttacttttaataaagtatgaatatttcattttgagaacattccctggaattgccacataattcattaaaaacatttttttaagcaacacttggaacagtgtttactttaaatccttaatggccttaattaattctcagattcctgccccatcacttacagaaccaattcactttagagtgactaaaaggaaacgatagcctagctttctaaagccacgctgtgtccctcaattacagagggtaggaatgggtatacctctaactgtgcaaagcagagtgaaattcaattcatagaataacaactgctgggaatatccgtgccaggaaaagaaaaatttctggcaaatattttgtcactgctgtaaagcaaaatatttgtgaaagtgccaaaataaagtctgtcatgccaaaagt

SEQ ID NO: 4565 - DNA, 1615 bp, Homo sapiens
agcaggcgctcttggctcggcgcggcccgctgcaatccgtggaggaacgcgccgccgagccaccatcatgcctgggcacttacaggaaggcttcggctgcgtggtcaccaaccgattcgaccagttatttgacgacgaatcggaccccttcgaggtgctgaaggcagcagagaacaagaaaaaagaagccggcgggggcggcgttgggggccctggggccaagagcgcagctcaggccgcggcccagaccaactccaacgcggcaggcaaacagctgcgcaaggagtcccagaaagaccgcaagaacccgctgccccccagcgttggcgtggttgacaagaaagaggagacgcagccgcccgtggcgcttaagaaagaaggaataagacgagttggaagaagacctgatcaacaacttcagggtgaagggaaaataattgatagaagaccagaaaggcgaccacctcgtgaacgaagattcgaaaagccacttgaagaaaagggtgaaggaggcgaattttcagttgatagaccgattattgaccgacctattcgaggtcgtggtggtcttggaagaggtcgagggggccgtggacgtggaatgggccgaggagatggatttgattctcgtggcaaacgtgaatttgataggcatagtggaagtgatagatctggcctgaagcacgaggacaaacgtggaggtagcggatctcacaactggggaactgtcaaagacgaattaacagagtcccccaaatacattcagaaacaaatatcttataattacagtgacttggatcaatcaaatgtgactgaggaaacacctgaaggtgaagaacatcatccagtggcagacactgaaaataaggagaatgaagttgaagaggtaaaagaggagggtccaaaagagatgactttggatgagtggaaggctattcaaaataaggaccgggcaaaagtagaatttaatatccgaaaaccaaatgaaggtgctgatgggcagtggaagaagggatttgttcttcataaatcaaagagtgaagaggctcatgctgaagattcggttatggaccatcatttccggaagccagcaaatgatataacgtctcagctggagatcaattttggagaccttggccgcccaggacgtggcggcaggggaggacgaggtggacgtgggcgtggtgggcgcccaaaccgtggcagcaggaccgacaagtcaagtgcttctgctcctgatgtggatgacccagaggcattcccagctctggcttaactggatgccataagacaaccctggttcctttgtgaacccttctgttcaaagcttttgcatgcttaaggattccaaacgactaagaaattaaaaaaaaaaagactgtcattcataccattcacacctaaagactgaattttatctgttttaaaaatgaacttctcccgctacacagaagtaacaaatatggtagtcagttttgtatttagaaatgtattggtagcagggatgttttcataattttcagagattatgcattcttcatgaatacttttgtattgctgcttgcaaatatgcatttccaaacttgaaatataggtgtgaacagtgtgtaccagt

SEQ ID NO: 4566 - DNA, 4791 bp, Homo sapiens
agtggcggcgggagcggcagagacggcagcggccggagtcccgttgctgagtctcacatccgggttctggccgtgacccagctgcggccgccgcggagatgtgacccggcagtacggcaaatatggcggagccatctgttgaatcttcaagtccaggaggttcagcaacatcagatgaccatgaatttgatccatcagctgacatgctggttcatgattttgatgatgaacgaacattagaagaggaagaaatgatggaaggagaaacaaacttcagctctgaaatagaagatcttgcaagggaaggcgacatgccaattcatgaacttctcagcctttatggttatggtagtactgttcgactacctgaagaagatgaggaagaggaagaagaggaagaagaaggtgaagatgatgaagatgctgataatgatgacaacagtggctgtagtggggaaaataaagaggagaatataaaggattcatcaggtcaggaggatgaaactcagtcttccaatgatgatccatcacaatctgttgcttctcaagatgcccaggaaataatccgcccacgtcgatgtaaatattttgatacaaatagtgaagtagaagaagaatctgaagaagatgaagattatattccatcagaagactggaaaaaggagattatggtgggctccatgtttcaagcagaaattccagttggcatttgtagatacaaagaaaatgaaaaagtatatgaaaatgatgatcagctcctgtgggaccctgagtacttaccagaagataaagtgattatatttcttaaagatgcatctagaagaacaggtgatgagaagggtgtagaagcaattcctgaaggatctcacataaaagacaatgaacaggctttatatgaattggttaaatgcaattttgatacagaagaagcattgagaagattaagatttaatgtaaaagcagctagagaggaattatctgtttggacagaggaagagtgtagaaattttgaacaagggctgaaggcctatggaaaggattttcatttgattcaggctaataaagtccgaacaaggtcagttggtgaatgtgtagcattctattacatgtggaaaaaatctgaacgttatgatttctttgctcagcaaacacgatttggaaagaagaaatataatcttcatcctggtgtaacggattacatggatcgtcttctagacgaaagtgaaagtgctgcatctagtcgagcaccatcccctcccccaactgcatcaaacagtagtaacagccagtctgagaaagaagatggcactgtaagcactgctaatcaaaatggagtgtcatctaatggaccaggtgaaatattaaacaaagaggaagtaaaagttgaagggttacacattaatggaccaacaggtggaaataagaaaccacttcatgcagatatggatactaatggttatgaaacagataaccttaccactgacccaaaacttgcccatatgactgcaagaaatgaaaatgattttgatgaaaaaagtgagagacctgccaaaaggcgaagggtaaacagcaatggaaaagaaagtccaggttcttctgaatttttccaagaagcagtctcacatgggaaatttgaagaacttgaaaacacagatgactaaattttagacctattttactttctttggagtaaattctggtgtgactaaaattttcagggttgatgggttaccttaaaaagttgatttccttgaagcagtttgaaaatttgaattgagtcttaactttaggaaatgaggtttcataattctgccttttgcagatttttttactttaaagctgtcagactcttttaagggtattttaaaaattagtaaatttgaatgaactaaagatatatctctaccttctcatttgaatatctttagttcattcagatttactaattttggtaaatctgaatgaactaaagatgtatctgtaccttctcatttgatgtattaatcataaaatttcactacaaggtaatttttgcttagtttgatggatgaatgggaaactcaagtccaaatttctgcttaataccaatttctctgagtttcttgaaatgtctttaaaacagacatttttctcaccaaacagtttgagtatctttattaaggaaacccttacgaatcctgaaaattatgctagcatgatttttttatatatagaagtttaaaaataaaccaggtcaggtttgtatatgtaaaattgttgacatcaatgatgtctttccatattcttatctgggcttaagaaatacattctgtatttttccagattctttgtagcctttgaaagatttttacagtacatatgtcttgactgagctgtcctttcttaatacaaaagcgtgtataattttcttaacttgtacagttggtaaacttttatgagaggaattgttattctgagtctgtcagctttcattttattttgctaaggtttttctaatgaatttttaagtgtttgtgtagtaattaagtcatatttcttatccaggtggttaaagcattcataaaggattataaaatttttttttttttttttttttttaaatttctacttaagggcaagtaatttgagaattctgaaattaagcatgatgcttagattgcagtttgttttgcatttgctataattttcaaaattatttttgaagcaagacaaaagtttaatgtcagcttaagtgcttaaatatatcatgctgaccagaatcctgttatttttatatgcatcataaaatttcccatttctgcattaaataaacagaggaggggggtcaagtgatacttagatattggcacacacaaggaacaactgttggcaggcagtatcgattttatgaagagaaagtgaagtttgaaaacttttcaaacttttctagttacaatccaatttttcagatttgataatgcttttccaaagtgaaaataagatacacaataatcattgctctgtgtgattacagataggattatccatctgcatagccttgtaaaagtgccattttatttttagtgctaaattcttgttaaataatgtagttttatatagctgatagaccaacctatatccaaacttttataaaatattaattattcttgtttttctcacacaggcatactccaaatgcttcttccagttcatttttcagccatcagttcaagagccaatgcctttttaaaataaagcttctgtggtcttgtttttaatggctcaactgtctgatgtaattgagtgaaggtttgcactgagaaattagcattcaggccttacccccatgaagtattactgttaacatatgttcggactgcttcccttcaccaatgtgaacaactttttttcccaaacagtgttaaaagccactttgcaacacttgacttcatcttaatgtacattcactgttgttacatacatatctaagtaaatcaaagttttgggtggaagtgttgagaagtatgagttttttgttgtttttgttttacttaaaacttttaatttatccagaatggcagtagctttagcaagcagatggtcacaatctgttttctaaatcattttttattaaatgaatccaaagtatcctagctctttgtcaaagatggtctgtagaaatgtttttaaagattagggatgctgtactttttgaattgttgcagtgttggagatgccattttcacctttttaaaaagatgcattttatttgcaggtttgtgaagttcttgcaaactcttactacagaaatgttttaaatacattctcaggcatgtttgcaaaaatatggcacatgtatacattttaggaaatgttacttttgttaatctttaaaaaatacacctaatgaaagacattccactattatgcgtaatgctcagctttttgtaaagaaatatttaattgtattttgtgtttatacaggtatttcacacaataatttgttcttaatgcagccactataacttgataagtcattgcactatttaaaaagttttagtaatatcatgaatttaatttgcttaagatttagtacatttcagaacttttgaacttttgacaaattgcattggaaaaagaagtctgttaatagtgatttagtctccccgcctcattcccacccccaacaaagcactatcattttcatttggaatgggtattttctgtttcatgatgtattttcaaatagagttcaggatctgcaattcagttcaacacaagtttgttgagctttaaaatgtatttgaagtaatatttaaataggcatttaaaatttcaaattagatgttaaatttatgcatagtaattttgcactgtaaaataattcccttctcccattccttgtctgccattctgaatatgcttattaaaatatttttttaaacatatttgcctacataatactgtgtgaatattttcattagattaattcactaagattttattagagattgtttgaatgatgcatgttattgacaaggcaaatatatatatatacacagtctgtttcttctattcctagacatattgcactactttttcagtggttcttggtcccctttaccacatcttgggtgatgtatttttgtcttcttcccctttgccacaagagatcctttcagtccctagacctccattcactctgtttctcttctgctggattatataatttaaaaataatgtgttcccgtattttgtagtggagttcatatcacattatgttttgcaaaataaaacttgttttgtcacaat

SEQ ID NO: 4567 - DNA, 1100 bp, Homo sapiens
ccgccggccgtggtcgccgagtcggtgtcgtccttgaccatcgccgacgcgttcattgcagccggcgagagctcagctccgaccccgccgcgccccgcgcttcccaggaggttcatctgctccttccctgactgcagcgccaattacagcaaagcctggaagcttgacgcgcacctgtgcaagcacacgggggagagaccatttgtttgtgactatgaagggtgtggcaaggccttcatcagggactaccatctgagccgccacattctgactcacacaggagaaaagccgtttgtttgtgcagccaatggctgtgatcaaaaattcaacacaaaatcaaacttgaagaaacattttgaacgcaaacatgaaaatcaacaaaaacaatatatatgcagttttgaagactgtaagaagacctttaagaaacatcagcagctgaaaatccatcagtgccagcataccaatgaacctctattcaagctatgtatgtcaaaaaggatgttcctttgtggcaaaaacatggacggaacttctgaaacatgtgagagaaacccataaagaggaaatactatgtgaagtatgccggaaaacatttaaacgcaaagattaccttaagcaacacatgaaaactcatgccccagaaagggatgtatgtcgctgtccaagagaaggctgtggaagaacctatacaactgtgtttaatctccaaagccatatcctctccttccatgaggaaagccgcccttttgtgtgtgaacatgctggctgtggcaaaacatttgcaatgaaacaaagtctcactaggcatgctgttgtacatgatcctgacaagaagaaaatgaagctcaaaggtcaaaaaatctcgtgaaaaacggagtttggcctctcatctcagtggatatatccctcccaaaaggaaacaagggcaaggcttatctttgtgtcaaaacggagagtcacccaactgtgtggaagacaagatgctctcgacagttgcagtacttacccttggctaagaactgcactgctttgtttaaaggactgcagaccaaggagcgagctttctctcagagcatgcttttctttattaaaattac

SEQ ID NO: 4568 - DNA, 4116 bp, Homo sapiens
  misc_feature (313)..(435): n is a, c, g, or t
ggcagttgcagtggtgcagaatggctgacctcagtcttgcagatgcattaacagaaccatctccagacattgagggagagataaagcgggacttcattgccacactagaggcagaggcctttgatgatgttgtgggagaaactgttggaaaaacagactatattcctctcctggatgttgatgagaaaaccgggaactcagagtcaaagaagaaaccgtgctcagaaactagccagattgaagatactccatcttctaaaccaacactcctagccaatggtggtcatggagtagaagggagcgatactacagnnnnnnnnnnnnnnnnnnnnnnnnnnnnnnnnnnnnnnnnnnnnnnnnnnnnnnnnnnnnnnnnnnnnnnnnnnnnnnnnnnnnnnnnnnnnnnnnnnnnnnnnnnnnnnnnnnnnnnnnnnnatccctttaagatgtaccatgatgatgacctggcagatttggtctttccctccagtgcgacagctgatacttcaatatttgcaggacaaaatgatcccttgaaagacagttacggtatgtctccctgcaacacagctgttgtacctcaggggtggtctgtggaagccttaaactctccacactcagagtcctttgtttccccagaggctgttgcagaacctcctcagccaacggcagttcccttagagctagccaaggagatagaaatggcatcagaagagaggccaccagcacaagcattggaaataatgatgggactgaagactactgacatggcaccatctaaagaaacagagatggccctcgccaaggacatggcactagctacaaaaaccgaggtggcattggctaaagatatggaatcacccaccaaattagatgtgacactggccaaggacatgcagccatccatggaatcagatatggccctagtcaaggacatggaactacccacagaaaaagaagtggccctggttaaggatgtcagatggcccacagaaacagatgtatcttcagccaagaatgtggtactgcccacagaaacagaggtagccccagccaaggatgtgacactgttgaaagaaacagagagggcatctcctataaaaatggacttagccccttccaaggacatgggaccacccaaagaaaacaagaaagaaacagagagggcatctcctataaaaatggacttggctccttccaaggacatgggaccacccaaagaaaacaagatagtcccagccaaggatttggtattactctcagaaatagaggtggcacaggctaatgacattatatcatccacagaaatatcctctgctgagaaggtggctttgtcctcagaaacagaggtagccctggccagggacatgacactgcccccggaaaccaacgtgatcttgaccaaggataaagcactacctttagaagcagaggtggccccagtcaaggacatggctcaactcccagaaacagaaatagccccggccaaggatgtggctccgtccacagtaaaagaagtgggcttgttgaaggacatgtctccactatcagaaacagaaatggctctgggcaaggatgtgactccacctccagaaacagaagtagttctcatcaagaacgtatgtctgcctccagaaatggaggtggccctgactgaggatcaggtcccagccctcaaaacagaagctcccaccaccattggtgggttgaataaaaaacccatgagccttgcttcaggcttagtgccagctgccccacccaaacgccctgccgtcgcctctgccaggccttccatcttaccttcaaaagacgtgaagccaaagcccattgcagatgcaaaggctcctgagaagcgggcctcaccatccaagccagcttctgccccagcctccagatctgggtccaagagcactcagactgttgcaaaaaccacaacagctgctgctgttgcctcaactggcccaagcagtaggagcccctccacgctcctgcccaagaagcccactgccattaagactgagggaaaacctgcagaagtcaagaagatgactgcaaagtctgtaccagctgacttgagtcgcccaaagagcacctccaccagttccatgaagaaaaccaccactctcagtgggacagcccccgctgcaggggtggttcccagccgagtcaaggccacacccatgccctcccggccctccacaactcctttcatagacaagaagcccacctcggccaaacccagctccaccaccccccggctcagccgcctggccaccaatacttctgctcctgatctgaagaatgtccgctccaaggttggctccacggaaaacatcaagcatcagcctggaggaggccgggccaaagtagagaaaaaaacagaggcagctgctacaacccgaaagcctgaatctaatgcagtcactaaaacagccggcccaattgcaagtgcacagaaacaacctgcggggaaagtccagatagtctccaaaaaagtgagctacagccatattcagtccaagtgtggttccaaggacaatattaagcatgtccctggaggtggtaatgttcagattcagaacaagaaagtggacatctctaaggtctcctccaagtgtgggtctaaggctaacatcaagcacaagcctggtggaggagatgtcaagattgaaagtcagaagttgaacttcaaggagaaggcccaggccaaggtgggatccctcgataatgtgggccacctacctgcaggaggtgctgtgaagactgagggcggtggcagcgaggctcctctgtgtccgggtccccctgctggggaggagccggccatctctgaggcagcgcctgaagctggcgcccccacttcagccagtggcctcaatggccaccccaccctgtcagggggtggtgaccaaagggaggcccagaccttggacagccagatccaggagacaagcatctaatgatgacattctggtctcgtcttccgtctcccccgtgttcccctcttgtctcccctgttcccctctcccttccctcctcccatgtcactgcagattgagacctacaggctgacgttccgggcaaatgccagggcccgcaccgaccacggggccgacattgtctcccgccccccacacttccctggcggccccaactcgggctcccgggtccttggccccctttcccgggctgtccactagaccagtgagcgcttgggcgccgtgctgggcagcccgctaggctcgccttccctcctgctttgcgtgcccggggcagcagcagccctgccccacacctcctctcactccccagcctgggcccatctccctgctttggtcttgccccatcactgcgccactgctccgtggaggaggttgggagggggttggggtggttgaggctaagttgggatctaggagaggagaaccagattctatcctcatctttttttggttctttggtccaaacccaaaagaaactgacatgccctcccttctccctggatctacctggagggaagagtggaggtggattccgagtggtgacaggacgctgaccgtggagcttaagccactgcctctccctctggtcccacaaatgggcgcccccccctccccatgcaggtggtgtcgggcccttcttgctgccctgccccaagttgggggtcagtgctgcctgtccccatgcttttcttttctaaccaagaggctggttttggcatctctgtcccattccctgggatctggtggtcagccctaggataaaaagccagggctggagaacaagaaagggccaggagatggaattccttcaggccggcacccacaccctaggacatgtaagccctcatgtccaagggagcctcatgcagatagtaggaaatcaggtctggaaatttaaaaataaaaggcatgagactaaggctatctgcttcccttatgccctgactggagaggggagggaggagaggcaaggcccacagagggcatcccagctaggccttgggatggctgcagtgaggagaaatcccgggaactgtattgacacaaagattcttattgcacttgtattttttgtattaaagtttgcatggtttctaataaaggattcaaacat

SEQ ID NO: 4569 - DNA, 892 bp, Homo sapiens
gtaggcggtgcttgaacttagggctgcttgtggctgggcactcgcgcagaggccggcccgacgagccatggttgctgggagcgacgcggggcgggccctgggggtcctcagcgtggtctgcctgctgcactgctttggtttcatcagctgtttttcccaacaaatatatggtgttgtgtatgggaatgtaactttccatgtaccaagcaatgtgcctttaaaagaggtcctatggaaaaaacaaaaggataaagttgcagaactggaaaattctgaattcagagctttctcatcttttaaaaatagggtttatttagacactgtgtcaggtagcctcactatctacaacttaacatcatcagatgaagatgagtatgaaatggaatcgccaaatattactgataccatgaagttctttctttatgtgcttgagtctcttccatctcccacactaacttgtgcattgactaatggaagcattgaagtccaatgcatgataccagagcattacaacagccatcgaggacttataatgtactcatgggattgtcctatggagcaatgtaaacgtaactcaaccagtatatattttaagatggaaaatgatcttccacaaaaaatacagtgtactcttagcaatccattatttaatacaacatcatcaatcattttgacaacctgtatcccaagcagcggtcattcaagacacagatatgcacttatacccataccattagcagtaattacaacatgtattgtgctgtatatgaatggtatgtatgctttttaaaacaaaatagtttgaaaacttgcattgttttccaaaggtcagaaaatagtttaaggatgaaaataaagtttgaaattttagacatttgaaaagaaacaaaaa

SEQ ID NO: 4570 - DNA, 892 bp, Homo sapiens; identical to SEQ ID NO: 4569

SEQ ID NO: 4571 - DNA, 792 bp, Homo sapiens
gtttcatcagctgtttttcccaacaaatatatggtgttgtgtatgggaatgtaactttccatgtaccaagcaatgtgcctttaaaagaggtcctatggaaaaaacaaaaggataaagttgcagaactggaaaattctgaattcagagctttctcatcttttaaaaatagggtttatttagacactgtgtcaggtagcctcactatctacaacttaacatcatcagatgaagatgagtatgaaatggaatcgccaaatattactgataccatgaagttctttctttatgtgcttgagtctcttccatctcccacactaacttgtgcattgactaatggaagcattgaagtccaatgcatgataccagagcattacaacagccatcgaggacttataatgtactcatgggattgtcctatggagcaatgtaaacgtaactcaaccagtatatattttaagatggaaaatgatcttccacaaaaaatacagtgtactcttagcaatccattatttaatacaacatcatcaatcattttgacaacctgtatcccaagcagcggtcattcaagacacagatatgcacttatacccataccattagcagtaattacaacatgtattgtgctgtatatgaatgttctttaattgagaagacaatttcttcatttttaggtattctgaaatgtgacagaaaaccagacagaaccaactccaattgattggtaacagaagatgaagacaacagcataactaaattattttaaaaactaaaaagccatctgatttctcattt

SEQ ID NO: 4572 - DNA, 3695 bp, Homo sapiens
taggaagtgaggaggaggcgcgggctggagctgcggcggggtctggggcgcagagcagcggcgggaggaggcggacacgtggcaacagcggtagcagcccgggcggcggcagcaacagcggcggcggcatcggcccgagccgccggccgccctcccaccctcccgccccgcggcagccctagctccctccacttggctcccctggtcccgctcgctcggccgggagctgctctgtgcttttctctctgattctccagcgacaggacccggcgccgggcactgagcaccgccaccatggggaagggggttggacgtgataagtatgagcctgcagctgtttcagaacaaggtgataaaaagggcaaaaagggcaaaaaagacagggacatggatgaactgaagaaagaagtttctatggatgatcataaacttagccttgatgaacttcatcgtaaatatggaacagacttgagccggggattaacatctgctcgtgcagctgagatcctggcgcgagatggtcccaacgccctcactccccctcccactactcctgaatggatcaagttttgtcggcagctctttggggggttctcaatgttactgtggattggagcgattctttgtttcttggcttatagcatccaagctgctacagaagaggaacctcaaaacgataatctgtacctgggtgtggtgctatcagccgttgtaatcataactggttgcttctcctactatcaagaagctaaaagttcaaagatcatggaatccttcaaaaacatggtccctcagcaagcccttgtgattcgaaatggtgagaaaatgagcataaatgcggaggaagttgtggttggggatctggtggaagtaaaaggaggagaccgaattcctgctgacctcagaatcatatctgcaaatggctgcaaggtggataactcctcgctcactggtgaatcagaaccccagactaggtctccagatttcacaaatgaaaaccccctggagacgaggaacattgccttcttttcaaccaattgtgttgaaggcaccgcacgtggtattgttgtctacactggggatcgcactgtgatgggaagaattgccacacttgcttctgggctggaaggaggccagacccccattgctgcagaaattgaacattttatccacatcatcacgggtgtggctgtgttcctgggtgtgtctttcttcatcctttctctcatccttgagtacacctggcttgaggctgtcatcttcctcatcggtatcatcgtagccaatgtgccggaaggtttgctggccactgtcacggtctgtctgacacttactgccaaacgcatggcaaggaaaaactgcttagtgaagaacttagaagctgtggagaccttggggtccacgtccaccatctgctctgataaaactggaactctgactcagaaccggatgacagtggcccacatgtggtttgacaatcaaatccatgaagctgatacgacagagaatcagagtggtgtctcttttgacaagacttcagctacctggcttgctctgtccagaattgcaggtctttgtaacagggcagtgtttcaggctaaccaggaaaacctacctattcttaagcgggcagttgcaggagatgcctctgagtcagcactcttaaagtgcatagagctgtgctgtggttccgtgaaggagatgagagaaagatacgccaaaatcgtcgagatacccttcaactccaccaacaagtaccagttgtctattcataagaaccccaacacatcggagccccaacacctgttggtgatgaagggcgccccagaaaggatcctagaccgttgcagctctatcctcctccacggcaaggagcagcccctggatgaggagctgaaagacgcctttcagaacgcctatttggagctggggggcctcggagaacgagtcctaggtttctgccacctctttctgccagatgaacagtttcctgaagggttccagtttgacactgacgatgtgaatttccctatcgataatctgtgctttgttgggctcatctccatgattgaccctccacgggcggccgttcctgatgccgtgggcaaatgtcgaagtgctggaattaagggtcatcatggtcacaggagaccatccaatcacagctaaagctattgccaaaggtgtgggcatcatctcagaaggcaatgagaccgtggaagacattgctgcccgcctcaacatcccagtcagccaggtgaaccccagggatgccaaggcctgcgtagtacacggcagtgatctaaaggacatgacctccgagcagctggatgacattttgaagtaccacactgagatagtgtttgccaggacctcccctcagcagaagctcatcattgtggaaggctgccaaagacagggtgctatcgtggctgtgactggtgacggtgtgaatgactctccagctttgaagaaagcagacattggggttgctatggggattgctggctcagatgtgtccaagcaagctgctgacatgattcttctggatgacaactttgcctcaattgtgactggagtagaggaaggtcgtctgatctttgataacttgaagaaatccattgcttataccttaaccagtaacattcccgagatcaccccgttcctgatatttattattgcaaacattccactaccactggggactgtcaccatcctctgcattgacttgggcactgacatggttcctgccatctccctggcttatgagcaggctgagagtgacatcatgaagagacagcccagaaatcccaaaacagacaaacttgtgaatgagcggctgatcagcatggcctatgggcagattggaatgatccaggccctgggaggcttctttacttactttgtgattctggctgagaacggcttcctcccaattcacctgttgggcctccgagtggactgggatgaccgctggatcaacgatgtggaagacagctacgggcagcagtggacctatgagcagaggaaaatcgtggagttcacctgccacacagccttcttcgtcagtatcgtggtggtgcagtgggccgacttggtcatctgtaagaccaggaggaattcggtcttccagcaggggatgaagaacaagatcttgatatttggcctctttgaagagacagccctggctgctttcctttcctactgccctggaatgggtgttgctcttaggatgtatcccctcaaacctacctggtggttctgtgccttcccctactctcttctcatcttcgtatatgacgaagtcagaaaactcatcatcaggcgacgccctggcggctgggtggagaaggaaacctactattagccccccgtcctgcacgccgtggagcatcaggccacacactctgcatccgacacccaccccctctttgtgtacttcagtcttggagtttggaactctaccctggtaggaaagcaccgcagcatgtggggaagcaagacgtcctggaatgaagcatgtagctctatggggggaggggggagggctgcctgaaaaccatccatctgtggaaatgacagcggggaaggtttttatgtgcctttttgtttttgtaaaaaaggaacacccggaaagactgaaagaatacattttatatctggatttttacaaataaagatggctattataatgg

SEQ ID NO: 4573 - DNA, 3911 bp, Homo sapiens
agtttcccgaaaaccagttcctccattagaagaggccctcaaacaaattcaggaatccaacttaaaatcagaagtaaaccttcccttttcccgtagaccaacaataaactggagagctatagattctgccttgccttccgcattatcaaaaaatgatcacaagcatcagaaacaactcttatccaaaatcaattgtgagaaagaaatgaatgaaaacatgagggcaaccttggctactagcaaaaatgtgttccagcttaaactggaggaaactcagaaactcctcgaagatcaacatctaagcaatttgcaaaaatttggtgatgaagttaatcagataaccaattctgaaaccctctcaagtatagacagtcttgaggctacagagcatgaagaaatatatttaacacttaataaggagcattccacatccatccagcggaataccatttccctcaaaccagcaaatatgcaatcaactaatctcagctgctttgatgaagataaactggcattctctaaaactcaacatataaataattggcttacaaatttagatgcttcaaatactcagaatgtcacagctttctcagatattttaagtaaatctaatgttctgccttcatgggaatattttaatagtaaagaacaaaatccatctcctttgaatggaacagtggaaagagccacaaatactgctaataattcagtaccctttgtatctagcccacccatgtttgtactagataaaaaatgtgaaaagacctctgaaactagcactatgaggacaactgactccacttctggagcattcaaaagagagagaccattagttactgagagcccaacatttaaatttagcaaatcccaaagcacttcagattctctaacccaggaagtggctacatttccagaccaagagaaatattctgaattaaatcaagaaaatggaactacttcaattcctacttcatgtgtaccagtggcaacgcctttagttttgccatctaatatacagtcagctagaccttcagcaaagaacagtatacacataaaagaaattgatgcagtgcagtgttctgataagttagatgaattgaaagatggtaaagaagaagagataaaatattttaattgcaataaggaagagttgcctttattttcagacagttttcaagatgcctatatacctcacaatcctgattcaaaagatgaaaaacaaaaattagctgaaacatcatccttgtctaatgtaacttctaattatgactttgttggccagcataagaaaatgaaatacaacatccatgagagaaatggtgtgagatttcttaaaagtattttaaagaaagaatctaaatatgaacatggttatcttaaggcattaattataaatcagagctttaagtttggaaatcaaaaagcagcagctatcagagatagtattgaattaacaaaggaaaaaggtgcagaaattccaaagaccattaaaaaactgaggtggtttgatgaaactagcaatatagaaaacaatgctgaaaacagtcattcactgaagaataaaacaggaacaactcaacagcattctcaacaattccacattcaaagtggtgctggaagcaacataattagtgtttctacttgtgctgtaaattctgctgatacaaagaagtccagggaggattctatctctgaaaatgttacgactttaggaggatctggagcagaccatatgcctttgaactgttttataccttcaggttataactttgctaaacatgcctggccagcctcaaaaaaagaagaaagtaaaatccctgtacatgatgattctaaaactaagcaaggtaagccacaaagaggtagagcaaaaataattagaaaaccaggatctgcaaaagtccaatcaggctttatatgtacaaacagaaaaggcgctgtcattcaaccacagtctgcaagcaaagtcaacatatttacacaagctcagggaaaattaattataccttgtcctcctcctcaatctacatcaaatattagaagtggtaaaaatatacaagtgtctcagtgtcaaccagtaactcctgaaaatcctcaaaacattattacacataactcttttaattcaaaacatgtgcttccaacagaacacagtttgaatcagtggaatcaggaaagtagttctccactctcaaatgcttgttctgacctagtcactgtgataccatcactgccatcatattgttcttcagagtgccaaactttcgcaaaaataaatcattcaaatggcactcaagcagttgcccggcaagatgcgacattatattgcacccaaagaagtcctgtttgtgaagaaagttatccgtctgtgactctaagaactgctgaagaagaatcagttcccttatggaaaagaggtcctaatgtcctgcatcaaaataagagggctacagggtctactgttatgagaagaaaacgaattgctgaaactaagcggagaaatattttagagcagaaaagacaaaaccctggatctgtaggacagaagtacagtgagcaaattaataattttggacaaagtgtcctgctaagttcaagtgagccaaaacaaactacaaggggtacttcttatattgaagaagtttcagatagtacttctgagtttttgatggctgaaaacttagtgaaagcatcagtgccggaggatgagattctgactgtcttgaatagcaaacagatacagaaatcaaatctacctttaaataaaactcaacaattcaacatctgcacactgtcagctgaagaacagaagatcctagagtcccttaatgatctcagtgaaagactacattatatacaagaatccatttgcaaaaacccatccatcaaaaatactttacaaataataccacttctggagaagagagaagatagaaccagcagctgcagagacaagagataattccagcagaatccgtctaagaagacctttcatgtacttccctaggactagatgcataccgttttgtgaaaaccagccataggaaaacatgtgagcaacaacccccatgaacatttgtcctaactcagattttgtgagcagtgaagtttaacagagcagtgacatttaacaaagcagtgaagtttaacagagttctgagaataccatgaaagacattatgcctgcctaaacaaaaagcaggacataacctagctctgaatacatgccacaaggatgaagcttgtgagtagagcaaacaaacgtttttccaaagaattcacagtgctcctttgcaatttatagatttcatgttgaaatatatgttaaataaaatttctgtttattgaacctctttattaaacctctaacttactgataagatgtttatgaagtatggcatattttgatttttttaattgtaataaatattcttaaagttaccacatcccacaaaatggcccttggtggcagcaatagagcaaaggttacctttttgtatggtgaagggaggccttcctatggctgtacaattacatcgattcttccaaatttcatatttcatacatggcactttggcataccgaaaaaacatgaaatttttcattaaaatgccatgaatcaagccagggccgttggcttatgcctgtaatcccagcactttgcaggccgaggtagacagatggcttgagctcaggagttcgtgaccagcctgggcaaccctgtctctacaaaaaatacaaaaattaaccaggcatggtggcatgcacctgtagtcccagctacttggggtgctgaggcgggaggattacttgagcccaggaggattacttcaacctgggaggttgaggctgcagtgagctgtgtttcgccactgcacaccagcctgggtgacagtgtgagacccagcctc

SEQ ID NO: 4574 - DNA, 4143 bp, Homo sapiens
gatggcggcgcgtccgtcgcgagcgaccgggccgaggggaggccagcgaagccgagtaaaaccgccgcccgggagaagactgaaggagcagttgccgccgttggcggcggcccgagcagttttcgctgctgctacggctgttgccatgaggcgaggctagggaggacctcacttccccggggtgtaataatgttaactgaggccagtctatccatatggggatggggaagccttggcattgtcctttttctgataacctttggaccctttgtaatattttatttgacattttatatcctctgctttgtgggtgggggtttagtggttactctcctgtttggaaaaacaaactcagagaagtacctagaacagtgtgaacactcatttcttcctccaacatcacctggggttcctaagtgcttagaagaaatgaaacgggaagccaggactattaagattgatagaagattgacgggtgccaatataattgatgaacctctccagcaagttatccagttttccttgagggattatgtccagtattggtattatacactaagcgatgatgaatcttttcttcttgaaattaggcagactcttcaaaacgcactcattcagtttgctactagagtctcgccctgtcgcccaggctggagtacaatggcgcaatctcggctcactgcaacctccgcttcctggaaccctgttttgtttaacaaaaccttggtctcactgtgtctcctagaatatgtaatttaaattctggctctgaaattacagggaattgtggtagtgatttgagaaccctttcagttctaaaatagtaagattctctggtcaggttgttactaatcttgatttcttttcaatcatgtttcctcccaaaacacacactaacatactccatcacactccacattttgaataccatttggggagttatttttttttaagtatataggattgctaattagagttaatttactttgggattaaagtactcttcatatctattgttttattagtaggggtcttatagtaggataacaaaatttatttaaaccttttaatatatttctaaatgatcagaaagaatgcttgattctaaacataaaatacatttactaatctcttctcgatgattaaaacccttgtatcaatgaaataaaaagtttttgtacaaccagactattgctgttctttatagaatgctgaaaacaataaatctgtagtgttatgagtttgattttttttaagttttctgaagtgtaagttctcccaccacgttcagttttaagctatcagcatgaagtcactgaacatggaaataggaagagatgtacacaattgtttgcctactccagctcacagttggagaggatacagctaagtgaagagggggcagaggcagatttgtaaacctgaagtaatgagttgtatttccttgtgtggttgctaatttagctcctatgaaagaattccccgtatatttttgaggactatggtagggggtactcatacattaactttaagttcaggaatgtttgtgaagaaggtcaaattagtttcattattttaatcaatactgacaactaaatccttaaagtggatgataaaaggagactctggagagatggttatggtaacatgtagtatttatgactgaattgacgtaggggggattgatttagtggattcaaaatgaagcttacaattctgtgcctttacaattttacccaaattcaatttcagcctgagtttttgacaccgttaacaaagtagttcttcaaggactctgaaggatggaaacaagtaaaggattatgtatttagagtgaagagtagtatatcctttctaatagtgaattaagagggggacttagtatctgattcagagactcaggagaaggaatttttttctttcacagataagccactcagttgctttctctcaacaaaaaaaagtctgagtcagttgatcaaaaggccttctaatggagtaaaacttttctcaaaatctactcaaagttacttgtcaaaaatctacccaagaaaactaggaattctattttaatgatttttcaaaaatttctattttttttacatagaagataaagaccttttgttgaagattaatacatattattataattttatgtgattggttattatattgatcttattaacatacctttaaaaaggccaactcttaacgtgcgtgtgtgtgtgtgtgtttgtgtatgtgtatatgtatataccttttcccttgagattcctttcagttctaaaatactaagattctatggacctctgtgtgtgtgtgtgtgtgtgtgtgttgtacatatagtgtctatgtatacctacacattatgcagtatatagtatactctaccattcttactgtttttaaaaaaggtcttcgtagtcatttctctgaaaaactaatgtggcatcaggagcataacatttattataggattgttttctgtggaaaaagcagcttttacttttatcattttgacataaggcaccttttccaggaaaatattctgccatgaatgtgaagatcgcctttactgccaagcgatcaccctctcctctagtcaggcaagtctacaagatgacccttgcatatatatttatcatgctcatccccctcttctgctcattcctgtgtcctttcttctcccatataaatactgctctttcatcaagatttaagtgtagcctctttaatgaagcctctttaaattatgacatattccttaatctatagtctttgtgtgtgtggttctcgtcaacaaaattttaagctgattttgaaatggttcctattctgtgctattgcagtgaaagttctcttaactgatgtttggttagccagtgctctccattccctttgtatgctgtactgactgataaccttagcattaagactaggctctattacatctatccacttctgtttccacccttggagttgtatgcttatcaaaagtcagttgtgtgatacctggaccccacctccagaaaatctgatacaattagtctgtagtgtgacctgaatattggtgatttagaggagacagataatcaaacacgttgaaataaaagttgtatttgtttttgagcctaaatatcccagttacactttttatgataatcaggtcgtttaattaacagtcaacttagattgaagaaatatgaatatgacaaggtagtttctatgaaaaccaagtcacttgctttggaattactcgcagctggttgaagagtgtaattgaattaagtgagcgaaaggcagctatgaaatttgaaagtcttcaaggactctgcatgcagatttgttcacaaatgtctttattgccatgccattttaaagaaactggaaaccataggttttgcagtgtaggaacagttcatagttttttcaagacccaggtcatgttaataccactcagcagagccttaaccaaagaaaaagtcttattcctacacaggaagatttatataattgaacttaaagtgaaatatattcatggctccctcttttgatcgaatgtttaaatttacctactgcccaattaccagttttttatacactccatccctgtgtatgtatatgtgtggttttatgtagctaatataatcatagactcaaagatgtaatgagtgttgttagagaaaacaaactttgggaaatgatgtgacttgctgaatttcatagactggcactgatgcctttgatttgagtaaaagacccatcatttgggggagtcttttgttagaatcaaaggcatctgtgtcagtccagtgcgttttccagaaatacttgattttggtagtgttttgtgctactgatgatgagctgtacactgcttagaatagatggaacaagtgaggcaatttacaatcctaaactcaaccacatatttgggcctttacttgcctttttaagggattggcattaagtagccatgggacaaaaagagcttctcagtacatattctactttaacactttaaggagtaaggaagcaattgttgtttgtgcctcctgttgccattgtccaaacacccattgtaaacagtgctccgaccctgaaaaaggaatcaataaatcaatatgcattgagtgcctctaa

SEQ ID NO: 4575 - DNA, 6816 bp, Homo sapiens
tcgcgagcgaccgggccgaggggaggccagcgaagccgagtaaaaccgccgcccgggagaagactgaaggagcagttgccgccgttggcggcggcccgagcagttttcgctgctgctacggctgttgccatgaggcgaggctagggaggacctcacttccccggggtgtaataatgttaactgaggccagtctatccatatggggatggggaagccttggcattgtcctttttctgataacctttggaccctttgtaatattttatttgacattttatatcctctgctttgtgggtgggggtttagtggttactctcctgtttggaaaaacaaactcagagaagtacctagaacagtgtgaacactcatttcttcctccaacatcacctggggttcctaagtgcttagaagaaatgaaacgggaagccaggactattaagattgatagaagattgacgggtgccaatataattgatgaacctctccagcaagttatccagttttccttgagggattatgtccagtattggtattatacactaagcgatgatgaatcttttcttcttgaaattaggcagactcttcaaaacgcactcattcagtttgctactaggtcaaaagaaatagactggcaaccttattttactacacgcattgtagatgactttggcacacacttacgagtattcagaaaggctcaacagaaaataacagagaaagatgatcaagtgaaaggtacagcagaagatcttgtagataccttctttgaagttgaagttgaaatggagaaggaggtttgccgtgatctagtgtgcacttcccccaaagatgaagaaggattcctaagggatttgtgtgaggtcttactatatttattgctacctcctggagatttccagaacaagatcatgcgatactttgtcagggaaatccttgcacgaggaattcttcttccattaataaatcaactcagtgatcctgattatattaatcagtatgtcatatggatgatccgtgattctaactgcaactatgaggcctttatgaacattattaaattgagtgacaatattggagagctagaagcagtcagagataaggcagcagaagaattacagtatcttagatctctagatacagctggtgatgatatcaacactatcaaaaatcaaataaatagcttactattcgtaaagaaggtatgtgactcaagaatacagcgattgcagtcaggcaaagtaaataaatactgtgaaacttgcagcaaactttgggaaactttgcacagtccccctggacagcattcttgtagacaatgttgcactacaattttttatggattacatgcagcaaactggaggtcaagcacatctattcttttggatgacagtggaaggataccgggttaccgcccaacagcagctagaagttttattaagtcgtcagagagatggaaaacatcaaaccaaccaaaccaaaggtcttttaagagcagctgctgttggaatttatgaacagtatttatcagaaaaggcatctccaagagttactgttgatgactatttagtagcaaaattagcagatactttgaatcatgaagatccaacccctgaaatctttgatgacattcaaagaaaggtatatgaattgatgctacgagatgaaagattttatccttccttcagacagaatgcactttatgtgcgcatgttagctgagcttgacatgttaaaagatcctagtttcagaggatccgatgatggggatggagaatcttttaatgggtctcctacaggaagcataaatttgtctttagatgacctttcaaatgtttcttctgatgactcagtacaacttcatgcctacatttcagacacagtatatgctgactatgacccatatgctgtggcaggcgtttgtaatgatcatggcaagacatatgcattatatgccatcactgtacaccggcgcaacctaaacagtgaggagatgtggaaaacctatcgtcgttatagtgacttccatgacttccacatgagaatcactgaacagtttgaaagtctctcaagcatattgaaacttcctggaaaaaagacttttaataatatggatagagattttttagaaaagagaaaaaaggatctaaatgcatatttgcagttactgttagctcctgaaatgatgaaggcatcccccgctttagctcactatgtgtatgatttccttgagaacaaagcctacagtaaaggaaaaggggattttgctcgcaagatggacacttttgtaaatccacttcgcaattcaatgaggaatgtttcaaatgcagttaaatcccttcctgatagcttggcagagggaatgactaaaatgtcagacaacatgggcaaaatgtcagaaagattaggtcaagacataaagcaatcattttttaagtgcctcctttaattcctaagactgattcagaccctgaacatcgccgagtttcggctcaacttgacgataatgtggatgacaatattccacttagggtaatgctgcttctcatggatgaagtattcgacttaaaagaaagaaatcagtggttgcgaaggaatatcaaaaacctacttcaacagcttattagagctacatatggcgatactattaatagaaaaatagttgaccatgttgactggatgacttcacctgaacaagtagccgactcagtgaaacgtttcagagatgcattttggccaaatggcattttagcagaggctgttccatgcagagataaaagtattcgaatgagaacaagagtagcaggaaaaacgaaattacttgcaattatgccaggtgagtgagcatgtatagttaaaaatctttataatttgtcattcttctgagtttttagcattcatcatgccagtgtaactgccttttgattataacaactaccttttgatggcttaatacatatcaggcactgtactaggcatttctcatatgttcttaatcagtcctcatgacagtactgtaaagctaaggactgttaacatcaccgctttatatgtgaggaaacggaagctcagagaggttaaataacctatccaaggtttatagctactaagcaacagttggtattctgacttggctttaagtgatgtgaaagcttatgcttttagccacttcgctctgctgccttgaaacatattgggagttaagttaaataaataaaatacatgacaggtgaaagggctaataaaatataaagtatgaatttttcaggaagaatatttgttgtacttaggaaaacaagttatttcaaaaactccatttacatagaaagaactgattggctgattattaatctttattacttaaaatacaatcccaaacaaagtatacttagtagcattttgttggtctgattttggttgcttcattagggtatagctatctcactaccttagatttactttttctcgtttttcttctttcaatcagagaagttatataatgtaaaaagcaatttaatgcggctgggaggtggtgatggttgttttgccccttgttaatgagtatctttgaaaatgcctgcatgtcttttctctgtattttaattctggatgtagagaatgaacagacatatttgtacattctttaatatcacacaataccaatttttttctctaattttgttttcttacctgtattttctctataaattttaatgaccagccttctcttctgtcaattaaattaaaaatttgccacaattttaattcttacctatataccgtttcatttgctgataaaaaagcaaattatagaaatgacattttagaaaaataagaaacaattgcttaggatattatttaatatactattatagtaaacctgattgtgctatatggactgactcagttatctagctggaagaaatctttattcactaaatatttattgaaagttattatgtgccaggtgctgttctttgcacttatgtttgccttcttggagcttactttccagtagaaatagagagactcaaaaacacacagaacaaataaatggaacgtagtttgttagataagtggtaagtactaaagagaaagatactgcaggaaaatggaatagatagtgtcagatgagttgcagttttagatggggtggccaggcaggcctcactgagatgatgatggtggtgtgaagatctgaaggaagtgagggtaaatatgaaagcatataaatttatatatacataatccttgcctattttttagtaaattctcaaaatttttgctttaaattatatcttacccctagttagataaagactttttggaaattgcatgtttctttccaaagcagcaaaataatatctatattatcagtattatgaataattatttgtaattatgaataagaatatgaataattaataatcatacatgttggtctcataacttggtgttatttatgattaaacaccaaatttgctcactcttagtcacagcaccatcggttttctattttctttgctttcttcactttgaatttaaataaaattcaacccaacttgtactatccctatttcttgagcatgctttgttattctagttactgcttatttgctcattcatgttcttttcaccaaggctaatccttcatctcattgcacctatcaaaatcctgcccaagtagaaagtctcctttacctgccacttccttaaagggaacttttctttgttatcgcatctgaaagtctccccactaccaatattcttatacttttagcatttttatggtatagttactatgccaggggtttttgtagatcagggattaatttttttttttcctgtgttccaatgaaactttattcaccatcatggattagtttgtttccttacagcatttgtcactattcattaggcctactaagaatatttgtataatattacaaagtttacagatcactttttacattatttcattaaagacttataaatccttataaggatgttattataaatcctccttttcagatgagaaaagagagtcagggtggtgggtaagtatcacatgggtattaagggacatgtttgtaatcatagtttgggatctttgagactgttttttattttttatctcttacacctgtgctatattgtctcccagtagcttttgcattaagtgcgtaaatagatgcatgcatgcaaagatgcatattaagtttcagctatagtacatagctgaaatgcattaactggttacctactgttcatcagttactctgctgtgtaccttaatttaagaacatttaagagtttaggccttgtgtttcctttgaataattatgtgtgttttcctccacttcatttagatgagctgaagcacattattggggctgagacaacacggaaaggtattcttcgtgtttttgaaatgtttcagcacaaccaattaaataggagaatggtttatgtcttcttggaaggctttttagaaaccttatttccacagtataaattccgtgaacttttcaacaaactgcattcacggtcaaagcagatgcagaaatataaacagaaacttcaaactactcaagcgccttctttgcagaaaaggtgacactccactctatgaagctggtgttcattttgtccaggactaatggtatggacagatcttctggggcttaactcaaatactgttgtgtctgcaccagtcttttagtgtctcaaaatagattattaatacatccataagtctgtggttcttctcattctcatctataatccaccactaccaagagagatttctgtgtcttaaatgatttggtgcatattttgcaacattgagagaaaactgcccccatctcaagcaagaatggcgttggtttcttccatttcaaactaatcagcattctccagcaatgacaaagtgccagagtgtatatatgaaagctaaggaaagcacaaaacaatggttcagagataaattggctaatttgtttaacagttggagactgtgcaatgtacgacttggaggagtttgtttggcataatgattttgtaggtctgtcagcattttgatatattgtggattagccaggtgaatgatccttgaaacatctctttcaggtctggagaaagagacagaatgcccttaaagtgtgaaataaccttatacctgaattacagttttgtgatataaaataaagctgagtataaaataaaaccaatcaaacacagaatttgattggatttgttattcattggtatacaacaatttttattcttatgtgtgctttaagggctgtgttttgctcttagggtactcaattttatgtttccttttggcattctttgtgcaaaaagaagcatgtggtggctctcatttaaatttcaaaattattagttttatctttaacagattactgattatacagaagatataatttattggaagaactgccaaatacattttgtccttctaaaaatatggaaatttaaatagtagtctggaaagttaccatatgataatttttaattgtgtgatctagacatgccttaggtaactgcagaaatagcaaattaaatgattaatgagcttattagtcatagtaaacatacagattcctaattctatgacagtgtacatatatgaaaataaatgatgaaaaaagaactataatatttttaaaaatatgcttttatttatatttcacataatgtaaagttctacaaaataaagctagtaggcaagacccctcagtgtatacctttaaacccataaattaattttatatcaataaaataaaatactttctct

SEQ ID NO: 4576 - DNA, 2955 bp, Homo sapiens
gaaagatgatcaagtgaaaggtacagcagaagatcttgtagataccttctttgaagttgaagttgaaatggagaaggaggtttgccgtgatctagtgtgcacttcccccaaagatgaagaaggattcctaagggatttgtgtgaggtcttactatatttattgctacctcctggagatttccagaacaagatcatgcgatactttgtcagggaaatccttgcacgaggaattcttcttccattaataaatcaactcagtgatcctgattatattaatcagtatgtcatatggatgatccgtgattctaactgcaactatgaggcctttatgaacattattaaattgagtgacaatattggagagctagaagcagtcagagataaggcagcagaagaattacagtatcttagatctctagatacagctggtgatgatatcaacactatcaaaaatcaaataaatagcttactattcgtaaagaaggtatgtgactcaagaatacagcgattgcagtcaggcaaagtaaataaatactgtgaaacttgcagcaaactttgggaaactttgcacagtccccctggacagcattcttgtagacaatgttgcactacaattttttatggattacatgcagcaaactggaggtcaagcacatctattcttttggatgacagtggaaggataccgggttaccgcccaacagcagctagaagttttattaagtcgtcagagagatggaaaacatcaaaccaaccaaaccaaaggtcttttaagagcagctgctgttggaatttatgaacagtatttatcagaaaaggcatctccaagagttactgttgatgactatttagtagcaaaattagcagatactttgaatcatgaagatccaacccctgaaatctttgatgacattcaaagaaaggtatatgaattgatgctacgagatgaaagattttatccttccttcagacagaatgcactttatgtgcgcatgttagctgagcttgacatgttaaaagatcctagtttcagaggatccgatgatggggatggagaatcttttaatgggtctcctacaggaagcataaatttgtctttagatgacctttcaaatgtttcttctgatgactcagtacaacttcatgcctacatttcagacacaggcgtttgtaatgatcatggcaagacatatgcattatatgccatcactgtacaccggcgcaacctaaacagtgaggagatgtggaaaacctatcgtcgttatagtgacttccatgacttccacatgagaatcactgaacagtttgaaagtctctcaagcatattgaaacttcctggaaaaaagacttttaataatatggatagagattttttagaaaagagaaaaaaggatctaaatgcatatttgcagttactgttagctcctgaaatgatgaaggcatcccccgctttagctcactatgtgtatgatttccttgagaacaaagcctacagtaaaggaaaaggggattttgctcgcaagatggacacttttgtaaatccacttcgcaattcaatgaggaatgtttcaaatgcagttaaatcccttcctgatagcttggcagagggaatgactaaaatgtcagacaacatgggcaaaatgtcagaaagattaggtcaagacataaagcaatcattttttaagtgcctcctttaattcctaagactgattcagaccctgaacatcgccgagtttcggctcaacttgacgataatgtggatgacaatattccacttagggtaatgctgcttctcatggatgaagtattcgacttaaaagaaagaaatcagtggttgcgaaggaatatcaaaaacctacttcaacagcttattagagctacatatggcgatactattaatagaaaaatagttgaccatgttgactggatgacttcacctgaacaagtagccgactcagtgaaacgtttcagagatgcattttggccaaatggcattttagcagaggctgttccatgcagagataaaagtattcgaatgagaacaagagtagcaggaaaaacgaaattacttgcaattatgccagatgagctgaagcacattattggggctgagacaacacggaaaggtattcttcgtgtttttgaaatgtttcagcacaaccaattaaataggagaatggtttatgtcttcttggaaggctttttagaaaccttatttccacagtataaattccgtgaacttttcaacaaactgcattcacggtcaaagcagatgcagaaatataaacagaaacttcaaactactcaagcgccttctttgcagaaaaggtgacactccactctatgaagctggtgttcattttgtccaggactaatggtatggacagatcttctggggcttaactcaaatactgttgtgtctgcaccagtcttttagtgtctcaaaatagattattaatacatccataagtctgtggttcttctcattctcatctataatccaccactaccaagagagatttctgtgtcttaaatgatttggtgcatattttgcaacattgagagaaaactgcccccatctcaagcaagaatggcgttggtttcttccatttcaaactaatcagcattctccagcaatgacaaagtgccagagtgtatatatgaaagctaaggaaagcacaaaacaatggttcagagataaattggctaatttgtttaacagttggagactgtgcaatgtacgacttggaggagtttgtttggcataatgattttgtaggtctgtcagcattttgatatattgtggattagccaggtgaatgatccttgaaacatctctttcaggtctggagaaagagacagaatgcccttaaagtgtgaaataaccttatacctgaattacagttttgtgatataaaataaagctgagtataaaataaaaccaatcaaacacag

SEQ ID NO: 4577 - DNA, 1139 bp, Homo sapiens
gagtaaaaccgccgcccgggagaagactgaaggagcagttgccgccgttggcggcggcccgagcagttttcgctgctgctacggctgttgccatgaggcgaggctagggaggacctcacttccccggggtgtaataatgttaactgagttatattgggagctagtttcaagatgaaatactaattctaagccagtctatccatatggggatggggaagccttggcattgtcctttttctgataacctttggaccctttgtaatattttatttgacattttatatcctctgctttgtgggtgggggtttagtggttactctcctgtttggaaaaacaaactcagagaagtacctagaacagtgtgaacactcatttcttcctccaacatcacctggggttcctaagtgcttagaagaaatgaaacgggaagccaggactattaagattgatagaagattgacgggtgccaatataattgatgaacctctccagcaagttatccagttttccttgagggattatgtccagtattggtattatacactaagcgatgatgaatcttttcttcttgaaattaggcagactcttcaaaacgcactcattcagtttgctactaggtcaaaagaaatagactggcaaccttattttactacacgcattgtagatgactttggcacacacttacgagtattcagaaaggctcaacagaaaataacagagaaagatgatcaagtgaaaggtacagcagaagatcttgtagataccttctttgaagttgaagttgaaatggagaaggaggtttgccgtgatctagtgtgcacttcccccaaagatgaagaaggattcctaagggatttgtgtgaggtcttactatatttattgctacctcctggagatttccagaacaagatcatgcgatactttgtcagggaaatccttgcacgaggaattcttcttccattaataaatcaactcagtgatcctgattatattaatcagtatgtcatatggatggtaggtgccttttaaaattacaactctgttttagaaataatttttgaaatgtaaaaatatagttgggagatagggtgtttaagcagtaatttattaaagaaattaagtaaaaatgtttctgaagt

SEQ ID NO: 4578 - DNA, 1978 bp, Homo sapiens
gttgacccgcggcgttcacgggaattgttcgctttagtgccggcgccatggggtcggagctgatcgggcgcctagccccgcgcctgggcctcgccgagcccgacatgctgaggaaagcagaggagtacttgcgcctgtcccgggtgaagtgtgtcggcctctccgcacgcaccacggagaccagcagtgcagtcatgtgcctggaccttgcagcttcctggatgaagtgccccttggacagggcttatttaattaaactttctggtttgaacaaggagacatatcagagctgtcttaaatcttttgagtgtttactgggcctgaattcaaatattggaataagagacctagctgtacagtttagctgtatagaagcagtgaacatggcttcaaagatactaaaaagctatgagtccagtcttccccagacacagcaagtggatcttgacttatccaggccacttttcacttctgctgcactgctttcagcatgcaagtaggtatttcattaaacattcagaaaagttaccaatttacaagtgggtttttcatccccaaggaatacttctaacttagttgatatcaattcagagcatattttcccctagaaataatattaggaatattggccaagtgactatattcccagtttatcccataatgtagctaacaacttggaactagtgttgccagaattccactagcaaatagcagctgtatatatatgctgggaattctgatttcagtctgccttttgtaagagatgatatctgtcattaaaacagtcttcacatgtgatttttctgctcatattttttaaaaagtactggttgggccaggcgtggtggctcccgcctgtaatcccaacactgggaggcagaggcaggaggactgcttgaggcaaggagttcaagactagcctagacagcataataagaccccaatctcttaagaaaaaaaaaaaaaattagctgggtgtcagcacatgcctccagtcctggcttctcagctactcgggaggctgaagctgaaggctcactggagcctaggagttcttggttatagtgagctatggtcacgctactacactgcagcctaggcaacacagcaacactgtctcttttttttttttttttttttttacattttttttatttttatttttatttttttttttttaatttattttttttttgataattcttgggtgtttctcacagagggggatttggcagggtcatgggacaatagtggagggaaggtcagcagataaacaagtgaacaaaggtctctggttttcctaggcagaggaccctgcggccttccgcagtgtttgtgtccctgattacttgagattagggattggtgatgactcttaacgagcatgctgccttcaagcatctgtttaacaaagcacatcttgcaccgcccttaatccatttaaccctgagtggacacagcacatgtttcagagagcacagggttgggggtaaggtcacagatcaacaggatcccaaggcagaagaatttttcttagtgcagaacaaaatgaaaagtctcccatgtctacttctttctacacagacacggcaaccatccgatttctcaatcttttccccacctttcccgcctttctattccacaaagctgccattgtcatcctggcccgttctcaatgagctgtcgggcatacctcccagacggggtggtggccgggcagaggggctcctcacttcccagtaggggcggccgggcagaggcgcccctcacctcccggacggggcggctggccgggcgggggggctgaccccccccacctccttcctggacggggcggctggccgggcggggggctgacccccccacctccctcccggacggggcagctggccgggcagaggggctcctcacttcccagtaggggcggccggggcggctggccgggcggggggctgacccccccacaacactgtctctt

SEQ ID NO: 4579 - DNA, 1532 bp, Homo sapiens
tgaaaacttattgggaaaacagattgatcacttattcattagtaatttaccagagattgtggtggagttattgatgacgttacatgagccagcaaattctagtgccagtcagagcactgacctctgtgacttttcaggggatttggatcctgctcctaatccacctcattttccatcgcatgtgattaaagcaacatttgcctatatcagcaattgtcataaaaccaagttaaaaagcattttagaaattctttccaaaagccctgattcctatcagaaaattcttcttgccatatgtgagcaagcagctgaaacaaataatgtttataagaagcacagaattcttaaaatatatcacctgtttgttagtttattactgaaagatataaaaagtggcttaggaggagcttgggcctttgttcttcgagacgttatttatactttgattcactatatcaaccaaagggaaattaaccattttctctcagtaagtgtttatgatgcacttccattgacaagacttgaaggactaaaggatcttcgaagacaactggaactacataaagatcagatggtggacattatgagagcttctcagggtgctaattttaaatgacatgggctatttctacctgtttctttttgaaagaatattttgcaaagtcttgctcttggtttcattgtcacagacttagttcagactctcatcatttagttcagaccctcatttctcatctaactgtaaaactggtcctaactggtcttctcaccctgaactcttcctgttttattcatcctctgccagatgatttctctaaacccaaatatgatcatgtttttctactgcctaaattttttttttaagagacagagtttttttttttttttaagagtctcactctgtcacctaggctggagtgtagtggcaccatcataacttactatgaccttgaattcctgggtacaaggaattctcctgtctcagccttctgaatagctggaacaacaggcacacaccactacacctagctactttatttattttttttattttttgtagggacaggggtcccactatgttgcctaggttggtctcgaattcttggcctcaagtgatcctcctgccttagcctcacaaagcattgggattagaggtgtgagccacggcatctagccatgcttaaacatttttcatttctttttctttttttttaagacggagtttcgctcttgttgcccaggctggaatgcagtggcactatcttagctcactgcaacctccacctcctgagctcagattctcgtgcctcagccttcctagtagctaggattacaggcacctgccaccatgcctggctaattttttgtattttttttagtagagacggggtttcaccatgttggccagggtggtctcaaactcctgagctcaggcaatccgcccacctcagcctcccaaagtgctgggattacaggcatgagccaccgcggctggcccatgcttaaacatttttaacaccttccaaccatgt

SEQ ID NO: 4580 - DNA, 5912 bp, Homo sapiens
catactttttcctcttagtctacaggttggctgcatagaagaaaaaggtagagttatttataatcttgtaaatcttggactttgagtcatctattttcttttacagtcatcgaatacttttggaaataaggtaatatatgccttttgagctgtcttgacgttcacagatataaaatattaaatatattttaattttgtgcccttgcagattgatcacttattcattagtaatttaccagagattgtggtggagttattgatgacgttacatgagccagcaaattctagtgccagtcagagcactgacctctgtgacttttcaggggatttggatcctgctcctaatccacctcattttccatcgcatgtgattaaagcaacatttgcctatatcagcaattgtcataaaaccaagttaaaaagcattttagaaattctttccaaaagccctgattcctatcagaaaattcttcttgccatatgtgagcaagcagctgaaacaaataatgtttataagaagcacagaattcttaaaatatatcacctgtttgttagtttattactgaaagatataaaaagtggcttaggaggagcttgggcctttgttcttcgagacgttatttatactttgattcactatatcaaccaaaggccttcttgtatcatggatgtgtcattacgtagcttctccctttgttgtgacttattaagtcaggtttgccagacagccgtgacttactgtaaggatgctctagaaaaccatcttcatgttattgttggtacacttataccccttgtgtatgagcaggtggaggttcagaaacaggtattggacttgttgaaatacttagtgatagataacaaggataatgaaaacctctatatcacgattaagcttttagatccttttcctgaccatgttgtttttaaggatttgcgtattactcagcaaaaaatcaaatacagtagaggacccttttcactcttggaggaaattaaccattttctctcagtaagtgtttatgatgcacttccattgacaagacttgaaggactaaaggatcttcgaagacaactggaactacataaagatcagatggtggacattatgagagcttctcaggataatccgcaagatgggattatggtgaaactagttgtcaatttgttgcagttatccaagatggcaataaaccacactggtgaaaaagaagttctagaggctgttggaagctgcttgggagaagtgggtcctatagatttctctaccatagctatacaacatagtaaagatgcatcttataccaaggcccttaagttatttgaagataaagaacttcagtggaccttcataatgctgacctacctgaataacacactggtagaagattgtgtcaaagttcgatcagcagctgttacctgtttgaaaaacattttagccacaaagactggacatagtttctgggagatttataagatgacaacagatccaatgctggcctatctacagccttttagaacatcaagaaaaaagtttttagaagtacccagatttgacaaagaaaacccttttgaaggcctggatgatataaatctgtggattcctctaagtgaaaatcatgacatttggataaagacactgacttgtgcttttttggacagtggaggcacaaaatgtgaaattcttcaattattaaagccaatgtgtgaagtgaaaactgacttttgtcagactgtacttccatacttgattcatgatattttactccaagatacaaatgaatcatggagaaatctgctttctacacatgttcagggatttttcaccagctgtcttcgacacttctcgcaaacgagccgatccacaacccctgcaaacttggattcagagtcagagcactttttccgatgctgtttggataaaaaatcacaaagaacaatgcttgctgttgtggactacatgagaagacaaaagagaccttcttcaggaacaatttttaatgatgctttctggctggatttaaattatctagaagttgccaaggtagctcagtcttgtgctgctcactttacagctttactctatgcagaaatctatgcagataagaaaagtatggatgatcaagagaaaagaagtcttgcatttgaagaaggaagccagaatacaactatttctagcttgagtgaaaaaagtaaagaagaaactggaataagtttacaggatcttctcttagaaatctacagaagtataggggagccagatagtttgtatggctgtggtggagggaagatgttacaacccattactagactacgaacatatgaacacgaagcaatgtggggcaaagccctagtaacatatgacctcgaaacagcaatcccctcatcaacacgccaggcaggaatcattcaggccttgcagaatttgggactctgccatattctttccgtctatttaaaaggattggattatgaaaataaagactggtgtcctgaactagaagaacttcattaccaagcagcatggaggaatatgcagtgggaccattgcacttccgtcagcaaagaagtagaaggaaccagttaccatgaatcattgtacaatgctctacaatctctaagagacagagaattctctacattttatgaaagtctcaaatatgccagagtaaaagaagtggaagagatgtgtaagcgcagccttgagtctgtgtattcgctctatcccacacttagcaggttgcaggccattggagagctggaaagcattggggagcttttctcaagatcagtcacacatagacaactctctgaagtatatattaagtggcagaaacactcccagcttctcaaggacagtgattttagttttcaggagcctatcatggctctacgcacagtcattttggagatcctgatggaaaaggaaatggacaactcacaaagagaatgtattaaggacattctcaccaaacaccttgtagaactctctatactggccagaactttcaagaacactcagctccctgaaagggcaatatttcaaattaaacagtacaattcagttagctgtggagtctctgagtggcagctggaagaagcacaagtattctgggcaaaaaaggagcagagtcttgccctgagtattctcaagcaaatgatcaagaagttggatgccagctgtgcagcgaacaatcccagcctaaaacttacatacacagaatgtctgagggtttgtggcaactggttagcagaaacgtgcttagaaaatcctgcggtcatcatgcagacctatctagaaaaggcagtagaagttgctggaaattatgatggagaaagtagtgatgagctaagaaatggaaaaatgaaggcatttctctcattagcccggttttcagatactcaataccaaagaattgaaaactacatgaaatcatcggaatttgaaaacaagcaagctctcctgaaaagagccaaagaggaagtaggtctccttagggaacataaaattcagacaaacagatacacagtaaaggttcagcgagagctggagttggatgaattagccctgcgtgcactgaaagaggatcgtaaacgcttcttatgtaaagcagttgaaaattatatcaactgcttattaagtggagaagaacatgatatgtgggtattccgactttgttccctctggcttgaaaattctggagtttctgaagtcaatggcatgatgaagagagacggaatgaagattccaacatataaatttttgcctcttatgtaccaattggctgctagaatggggaccaagatgatgggaggcctaggatttcatgaagtcctcaataatctaatctctagaatttcaatggatcacccccatcacactttgtttattatactggccttagcaaatgcaaacagagatgaatttctgactaaaccagaggtagccagaagaagcagaataactaaaaatgtgcctaaacaaagctctcagcttgatgaggatcgaacagaggctgcaaatagaataatatgtactatcagaagtaggagacctcagatggtcagaagtgttgaggcactttgtgatgcttatattatattagcaaacttagatgccactcagtggaagactcagagaaaaggcataaatattccagcagaccagccaattactaaacttaagaatttagaagatgttgttgtccctactatggaaattaaggtggaccacacaggagaatatggaaatctggtgactatacagtcatttaaagcagaatttcgcttagcaggaggtgtaaatttaccaaaaataatagattgtgtaggttccgatggcaaggagaggagacagcttgttaagggccgtgatgacctgagacaagatgctgtcatgcaacaggtcttccagatgtgtaatacattactgcagagaaacacggaaactaggaagaggaaattaactatctgtacttataaggtggttcccctctctcagcgaagtggtgttcttgaatggtgcacaggaactgtccccattggtgaatttcttgttaacaatgaagatggtgctcataaaagatacaggccaaatgatttcagtgcctttcagtgccaaaagaaaatgatggaggtgcaaaaaaagtcttttgaagagaaatatgaagtcttcatggatgtttgccaaaattttcaaccagttttccgttacttctgcatggaaaaattcttggatccagctatttggtttgagaagcgattggcttatacgcgcagtgtagctacttcttctattgttggttacatacttggacttggtgatagacatgtacagaatatcttgataaatgagcagtcagcagaacttgtacatatagatctaggtgttgcttttgaacagggcaaaatccttcctactcctgagacagttccttttagactcaccagagatattgtggatggcatgggcattacgggtgttgaaggtgtcttcagaagatgctgtgagaaaaccatggaagtgatgagaaactctcaggaaactctgttaaccattgtagaggtccttctatatgatccactctttgactggaccatgaatcctttgaaagctttgtatttacagcagaggccggaagatgaaactgagcttcaccctactctgaatgcagatgaccaagaatgcaaacgaaatctcagtgatattgaccagagtttcaacaaagtagctgaacgtgtcttaatgagactacaagagaaactgaaaggagtggaagaaggcactgtgctcagtgttggtggacaagtgaatttgctcatacagcaggccatagaccccaaaaatctcagccgacttttcccaggatggaaagcttgggtgtgatcttcagtatatgaattaccctttcattcagcctttagaaattatattttagcctttatttttaacctgccaacatactttaagtagggattaatatttaagtgaactattgtgggtttttttgaatgttggttttaatacttgatttaatcaccactcaaaaatgttttgatggtcttaaggaacatctctgctttcactctttagaaataatggtcattcgggctgggcgcagcggctcacgcctgtaatcccagcactttgggaggccgaggtgagcggatcacaaggtcaggagttcgagaccagcctggccaagagaccagcctggccagtatggtgaaaccctgtctctactaaaaatacaaaaattagccgagcatggtggcgggcacctgtaatcccagctactcgagaggctgaggcaggagaatctcttgaacctgggaggtgaaggttgctgtgggccaaaatcatgccattgcactccagcctgggtgacaagagcgaaactccatctcaaaaa

SEQ ID NO: 4581 - DNA, 4067 bp, Homo sapiens
gcctagtagagatctggagccagaagcccagagacagccgagtgcgccgtgcggtctccggacgctcgctgctcagcccgatccccgccaactgtgcaggcggctgacccgcagcggcagcggcagcagcgaggactcgagcgctggctgcagcgacaccatggatctctcctttatggccgcgcagctgcccatgatggggggagctttcatggactcgcccaacgaggacttcagcaccgagtactccctgtttaactcctctgccaatgtccacgcggctgccaatggccagggccagccggaagatcctcctcggtcctccaacgacgccgtcttgctatggattgccatcatagctacgctggggaacatcgtggtggtgggcgtggtgtatgccttcaccttctgaggacggcacaccctgcaccaccatggggtgaggcttggcacgtagctctgacttgctgtcggcctttggcttctcctgtgttctagaaccaggagttttgaccaggggcggcggccgtccttctggaatttctccccagcagccctgatttcaaatatcccatgttgtggtcaagctgagtcagaagacatggaagtatgggcctcctgcccctagaggcatgacggggcaaggccttcagagggcagattggggatccttgaaactacattccaggaacatgggaccagatgagacagctagttaagtttaaaacatagacatgatttgatgatcgcttgctggtggtaaataatcactcgtgtgtcttgtttttatgcaaacttatcgaacctagggcgtggggtgctggggcaagagcagccctcagaacttcagtgttcctgacccaattctggtttcacattcagtcccttggccatctagtagggccattggatgttcctagtttgactttgaaatggcacctttgccaccagacacctggtcccttccaagacccaagtgcattgggagacccagggatggggggttactggtaataggtggggtttctgggggtgttgttggtggtttttatctcctggtcggactttctcttctttttaagaagaggagaggatgtctttaagagctagatgtgccaggcagtggactcttcaggccacccacgtgagaatgctgtttcttctctgaggaatcgtggaattttaaagatgaacaagattcacatccactgaattattcaacggatgggtcagaaaggggggtgatttgcctgtggtcaccaggcaggtttgtggaggagtcggaacagaaagatgtgtcctcactctcagctcactgagctctctgccccaactaagcacttccctgaggaggttgctgagaagctgccctcaggagaatgtccaggcatcttgaaggtgggtgcgagattggcaggctgctcagatacccgtcctttacattcagtgtggataccgtgcattctcctgaagctgtgaaagtgcttctgcccaagccacttccttaaattctgaaatatcagcatctggggtcctggcaagcaaggaagcttccaagtaaaaaccagagagaagggcacacttttctttcttcattaggaaatcttattgcacaggaaccacccccacccccaccccccacaccttcccaaggcagcatcccagtgcagatagagtgggaaaggtcccagaagggggctcactcacctctaggcccagagaggctttctcctcactttatacactgcaaaaacagaagaattgtgtcaataacaccctctgtagtggagaaacttaaaaagctggttaggaagctctcgtgtatatttagagacaattacaagaaagctggacttgccgctgtggtctcaggagaaatgagtgttcttgatgacaggcaaagggacatcttagttgtccagaagcggcactcttccctggaagccgccatgttaataggattactagcctggctccagacagtgcctgctcatggctgccagttcttaccgatcacatctgtcactgccaccgtatatcatctgccagtgcatcagcttaaggggaggtcacgagtgcaaaagaacctgacccttgacaatgagggagaagggacatggaccacctgtctggaattcctggaatcactggcagggtggaggctgggctggggagttagccgcggtgtgcgtgaatggctctgtctccagcaagtctctctccatcaaaccccaggtctgccccataagcaagatctttaacagatggatgtctccatgagaaaacccaaggcgagaagcccagagccatggcggggttgcttgacgtcctcatggagtcactctgccccacatgctcaaatcttccctctggccccacatccctaggagggcctgacccctgtaaagatacaggaggcagctccctggcctccaaatggcccatggagatggcagtcgggagacagggttctgtgtttgctgcggtgaagggaggagaaggcaggaggaaaaaggatggcttctagccctgaagaggactccagcatcccaggcaccgggtgcttctggctgcagttttccctatggaggcccctcagcctccagccctaacataaatgtcggttaaattcagttttcaagcctctctcccttttcagtgtcagagcagtagatggtccagggcattggaggcctcgaccactctgcattgcagattacagtgacttcctcggggttgccccatcttggtctcctgtggtttcttcatcagctttttttttaccagcatctctcaaataacaatgaagatagatatgcccattagtgtctgattaaggagcaaaggctggatttctggccacagcgagctgcactctccctcctgcctcagccggggtccgtcttagcagtttggaaaggggaaaaagatgccggtcctcactgcttaagttttgtgtccaggtgccactagacttgcatgcacactaactccttacaatcaccacacagcatcatcgccccagtgcacagatgaggaaccagaggctcagaggagtgaagttgccttcctgaggtcacacagcatgaaagtgatgagctaggatttgaatctgggaagttgggctctagagccagactgtactgccttctgccacactgtactgccttctgtgactgggtggcacctccagggcacatttacacaaggccctgaatctgcagaggctgtttctcaagatgcccgtcatggtgtggcctgggccagctctggcttccacaggtccctgactgtcctcagagtggaacatgctcaacctcccgcccactgctctctctctgcccagatttcaggggtgccggtccccaaggcctgcccccttctttaagactgaactcaagtctccttggaaggccccggtgaagctcccagagactggttttcttgggatgcaggcagaaggggaccctccctggccaacacccaggagcccagcagaagcacccacacgtagaaagaggctcactacagccagaagtgcagagtcagagtcctgggaccatcttgttctgcaaggtgaccccaggctccccaggacaggggagagggatcgtcctcattcagactctagctggggcctctgtactggcttctccctgggtggggttgcctgttacatagctgtgcctcagagaaagggtcctgcattttctggaatgttctctgtgcttacccctctgtgtgcccctccattgctcctctacaagcaattaggtgattcaaaagagcaacttaggctgggtgcagtgactcacacccgtaatcccggcactttgggaggccgaggcgggcagggacaggagttcaagaccagcctggccaacatggtgaaaccctgtctctacaaaaaatacaaaaattaaccagacattgtggcatgtgcctgtaatcccagctactcaggaggctgacacaggagaattgcttgaaccaggaggcggaggctgcagtgagctgagattgtgccactgcactccagcctgggcaacagaacgagactctgtctc

SEQ ID NO: 4582 - DNA, 1173 bp, Homo sapiens
acagtgcagccacctccgagagcctggatgtgatggcgtcacagaagagaccctcccagaggcacggatccaagtacctggccacagcaagtaccatggaccatgccaggcatggcttcctcccaaggcacagagacacgggcatccttgactccatcgggcgcttctttggcggtgacaggggtgcgcccaagcggggctctggcaaggactcacaccacccggcaagaactgctcactacggctccctgccccagaagtcacacggccggacccaagatgaaaaccccgtagtccacttcttcaagaacattgtgacgcctcgcacaccacccccgtcgcagggaaagggggccgaaggccagagaccaggatttggctacggaggcagagcgtccgactataaatcggctcacaagggattcaagggagtcgatgcccagggcacgctttccaaaatttttaagctgggaggaagagatagtcgctctggatcacccatggctagacgctgaaaacccacctggttccggaatcctgtcctcagcttcttaatataactgccttaaaactttaatcccacttgcccctgttacctaattagagcagatgacccctcccctaatgcctgcggagttgtgcacgtagtagggtcaggccacggcagcctaccggcaatttccggccaacagttaaatgagaacatgaaaacagaaaacggttaaaactgtccctttctgtgtgaagatcacgttccttcccccgcaatgtgcccccagacgcacgtgggtcttcagggggccaggtgcacagacgtccctccacgttcacccctccacccttggactttcttttcgccgtggctgcggcacccttgcgcttttgctggtcactgccatggaggcacacagctgcagagacagagaggacgtgggcggcagagaggactgttgacatccaagcttcctttgtttttttttcctgtccttctctcacctcctaaagtagacttcatttttcctaacaggattagacagtcaaggagtggcttactacatgtgggagcttttggtatgtgacatgcgggctgggcagctgttagagtccaacgtggggcagcacagagagggggccacctccccaggccgtggctgcccacacaccccaattagc

SEQ ID NO: 4583 - DNA, 2139 bp, Homo sapiens
gaagacagtgcagccacctccgagagcctggatgtgatggcgtcacagaagagaccctcccagaggcacggatccaagtacctggccacagcaagtaccatggaccatgccaggcatggcttcctcccaaggcacagagacacgggcatccttgactccatcgggcgcttctttggcggtgacaggggtgcgcccaagcggggctctggcaaggactcacaccacccggcaagaactgctcactacggctccctgccccagaagtcacacggccggacccaagatgaaaaccccgtagtccacttcttcaagaacattgtgacgcctcgcacaccacccccgtcgcagggaaaggggagaggactgtccctgagcagatttagctggggggccgaaggccagagaccaggatttggctacggaggcagagcgtccgactataaatcggctcacaagggattcaagggagtcgatgcccagggcacgctttccaaaatttttaagctgggaggaagagatagtcgctctggatcacccatggctagacgctgaaaacccacctggttccggaatcctgtcctcagcttcttaatataactgccttaaaactttaatcccacttgcccctgttacctaattagagcagatgacccctcccctaatgcctgcggagttgtgcacgtagtagggtcaggccacggcagcctaccggcaatttccggccaacagttaaatgagaacatgaaaacagaaaacggttaaaactgtccctttctgtgtgaagatcacgttccttcccccgcaatgtgcccccagacgcacgtgggtcttcagggggccaggtgcacagacgtccctccacgttcacccctccacccttggactttcttttcgccgtggctgcggcacccttgcgcttttgctggtcactgccatggaggcacacagctgcagagacagagaggacgtgggcggcagagaggactgttgacatccaagcttcctttgtttttttttcctgtccttctctcacctcctaaagtagacttcatttttcctaacaggattagacagtcaaggagtggcttactacatgtgggagcttttggtatgtgacatgcgggctgggcagctgttagagtccaacgtggggcagcacagagagggggccacctccccaggccgtggctgcccacacaccccaattagctgaattcgcgtgtggcagagggaggaaaaggaggcaaacgtgggctgggcaatggcctcacataggaaacagggtcttcctggagatttggtgatggagatgtcaagcaggtggcctctggacgtcaccgttgccctgcatggtggccccagagcagcctctatgaacaacctcgtttccaaaccacagcccacagccggagagtccaggaagacttgcgcactcagagcagaagggtaggagtcctctagacagcctcgcagccgcgccagtcgcccatagacactggctgtgaccgggcgtgctggcagcggcagtgcacagtggccagcactaaccctccctgagaagataaccggctcattcacttcctcccagaagacgcgtggtagcgagtaggcacaggcgtgcacctgctcccgaattactcaccgagacacacgggctgagcagacggccccgtggatggagacaaagagctcttctgaccatatccttcttaacacccgctggcatctcctttcgcgcctccctccctaacctactgacccaccttttgattttagcgcacctgtgattgataggccttccaaagagtcccacgctggcatcaccctccccgaggacggagatgaggagtagtcagcgtgatgccaaaacgcgtcttcttaatccaattctaattctgaatgtttcgtgtgggcttaataccatgtctattaatatatagcctcgatgatgagagagttacaaagaacaaaactccagacacaaacctccaaatttttcagcagaagcactctgcgtcgctgagctgaggtcggctctgcgatccatacgtggccgcacccacacagcacgtgctgtgacgatggctgaacggaaagtgtacactgttcctgaatattgaaataaaacaataaactttt

SEQ ID NO: 4584 - DNA, 1054 bp, Homo sapiens
cgcgccagagagaagcagcctccggccccggcggcccctgtctcccgaccccggaaggcgaagcaggctgcccggggaccccgcgcgtgggcgcttgaagccgagaccagcctgcccgggcctgggcaggcggagcagggccttggaccccgcggcgcccctcggcctcggagcaacgagcgcagcgccgcctctgaagagccaatccattcaggatgggaaaccacgcaggcaaacgagaattaaatgccgagaaggccagtacgaatagtgaaactaacagaggagaatctgaaaaaaagagaaacctgggtgaactttcacggacaacctcagaggacaacgaagtgttcggagaggcagatgcgaaccagaacaatgggacctcctctcaggacacagcggtgactgactccaagcgcacagcggacccgaagaatgcctggcaggatgcccacccagctgacccagggagccgcccccacttgatccgcctcttttcccgagatgccccggggagggaggacaacaccttcaaagacaggccctctgagtccgacgagctccagaccatccaagaagacagtgcagccacctccgagagcctggatgtgatggcgtcacagaagagaccctcccagaggcacggatccaagtacctggccacagcaagtaccatggaccatgccaggcatggcttcctcccaaggcacagagacacgggcatccttgactccatcgggcgcttctttggcggtgacaggggtgcgcccaagcggggctctggcaaggtgagctctgaggagtagaggagttttagtttaaatggaaaaagcaaaggagaaatcagtaggtgaactcagccattagaggaagaactggcacgtagcctcttgctgtctaaggtctcgttccgtgctggagaatgcatatgagcccaagagtgtgggcctgagtggctgcttaggacgttttcgtttaactcaccccctcttttcctcacaagggatggtggccggggtgtggctcaggaatgtaaggacatgctgaattc

SEQ ID NO: 4585 - DNA, 2076 bp, Homo sapiens
ccgagggtagcttgagcgcggcggcggcgttgttcagtcagagcgagaacattccagaggtcgcccagctccggcgctgacgggtgtggaccgcggacgtcgctgggacagcccctccccgctgctcggcggcggcacctggcccggccgctcctcgctgcgcttcgcctccgcctcctcggactcggactcgggtttatatcgcgcctcacttcatcccagtcccgggcgagcagcgttgggtttatgtctttatttgacgaaaacgagctgttgcgcagccattggtacctgtattggggaaacatagcatacaagcaagaagcttacagcctcagtggcgaaaattttttcatgtcagagaccgagaactcttgcagtcgtttatgtcatcccttcttctccagacagaagataccaaaaagttgcaatcaaagatctcttcatcttattgataaagccactaataagccaaaatgtctgtcaatgtcaaccgcagcgtgtcagaccagttctatcgctacaagatgccccgtctgattgccaaggttgagggcaaaggcaatggaatcaagacagttatagtcaacatggttgacgttgcaaaggcgcttaatcggcctccaacgtatcccaccaaatattttggttgtgagctgggagcacagacccagtttgatgttaagaatgaccgttacattgtcaatggatctcatgaggcgaataagctgcaagacatgttggatggattcattaaaaaatttgttctctgtcctgaatgtgagaatcctgaaacagatttgcatgtcaatccaaagaagcaaacaataggtaattcttgtaaagcctgtggctatcgaggcatgcttgacacacatcataaactctgcacattcattctcaaaaacccacctgagaatagtgacagtggtacaggaaagaaagaaaaagaaaagaaaaacagaaagggcaaagacaaggaaaatggctccgtatccagcagtgagacaccaccaccaccaccaccaccaaatgaaattaatcctcctccacatacaatggaagaagaggaggatgatgactggggagaagatacaactgaggaagctcaaaggcgtcgaatggatgaaatcagtgaccatgcaaaagttctgacactcagtgatgatttggaaagaacaattgaggagagggtcaatatcctctttgattttgttaagaaaaagaaagaagagggtgttattgattcatctgacaaagaaatcgttgctgaagcagaaagactggatgtaaaagccatgggccctcttgttctaactgaagttctttttaatgagaagattagagaacagattaagaaatacaggcgccatttcctacgattttgtcacaacaacaaaaaagcccaacggtaccttcttcatggtttggagtgtgtggtagcaatgcatcaagctcagcttatctccaagattccacatatcttgaaggagatgtacgatgcagaccttttagaagaagaggtcatcatcagctggtcggaaaaggcctctaagaaatatgtctccaaagaacttgccaaagagattcgtgtcaaagcagaaccatttataaaatggttgaaggaggcagaggaagaatcttctggtggcgaagaagaagatgaagatgagaacattgaggtggtgtattcgaaggctgccagtgtaccgaaagttgagactgtaaagtcagacaacaaggatgacgacatcgatattgatgccatttaaagggatggatgcaacctagcttaacagtataatgctgcaaattttcctccattatcagccagaagtgcaacatgtatgtgcaaaagctaaaatggcttaacatcatgctacactttacactaaaaatctattactgtgagtggtctgttattaagcccaatgagacatctagggagtccatacacatcagtgagcagatgtagtttgcttatttatagcatgtttctttttgaaaaactagtggtggacacatttggatcacatttatacagttataaaaataaaggtttgattttggtcgttc

SEQ ID NO: 4586 - DNA, 1880 bp, Homo sapiens
acaaaattactttatcaaaaacaaattagctagaaaaaaaattacatcttatgttttcttatatagataaagagaggcctgtccagtctttgaaaacatcaagagatacttcaccctcaagtggttcagcagtttcttcatcaaaggtgttagacaaacccagtaggctaactgaaaaggaacttgctgaggctgcaagcaagtgggctgctgaaaagctagagaaatcagatgaaagtaacttgcctgaaatttctgagtatgaggcgggatccacagcaccattgtttactgaccagccagaggaacctgagtcaaacacaacacatgggatagaattatttgaagatagtcagctaaccactcgctctaaagcaatagcatcaaaaaccaaagagattgaacaggtgagagtctagttgtcttcatgtacataatttttgtttgtgttgctttgcacatgtaaacatttattgaataaatatgcttcatttctttttccacctgtaactctaaaactacaacttaaaaaattataaaaattgtttgagttgacttcacagtcagtttgatcagtatggtcccccacctggattgtttatttttaaataaaaaacagacttcttttttacagaatattaatattctagttagtatgaagcaattaaaaattattaaagttaatagggatgggatggaagaaatgttcaatgtagcaaaatgttagcaaatgttatttttgaatattgggattacagatgtttcttatgttttttcattatactttaaggtagtttccaaatattaaaggaaaaataaaggatactatttaagtctagttttttagtgaagtcattctgaaaagcaggactttgtttttaatgtgcaactattatggggttattttcattttatgaggattaaatgaagtaaatgtgaaagggttttataaaatgtaacattttgtacaggtgcttattgatgttgttactctctagtgcgttgaataaatgtaattacattgataataatattctaaaacctattggaaattaagaacaaagtgaaaacttttctctaggtgctgtccgatttctacatcaattaaatccgtttccttttgttggatagggaatggtctcaaatcctagatgtgaccgtgtagcttatgttaatgtcacactaatgtgaaaagataagaaccagaataggaaatttgtcatgcaaaccattggagtttcaaaatgaaggtggtgagcagtatcagatgcttagaggaatataaggaaaatggagactgagaaaattctgtttaatttggtgattgggaggcagttggtacctttcaagataccaattaaatgagagcataagtaaaaggtttgctcagtatatctatctttaacacaaagatgaatgtctttattttatataaaattactgtccttttttttcttgacatgtttttatttccttttctccccttaccataatggatgctctgtgaaaacaagggctttgttttatcttgttttatttactgctacatctgccatcaccgagaacagtatgtgtagcaggcttacaagaaatacttgtggccgggcgcggtggctcacgcctgtaatcccagcactttgggaggccgaggcgggcggatcacgaggtcaggagatcgagaccatcccggctaaaacggtgaaaccccgtctctactaaaaatacaaaaaattagccgggcgtagtggcgggcacctgtagtcccagctacttgggaggctgaggcaggagaatggcgtgaacccgggaggcggagcttgcagtgagccgagatcccgccactgcactccagcctgggcgacagagcgagactccgtctc

SEQ ID NO: 4587 - DNA, 799 bp, Homo sapiens
gtgcggtgatagccaagccatgggagacaagaagagccccaccaggccgaagcggcagccgaagccgtcctcggatgagggttactgggactgtagcgtctgcaccttccggaacagcgccgaggccttcaagtgcatgatgtgcgatgtgcggaagggcacctccacccggaaacctcgacctgtctcccagttggttgcacagcaggttactcagcagtttgtgcctcctacacagtcaaagaaagagaaaaaagataaagtagaaaaagaaaaaagtgaaaaggaaacaactagcaaaaagaatagccataagaaaaccaggccaagattgaaaaatgtggatcggagtagtgctcagcatttggaagttactgttggagatctgacagtcattattacagactttaaggagaaaacaaagtcaccgcctgcatctagtgctgcttctgcagatcaacacagtcaaagcggctctagctctgataacacagagagaggaatgtccaggtcatcttcacccagaggagaagcctcatcattgaatggagaatctcattaaagtttattttctccaatttcttagtcacttctgtcctaccatgcaaatacacagattatgccaagaggtaccacattttcatgacagatacattcatgcacaatccataatttgagttttacataaaatagaaatttgttagaatttgttagattttattgcaatgatgcctaccaaacatttccagacttaacattttggtctctgcagttaagtgccatgaaaatgtggttgaat

SEQ ID NO: 4588 - DNA, 4056 bp, Homo sapiens
gagctgagggaggacctgctggctgcagtgaggagcggaggcgggcgcgggcggccggccatgatcgcgtcgtgcttgtgttacctgctgctgccggccacgcgcctcttccgcgccctctcagatgctttcttcacatgtcgaaaaaatgtccttctggcgaacagctcatccccccaggtagagggcgactttgccatggcccctcggggccctgagcaggaggaatgtgagggcctgctgcagcagtggcgagaagaagggttgagccaggtgctctcaactgcaagtgaggggccccttatagataaaggactagcccagagcagcctggcacttctgatggataatcctggagaagagaatgctgcttcagaggacaggtggtccagcaggcagctgagtgaccttcgggctgcagagaacctggatgagcctttccctgagatgctaggagaggagccactgctggaggtggagggggtggagggctccatgtgggcagctatccccatgcagtcggagccccagtatgcagactgtgctgccctcccagtgggtgccctggccacagagcagtgggaagaggacccagcggtgttggcctggagcatagcacctgagcctgtgccccaggaagaggcttccatctggccctttgagggcctggggcagttgcagcctcccgcagtggaaataccatatcatgaaattttgtggcgagaatgggaggatttctccacccagccagatgctcagggcctgaaggcaggagatggccctcagttccagttcactctgatgtcttataacatcctggctcaggacctgatgcagcagagctcagagctctatctacattgccatccagacatcctcaattggaactatcgcttcgtgaacctcatgcaggaattccagcactgggaccctgatatcctgtgtctccaggaagtccaggaagatcattactgggagcagctggaaccctctctgcgaatgatgggctttacctgtttctacaagaggaggactgggtgtaaaaccgatggctgtgctgtctgctacaagcctaccagattccgcctgctctgtgctagccctgtggagtacttccggcctggcttggagctacttaatcgggataatgtgggcttagtgttgctactgcaaccactcgtcccagaaggcctgggacaagtctcggtggccccgctgtgtgtggcaaatacccatatcctttacaacccacgccggggcgatgtcaagctggcccagatggccattctcctggcggaagtggacaaggtggccagactgtcagatggcagccactgccccatcatcttgtgcggggacctaaattctgtccctgattcacctctctacaacttcatcagggatggagagctccagtaccatgggatgccagcctggaaggtatctggacaggaagacttctcccatcagctttaccagaggaagctgcaggccccactgtggcccagctccctgggcatcactgattgctgtcagtatgtcacctcctgtcaccccaagagatcagagagacgcaagtatggccgagacttcctgctacgtttccgcttctgcagcatcgcttgtcagcgaccagtaggactggtccttatggaaggagtgacagatactaagccagagcgacctgcgggttgggctgagtctgtccttgaggaagatgcatcggagcttgagcctgccttctccaggactgtaggtaccatccagcactgcctccacctgacgtcagtatatacccacttcctgccccagcgtggccgcccagaggtcactacaatgccattgggtcttggaatgacagtagattacatcttcttctcagctgagtcctgtgagaatgggaacagaactgatcacaggctgtatcgagatggaactctcaagctcctgggtcgtctctcccttctctctgaagagatactctgggctgccaatggcttacccaaccccttctgctcttcagaccacctctgcctgctagccagcttcgggatggaagtcaccgccccatgacagggctcccaggggaagagagcttctcttccagaagagctcactggatcagagactgtggaaaaatcccatgcatctagaaacttagatccaagaaacttacatcccctcccttccccctcctcgttccctttttcccacggttagactttctccaggcctggctgcgttctctgcctgtggtccttgccccaccccagcctcttcctaatcctgtgccacacactcagtggccctgggagaggcagaaggggggctcccccttccttccatgtatccagcgctcccccttgatttttaattaccagggttatgggagttcttgatttcattggttatttgctttcaggccgtttcttgatgtaccttctgacctgaccttttccctgccttcaggacttctgggcccagccctcttgccaggcatgcatatgtgagatatgcatatcatgtatgtgtcctcttggggtgagacttctgcacagccatgcctgcctctgaccagtccacttttcatgttggggctgtaggcctggggcaggttcagagtctacccaagtacctatgtatgagcaggcagcagcagggcatggccccatctctccttttagcctctgtgtttcattaggcattcatcctgccaaccagggcaggcccggcgtctgggctctgggaacaaatggggcccacatcctggagtggcaaattttgggggatgcgctacctgtcccagctggccctgtgcctccaacccagagctccccacagacctggtgtaatttcacaagggccatccctttccccaggcttccctgagggaggcggaagtttgaacccttatgtggggttcattgggctagggtagtggtatgaggtttaaaactatttaaggattaggaggagaaagagtcttcaggaaactcttgtttcactggactctgcagcctgcagaactggggcaagggtaggagttccagtaggggaaggagcaggtagactcttcagctgcctcagctgggactgaagacctaagctgattctctttcctctccactcctaagaagcaattttctgttcctctccttccaccactttttactttctgctatctcccatctcccgcttcccttccatttcctttctagaaaaccctggtatttagctcaggccaaactgcctcagcagaaaggtggccttggacaaaactggtccaagaatttgaagtggcagtacttgcggattggctctgtccagcaaggcctcagctgcttgttgcgtctgctttccctcccctaacagaagggtaccctggcttattcaggggactccttagtccacactgtgtcacctgcatgccttaatctttcattgctggggtgtggccttgggagatcctgggccagcccctccacacatctccctaagtcagagtggctgctggccctggtagatttgacttgctcttgcctcactcgacctccaaagtgggactgaagacagtggtcaagagacttgagttcgggacagtaagccaggggttaaggttctttcctttttttgaaagccaaagacccagtttgcattgtgctgctgcattcatggttagaagctttccatgcctaggttctagggaatttatttttctatgtgtatatattttcaaactttgtttcctgggtactgggcatgtgcctgtctgagccccaggtctgtctacaccccaccattcattctgtctgtctgttccctggacactgcctaaaagggtctcaagacagtgccctgtgggttcctaggactagggcccatcactgttctcttctgctgggaaatgcagctttaaaatggctaaccacagcagagggcagatgcttgatagattatcttttccttgctttcttgtttctgttttgaaagtgaaatggggttttaaattgttatttaaactctttttccaaataaaggtttaccttttttcccccc

SEQ ID NO: 4589 - DNA, 1517 bp, Homo sapiens
agaaacaccaatgctggttgctgtgctcacgtatgtggggtatggcgtactcaccctctttggatatcttcgagatttcttgaggtattggagaattgaaaagtgtcaccatgcaacagaaagagaagaacaaaaggactttgtgtcattgtatcaagattttgaaaacttttatacaaggaatctgtacatgaggataagagacaactggaatcggccaatctgtagtgtgcctggagccagggtggacatcatggagagacagtctcatgattataactggtccttcaagtatacagggaatataataaagggtgttataaacatgggttcctacaactatcttggatttgcacggaatactggatcatgtcaagaagcagccgccaaagtccttgaggagtatggagctggagtgtgcagtactcggcaggaaattggaaacctggacaagcatgaagaactagaggagcttgtagcaaggttcttaggagtagaagctgctatggcgtatggcatgggatttgcaacgaattcaatgaacattcctgctcttgttggcaaaggttgcctgattctgagtgatgaactgaatcatgcatcactggttctgggagccagactgtcaggagcaaccattagaatcttcaaacacaacaatatgcaaagcctagagaagctattgaaagatgccattgtttatggtcagcctcggacacgaaggccctggaagaaaattctcatccttgtggaaggaatatatagcatggagggatctattgttcgtcttcctgaagtgattgccctcaagaagaaatacaaggcatacttgtatctggatgaggctcacagcattggcgccctgggccccacaggccggggtgtggtggagtactttggcctggatcccgaggatgtggatgttatgatgggaacgttcacaaagagttttggtgcttctggaggatatattggaggcaagaaggagctgatagactacctgcgaacacattctcatagtgcagtgtatgccacgtcattgtcacctcctgtagtggagcagatcatcacctccatgaagtgcatcatggggcaggatggcaccagccttggtaatggcatcactattcatgaagttgtccaaacaagaaatacctatcatcgtttctctcctttatcccctgtatttagtcaccagtgcctatggatcatgcttccttaatatctttgaacctgtctacttctccatatctcattgttatttacttgacttagatttctgtccactttcacctggttttaatagccagccagtcataatagtagaggaatcagtcaagcaaaaatgctttggaagaattaaataagcaatgctgaacatcaggaattgtagatatccgtacagagagttccagtaaaattttatgagtccacgaccccttttctaagcagtctggtccatgttggtctcatacctcatatgcaggattcattcattcattaaatatttgtttcat

SEQ ID NO: 4590 - DNA, 4519 bp, Homo sapiens
agcgcgcgcggcgccccggagcttctccgcggaaccgcgaccaacgcggaggtctcggcggccgctgcgggagccacaggaagtgaagagcttccgccgggagaccgcggctgcaggaacggaggcggaaggggccctgcggcgacgacgtcgtcgacgggggtggccgtgggagctgagcacggagaagactccctctctcggaagccggatcccgagccgggcaggatggatcaccaccagccggggactgggcgctaccaggtgcttcttaatgaagaggataactcagaatcatcggctatagagcagccacctacttcaaacccagcaccgcagattgtgcaggctgcgtcttcagcaccagcacttgaaactgactcttcccctccaccatatagtagtattactgtggaagtacctacaacttcagatacagaagtttacggtgagttttatcccgtgccacctccctatagcgttgctacctctcttcctacatacgatgaagctgagaaggctaaagctgctgcaatggcagctgcagcagcagaaacatctcaaagaattcaggaggaagagtgtccaccaagagatgacttcagtgatgcagaccagctcagagtggggaatgatggcattttcatgctggcatttttcatggcatttattttcaactggcttggattttgtttatccttctgtatcaccaataccatagctggaaggtatggtgctatctgcggatttggcctttccttgatcaaatggatccttattgtcaggttttctgattattttactggatatttcaatggacagtattggctttggtggatatttcttgtacttggcctgctccttttcttcagaggatttgttaattatctaaaagtcagaaacatgtctgaaagtatggcagctgctcatagaacaaggtatttcttcttattgtagagactgcatcaacccgacattcctttcttataccaatgtgaaatttccagatcatctgtaaacctacaactttaatagaagactactaataacagaagacaaattagtgaagaaaagacggagtttcgaaattgaatggcagggtggtttttgcttacaagccatttctgttcattctttaagtatctatatttcatttgttttgcacatatgcatatgtgcccatttaagatatttgcatatacttgatagaaaccataaagttgtagcagttaagtccagtcacatttggttaatcagtgtttgatataattgaaagagttgagtggataaacagtcttccagcttgtaaatgccattgacttctgacctgacatttagtataataaaaatgaaattcttaaccatgtcaaatgatttagtttctggctcttagactcatctggcagttctacacatgaaacatcttttgttatataaggtgtattgaaacctgcagtgctgattattagaaaggatttgtcagatttttgaacatgatatttacattattatttaggaaaactcttcctgtaaataaccatgcataacttactttctgcaatgttttcttagaaattgtgtccagatagctttcactaattttaaattaagtgaactaaatatatatgtgtatatgtatacacatatatatacacacacacatatatatatttagaaacgtgagtgttaaagatagaatttgttttaggacaaattttaagaaaatgtgggaataccaaatgtcctttataagaaaaataaattttattttaagggacatactagttttagggattttcagatgggaagctgcatttttaggattgcccatcttaagagatcttgcaggaagagattgtattagatattatatttatttcatttaagataattttcaaagttaattttctaaataagataattctcatttgtgtttgtcttttaaaaggccaataaaatatctttcagtatcattgtaataattttttagagtttaatttgtaaagcttagcaaataaaatcttgtactatgaatagcttcttgctttatgactttaggattaacttgtaaaaaacatatcctgaactgagatatgcaaaatactcattttcaagttatggaaatgtgtttgtggcatataggactgtggggtctgtgtgtgtagtgagagtgtgtagccactattataactggaatttaatttacattcataaactactatatttcccatcttgcaaatcattttatgtctcatctgtttttcctttcggttatatctttggttttgaataccaacatttaaaatgatggtattttatcttttaaacttaaaaattatttaatacagctatatggaccttataaaattgatttcttatttattattagacattactactaaaaggtacatctaactattcagggacatttttccatttccaaaaaataaaatttattatgctttataacctcttctgtattttctaattttttcattgtctttgataaataaaacagttttgttttgctaatatagcctattttttgttttgtctcattcagtttactttcctgcgtagaatttttattgttatattaaaatttttattgttgtattaaagtacctgtgttacaccccttgaagtaagacagtagcatggggtaaagaaaaaatatttagtttagttgcctaatttggaagttaattaaaattaaactgtactaataacatattcaaactcatgctggatctctttcatattaatttcttatagacctgtactttattctttcaataatttttaaatgaaattaagctttgctacatggtaattaaataattactaggaagcttagctatcaaacatcgacttactaaaatttcattttagcttttatggtatatgtgcttgttttctgaatatggatacatgttacttttgatccagcatcaaaacttcactttttgttttgacttttccccccaaatctgtaaggttcaagtatacatattactgaatcctctataattggcataattcaatggtagccttaaatctcatcatgtaagcaggggaatcagaatgttattttcaagaacttaatgttcccttcagatatataaaatcctgcatacttcatttcctgtgagcttgaacagctgctgttgtgttttggggatgcttgatcatctttgcactctgccttaaagattgaaaaatcaaaactcttgttagggtatctaaacatttttgagtgtgaactggggattggaagttaatacaaaaaaatttcaaattatttctattgtaaatgaataagctagtcatggctaggataatccattttcatgtatttatgcaataaactgaattttaaggcaaaaacaacacttttctatatagtgtatgcaggacagattttagaaacttagattaaaatacaaatcccattacatttggttaaaatgaaaatctctgcttaatggaaaaaatactaatctttagcctattttgagtctataagatatatttcattttagacatgccttctaagttgttcacagatttttacctgctaaaacaatattatttccagtaaaacctctcctaacaggaaaagtggagttcaaaatatccaattggagaaaaattcagagttccttcattaaatataatttttttcatctagtatgtactatttcaagaagtgcaaaaagtaatgatagtgaatgtgataccatacttaactaaggtaatatatatccttagtttgctcaaaagagtcctggttattcctgttttctcagcttaatagtgcctcatcgtactctcaaaagtgttctaatttggaggataagttatatgatcatcctgtgtataattgtagactgtaccaagaagcaactaccttagctccactgccctttgagggatggaactggggtaagggcaggagccagttattattgccacagtgttttctaatgaaccatttggcctgtagaagaggaatagtattttttttaatagttgtatttgaatgattccagcttatcgtaaatactaaactgaatggcttttatatttttaactgctgttaaatgttattttagcatttattagttgtttattatttaattcttcaaatagtcatatgaaaacatatatttgataaaggtcaattgttagatgataatgtgccattcattatcataggaatgtccttgcccatatataaaacatgctggcatgtattttacttgttaataaagttgtatagatgtggaagtgtgaacctgtgatgcatccttttcaaaatcagtttaagattcgcatattatcatgactgtgacctcactaaactgtttatgtgacaaacctttcaagattggagatgaaaacaacacttgtgaaattaggttggggttgcaacatcttttaacttctcagttatttgtatgtcaggagacagattgtggtttaattttaataaacaaaatatcatctttttgaaaat

SEQ ID NO: 4591 - DNA, 3016 bp, Homo sapiens
cattcaccaacaggatattttttgccatggtggattttgatgaaggctctgatgtatttcagatgctaaacatgaattcagctccaactttcatcaactttcctgcaaaagggaaacccaaacggggtgatacatatgagttacaggtgcggggtttttcagctgagcagattgcccggtggatcgccgacagaactgatgtcaatattagagtgattagacccccaaattatgctggtccccttatgttgggattgcttttggctgttattggtggacttgtgtatcttcgaagaagtaatatggaatttctctttaataaaactggatgggcttttgcagctttgtgttttgtgcttgctatgacatctggtcaaatgtggaaccatataagaggaccaccatatgcccataagaatccccacacgggacatgtgaattatatccatggaagcagtcaagcccagtttgtagctgaaacacacattgttcttctgtttaatggtggagttaccttaggaatggtgcttttatgtgaagctgctacctctgacatggatattggaaagcgaaagataatgtgtgtggctggtattggacttgttgtattattcttcagttggatgctctctatttttagatctaaatatcatggctacccatacagctttctgatgagttaaaaaggtcccagagatatatagacactggagtactggaaattgaaaaacgaaaatcgtgtgtgtttgaaaagaagaatgcaacttgtatattttgtattacctctttttttcaagtgatttaaatagttaatcatttaaccaaagaagatgtgtagtgccttaacaagcaatcctctgtcaaaatctgaggtatttgaaaataattatcctcttaaccttctcttcccagtgaactttatggaacatttaatttagtacaattaagtatattataaaaattgtaaaactactactttgttttagttagaacaaagctcaaaactactttagttaacttggtcatctgattttatattgccttatccaaagatggggaaagtaagtcctgaccaggtgttcccacatatgcctgttacagataactacattaggaattcattcttagcttcttcatctttgtgtggatgtgtatactttacgcatctttccttttgagtagagaaattatgtgtgtcatgtggtcttctgaaaatggaacaccattcttcagagcacacgtctagccctcagcaagacagttgtttctcctcctccttgcatatttcctactgaaatacagtgctgtctatgattgtttttgttttgttgtttttttgagacgctactgcgctccagcctgagtgatagagtgagactctgtctcaaaaaaaagtatctctaaatacaggattataatttctgcttgagtatggtgttaactaccttgtatttagaaagatttcagattcattccatctccttagttttcttttaaggtgacccatctgtgataaaaatatagcttagtgctaaaatcagtgtaacttatacatggcctaaaatgtttctacaaattagagtttgtcacttattccatttgtacctaagagaaaaataggctcagttagaaaaggactccctggccaggcgcagtgacttacgcctgtaatctcagcactttgggaggccaaggcaggcagatcacgaggtcaggagttcgagaccatcctggccaacatggtgaaaccccgtctctactaaaaatataaaaattagctgggtgtggtggcaggagcctgtaatcccagctacacaggaggctgaggcacgagaatcacttgaactcaggagatggaggtttcagtgagccaagatcacaccactgcactccagcctggcaacagagcgagactccatctcaaaaaaaaaaaaaaaagtaagaaagaaaaggactcccttagaatgggaaagaaaaatcataaaatattgagctgatgcctgtatatagaaattaagcgtttctcgaaagctgttctatgttttgctgttattttagtctttattctcttcctttaggtggagaaacaaagtaccaatttgaagggattttttttattttgtcttttggtttctgtcagtagaaataaccatatgtgctaaccaaatttctgtgaagaatgttttcatggttatcattatatctaactataacctcccccatagttatgaagagtaacctgaaatgccactattgtggaaataggataattgtaattgtgaaaaaataattttaaggaaatcttacaagtattacattaaaaagatactatgactgccacctgccatttaccttctaataaccctgccatgtggtttgcagaaagagatggatatagtagcctcagaagaaatattttatgtgggttttttgtttttcgttactagatttcatggatgaggggatatggttgaccttttactttttaatggagcagccagtttttgttaattactcacttgtaaattgtgagattctgaattccttacctgctattcttgtacttgtctcaggccaaatctatgctgtggttcttatgagacttgtatgaagatgccctgatttgtacagattgaccacgggaatactactgccatgtaatctgtatagttccagataatttgtcatgaacattgacagaatgacaattttttgtatttgctttttctccctttaagagcacattcttctgtaaggagaaaggcagcattctggctaaaatgtgtagaaggtaatttactacacttataaaatagtgtgacttttgtgaaaattttgaattagctttcatatgaagtgccttaagtagactcttcatttacttttctggtaatggtttaaatatcatttgttatgcatttttaagatacagttcagaatgacacattgtagtggcaaagataaccaaatgtctggctgtttgctttttgaccatatcaataaacttttacaatct

SEQ ID NO: 4592 - DNA, 10217 bp, Homo sapiens
ctcggcccaacaaaatggcggcggcagcggtgtcgctttgtttccgcggctcctgcggcggtggcagtggtagcggcctttgagctgtggggaggttccagcagcagctacagtgacgactaagactccagtgcatttctatcgtaaccgggcgcgggggagcgcagatcggcgcccagcaatcacagaagccgacaaggcgttcaagcgaaaacatgaccgctgagcccatgagtgaaagcaagttgaatacattggtgcagaagcttcatgacttccttgcacactcatcagaagaatctgaagaaacaagttctcctccacgacttgcaatgaatcaaaacacagataaaatcagtggttctggaagtaactctgatatgatggaaaacagcaaggaagagggaactagctcttcagaaaaatccaagtcttcaggatcgtcacgatcaaagaggaaaccttcaattgtaacaaagtatgtagaatcagatgatgaaaaacctttggatgatgaaactgtaaatgaagatgcgtctaatgaaaattcagaaaatgatattactatgcagagcttgccaaaagaagatgggcttcatgggattgtgagctgcactgcttgtggacaacaggtcaatcattttcaaaaagattccatttatagacacccttcattgcaagttcttatttgtaagaattgctttaagtattacatgagtgatgatattagccgtgactcagatggaatggatgaacaatgtaggtggtgtgcggaaggtggaaacttgatttgttgtgacttttgccataatgctttctgcaagaaatgcattctacgcaaccttggtcgaaaggagttgtccacaataatggatgaaaacaaccaatggtattgctacatttgtcacccagagcctttgttggacttggtcactgcatgtaacagcgtatttgagaatttagaacagttgttgcagcaaaataagaagaagataaaagttgacagtgaaaagagtaataaagtatatgaacatacatccagattttctccaaagaagactagttcaaattgtaatggagaagaaaagaaattagatgattcctgttctggctctgtaacctactcttattccgcactaattgtgcccaaagagatgattaagaaggcaaaaaaactgattgagaccacagccaacatgaactccagttatgttaaatttttaaagcaggcaacagataattcagaaatcagttctgctacaaaattacgtcagcttaaggcttttaagtctgtgttggctgatattaagaaggctcatcttgcattggaagaagacttaaattccgagtttcgagcgatggatgctgtaaacaaagagaaaaataccaaagagcataaagtcatagatgctaagtttgaaacaaaagcacgaaaaggagaaaaaccttgtgctttggaaaagaaggatatttcaaagtcagaagctaaactttcaagaaaacaggtagatagtgagcacatgcatcagaatgttccaacagaggaacaaagaacaaataaaagtaccggtggtgaacataagaaatctgatagaaaagaagaacctcaatatgaacctgccaacacttctgaagatttagacatggatattgtgtctgttccttcctcagttccagaagacatttttgagaatcttgagactgctatggaagttcagagttcagttgatcatcaaggggatggcagcagtggaactgaacaagaagtggagagttcatctgtaaaattaaatatttcttcaaaagacaacagaggaggtattaaatcaaaaactacagctaaagtaacaaaagaattatatgttaaactcactcctgtttccctttctaattccccaattaaaggtgctgattgtcaggaagttccacaagataaagatggctataaaagttgtggtctgaaccccaagttagagaaatgtggacttggacaggaaaacagtgataatgagcatttggttgaaaatgaagtttcattacttttagaggaatctgatcttcgaagatccccacgtgtaaagactacacccttgaggcgaccgacagaaactaaccctgtaacatctaattcagatgaagaatgtaatgaaacagttaaggagaaacaaaaactatcagttccagtgagaaaaaaggataagcgtaattcttctgacagtgctatagataatcctaagcctaataaattgccaaaatctaagcaatcagagactgtggatcaaaattcagattctgatgaaatgctagcaatcctcaaagaggtgagcaggatgagtcacagttcttcttcagatactgatattaatgaaattcatacaaaccataagactttgtatgatttaaagactcaggcggggaaagatgataaaggaaaaaggaaacgaaaaagttctacatctggctcagattttgatactaaaaagggcaaatcagctaagagctctataatttctaaaaagaaacgacaaacccagtctgagtcttctaattatgactcagaattagaaaaagagataaagagcatgagtaaaattggtgctgccagaaccaccaaaaaaagaattccaaatacaaaagattttgactcttctgaagatgagaaacacagcaaaaaaggaatggataatcaagggcacaaaaatttgaagacctcacaagaaggatcatctgatgatgctgaaagaaaacaagagagagagactttctcttcagcagaaggcacagttgataaagacacgaccatcatggaattaagagatcgacttcctaagaagcagcaagcaagtgcttccactgatggtgtcgataagctttctgggaaagagcagagttttacttctttggaagttagaaaagttgctgaaactaaagaaaagagcaagcatctcaaaaccaaaacatgtaaaaaagtacaggatggcttatctgatattgcagagaaattcctaaagaaagaccagagcgatgaaacttctgaagatgataaaaagcagagcaaaaagggaactgaagaaaaaaagaaaccttcagactttaagaaaaaagtaattaaaatggaacaacagtatgaatcttcatctgatggcactgaaaagttacctgagcgagaagaaatttgtcattttcctaagggcataaaacaaattaagaatggaacaactgatggagaaaagaaaagtaaaaaaataagagataaaacttctaaaaagaaggatgaattatctgattatgctgagaagtcaacagggaaaggagatagttgtgactcttcagaggataaaaagagtaagaatggagcatatggtagagagaagaaaaggtgcaagttgcttggaaagagttcaaggaagagacaagattgttcatcatctgatactgagaaatattccatgaaagaagatggttgtaactcttctgataagagactgaaaagaatagaattgagggaaagaagaaatttaagttcaaagagaaatactaaggaaatacaaagtggctcatcatcatctgatgctgaggaaagttctgaagataataaaaagaagaagcaaagaacttcatctaaaaagaaggcagtcattgtcaaggagaaaaagagaaactccctaagaacaagcactaaaaggaagcaagctgacattacatcctcatcttcttctgatatagaagatgatgatcagaattctataggtgagggaagcagcgatgaacagaaaattaagcctgtgactgaaaatttagtgctgtcttcacatactggattttgccaatcttcaggagatgaagccttatctaaatcagtgcctgtcacagtggatgatgatgatgacgacaatgatcctgagaatagaattgccaagaagatgcttttagaagaaattaaagccaatctttcctctgatgaggatggatcttcagatgatgagccagaagaagggaaaaaaagaactggaaaacaaaatgaagaaaacccaggagatgaggaagcaaaaaatcaagtcaattctgaatcagattcagattctgaagaatctaagaagccaagatacagacataggcttttgcggcacaaattgactgtgagtgacggagaatctggagaagaaaaaaagacaaagcctaaagagcataaagaagtcaaaggcagaaacagaagaaaggtgagcagtgaagattcagaagattctgattttcaggaatcaggagttagtgaagaagttagtgaatccgaagatgaacagcggcccagaacaaggtctgcaaagaaagcagagttggaagaaaatcagcggagctataaacagaaaaagaaaaggcgacgtattaaggttcaagaagattcatccagtgaaaacaaggtaattctgaggaagaagaggaggaaaaagaagaggaggaggaagaggaggaggaggaggaagaggaggaggaagatgaaaatgatgattccaagtctcctggaaaaggcagaaagaaaattcggaagattcttaaagatgataaactgagaacagaaacacaaaatgctcttaaggaagaggaagagagacgaaaacgtattgctgagagggagcgtgagcgagaaaaattgagagaggtgatagaaattgaagatgcttcacccaccaagtgtccaataacaaccaagttggttttagatgaagatgaagaaaccaaagaacctttagtgcaggttcatagaaatatggttatcaaattgaaaccccatcaagtagatggtgttcagtttatgtgggattgctgctgtgagtctgtgaaaaaaacaaagaaatctccaggttcaggatgcattcttgcccactgtatgggccttggtaagactttacaggtggtaagttttcttcatacagttcttttgtgtgacaaactggatttcagcacggcgttagtggtttgtcctcttaatactgctttgaattggatgaatgaatttgagaagtggcaagagggattaaaagatgatgagaagcttgaggtttctgaattagcaactgtgaaacgtcctcaggagagaagctacatgctgcagaggtggcaagaagatggtggtgttatgatcataggctatgagatgtatagaaatcttgctcaaggaaggaatgtgaagagtcggaaacttaaagaaatatttaacaaagctttggttgatccaggccctgattttgttgtttgtgatgaaggccatattctaaaaaatgaagcatctgctgtttctaaagctatgaattctatacgatcaaggaggaggattattttaacaggaacaccacttcaaaataacctaattgagtatcattgtatggttaattttatcaaggaaaatttacttggatccattaaggagttcaggaatagatttataaatccaattcaaaatggtcagtgtgcagattctaccatggtagatgtcagagtgatgaaaaaacgtgctcacattctctatgagatgttagctggatgtgttcagaggaaagattatacagcattaacaaaattcttgcctccaaaacacgaatatgtgttagctgtgagaatgacttctattcagtgcaagctctatcagtactacttagatcacttaacaggtgtgggcaataatagtgaaggtggaagaggaaaggcaggtgcaaagcttttccaagattttcagatgttaagtagaatatggactcatccttggtgtttgcagctagactacattagcaaagaaaataagggttattttgatgaagacagtatggatgaatttatagcctcagattctgatgaaacctccatgagtttaagctccgatgattatacaaaaaagaagaaaaaagggaaaaaggggaaaaaagatagtagctcaagtggaagtggcagtgacaatgatgttgaagtgattaaggtctggaattcaagatctcggggaggtggtgaaggaaatgtggatgaaacaggaaacaatccttctgtttctttaaaactggaagaaagtaaagctacttcttcttctaatccaagcagcccagctccagactggtacaaagattttgttacagatgctgatgctgaggttttagagcattctgggaaaatggtacttctctttgaaattcttcgaatggcagaggaaattggggataaagtccttgttttcagccagtccctcatatctctggacttgattgaagattttcttgaattagctagtagggagaagacagaagataaagataaaccccttatttataaaggtgaggggaagtggcttcgaaacattgactattaccgtttagatggttccactactgcacagtcaaggaagaagtgggctgaagaatttaatgatgaaactaatgtgagaggacgattatttatcatttctactaaagcaggatctctaggaattaatctggtagctgctaatcgagtaattatattcgacgcttcttggaatccatcttatgacatccagagtatattcagagtttatcgctttggacaaactaagcctgtttatgtatataggttcttagctcagggaaccatggaagataagatttatgatcggcaagtaactaagcagtcactgtcttttcgagttgttgatcagcagcaggtggagcgtcattttactatgaatgagcttactgaactttatacttttgagccagacttattagatgaccctaattcagaaaagaagaagaagagggatactcccatgctgccaaaggataccatacttgcagagctccttcagatacataaagaacacattgtaggataccatgaacatgattctcttttggaccacaaagaagaagaagagttgactgaagaagaaagaaaagcagcttgggctgagtatgaagcagagaagaagggactgaccatgcgtttcaacataccaactgggaccaatttaccccctgtcagtttcaactctcaaactccttatattcctttcaatttgggagccctgtcagcaatgagtaatcaacagctggaggacctcattaatcaaggaagagaaaaagttgtagaagcaacaaacagtgtgacagcagtgaggattcaacctcttgaggatataatttcagctgtatggaaggagaacatgaatctctcagaggcccaagtacaggcgttagcattaagtagacaagccagccaggagcttgatgttaaacgaagagaagcaatctacaatgatgtattgacaaaacaacagatgttaatcagctgtgttcagcgaatacttatgaacagaaggctccagcagcagtacaatcagcagcaacagcaacaaatgacttatcaacaagcaacactgggtcacctcatgatgccaaagcccccaaatttgatcatgaatccttctaactaccagcagattgatatgagaggaatgtatcagccagtggctggtggtatgcagccaccaccattacagcgtgcaccacccccaatgagaagcaaaaatccaggaccttcccaagggaaatcaatgtgattttgcactaaaagcttaatggattgttaaaatcatagaaagatcttttatttttttaggaatcaatgacttaacagaactcaactgtataaatagtttggtccccttaaatgccaatcttccatattagttttactttttttttttttaaatagggcataccatttcttcctgacatttgtcagtgatgttgcctagaatcttcttacacacgctgagtacagaagatatttcaaattgttttcagtgaaaacaagtccttccataatagtaacaactccacagatttcctctctaaatttttatgcctgcttttagcaaccataaaattgtcataaaattaataaatttaggaaagaataaagatttatatattcattctttacatataaaaacacacagctgagttcttagagttgattcctcaagttatgaaatacttttgtacttaatccatttcttgattaaagtgattgaaatggttttaatgttcttttgactgaagtctgaaactgggctcctgctttattgtctctgtgactgaaagttagaaactgagggttatctttgacacagaattgtgtgcaatattcttaaatactactgctctaaaagttggagaagtcttgcagttatcttagcattgtataaacagccttaagtatagcctaagaagagaattcctttttcttctttagtccttctgccattttttattttcagttatatgtgctgaaataattactggtaaaatttcagggttgtggattatcttccacacatgaattttctctctcctggcacgaatataaagcacatctcttaactgcatggtgccagtgctaatgcttcatcctgttgctggcagtgggatgtggacttagaaaatcaagttctagcattttagtaggttaacactgaagttgtggttgttaggttcacaccctgttttataaacaacatcaaaatggcagaaccattgctgactttaggttcacatgaggaatgtacttttaacaattcccagtactatcagtattgtgaaataattcctctgaaagataagaatcactggcttctatgcgcttcttttctctcatcatcatgttcttttaccccagtttccttacatttttttaaattgtttcagagtttgttttttttttagtttagattgtgaggcaattattaaatcaaaattaattcatccaatacccctttactagaagttttactagaaaatgtattacattttattttttcttaatccagttctgcaaaaatgacctataaatttattcatgtacaattttggttacttgaattgttaaagaaaacattgtttttgactatgggagtcaactcaacatggcagaaccatttttgagatgatgatacaacaggtagtgaaacagcttaagaattccaaaaaaaaaaaaaaaaaaaaaaaaaagaaaactgggtttgggctttgctttaggtatcactggattagaatgagtttaacattagctaaaactgctttgagttgtttggatgattaagagattgccatttttatcttggaagaactagtggtaaaacatccaagagcactaggattgtgatacagaatttgtgaggtttggtggatccacgcccctctcccccactttcccatgatgaaatatcactaataaatcctgtatatttagatattatgctagccatgtaatcagatttatttaattgggtggggcaggtgtgtatttactttagaaaaaatgaaaaagacaagatttatgagaaatatttgaaggcagtacactctggccaactgttaccagttggtatttctacaagttcagaatattttaaacctgatttactagacctgggaattttcaacatggtctaattatttactcaaagacatagatgtgaaaattttaggcaaccttctaaatctttttcaccatggatgaaactataacttaaagaataatacttagaagggttaattggaaatcagagtttgaaataaaacttggaccactttgtatacactcttctcacttgacattttagctatataatatgtactttgagtataacatcaagctttaacaaatatttaaagacaaaaaaatcacgtcagtaaaatactaaaaggctcatttttatatttgttttagatgttttaaatagttgcaatggattaaaaatgatgatttaaaatgttgcttgtaatacagttttgcctgctaaattctccacattttgtaacctgttttatttctttgggtgtaaagcgtttttgcttagtattgtgatattgtatatgttttgtcccagttgtatagtaatgtttcagtccatcatccagctttggctgctgaaatcatacagctgtgaagacttgcctttgtttctgttagactgcttttcagttctgtattgagtatcttaagtactgtagaaaagatgtcacttcttcctttaaggctgttttgtaatatatataaggactggaattgtgtttttaaagaaaagcattcaagtatgacaatatactatctgtgttttcaccattcaaagtgctgtttagtagttgaaacttaaactatttaatgtcatttaataaagtgaccaaaatgtg

SEQ ID NO: 4593 - DNA, 2028 bp, Homo sapiens
ttcagttcacacgtggcgccagcggaggcaggttgatgtgtttgtgcttccttctacagccaatatgaaaaggcctagtaagtggggtcgggaggcgggcgtggagggacccacgtctggaagttgctgcagccaccacgacgctcttctacggctacggctttgtctctgctgagttaaagaaagcaagtaaacgcatgacctgccataagcggtataaaatccaaaaaaaggttcgagaacatcatcgaaaattaagaaaggaggctaaaaagcggggtcacaagaagcctaggaaagacccaggagttccaaacagtgctccctttaaggaggctcttcttagggaagctgagctaaggaaacagaggcttgaagaactaaaacagcagcagaaacttgacaggcagaaggaactagaaaagaaaagaaaacttgaaactaatcctgatattaagccatcaaatgtggaacctatggaaaaggagtttgggctttgcaaaactgagaacaaagccaagtcgggcaaacagaattcaaagaagctgtactgccaagaacttaaaaaggtgattgaagcctccgatgttgtcctagaggtgttggatgccagagatcctcttggttgcagatgtcctcaggtagaagaggccattgtccagagtggacagaaaaagctggtacttatattaaataaatcagatctggtaccaaaggagaatttggagagctggctaaattatttgaagaaagaattgccaacagtggtgttcagagcctcaacaaaaccaaaggataaagggaagataaccaagcgtgtgaaggcaaagaagaatgctgctccattcagaagtgaagtctgctttgggaaagagggcctttggaaacttcttggaggttttcaggaaacttgcagcaaagccattcgggttggagtaattggtttcccaaatgtggggaaaagcagcattatcaatagcttaaaacaagaacagatgtgtaatgttggtgtatccatggggcttacaaggagcatgcaagttgtccccttggacaaacagatcacaatcatagatagtccgagcttcatcgtatctccacttaattcctcctctgcgcttgctctgcgaagtccagcaagtattgaagtagtaaaaccgatggaggctgccagtgccatcctttcccaggctgatgctcgacaggtagtactgaaatatactgtcccaggctacaggaattctctggaattttttactgtgcttgctcagagaagaggtatgcaccaaaaaggtggaatcccaaatgttgaaggtgctgccaaactgctgtggtctgagtggacaggtgcctcattagcttactattgccatccccctacatcttggactcctcctccatattttaatgagagtattgtggtagacatgaaaagcggcttcaatctggaagaactggaaaagaacaatgcacagagcataagagccatcaagggccctcatttggccaatagcatccttttccagtcttccggtctgacaaatggaataatagaagaaaaggacatacatgaagaattgccaaaacggaaagaaaggaagcaggaggagagggaggatgacaaagacagtgaccaggaaactgttgatgaagaagttgatgaaaacagctcaggcatgtttgctgcagaagagacaggggaggcactgtctgaggagactacagcaggtgaacagtctacaaggtcttttatcttggataaaatcattgaagaggatgatgcttatgacttcagtacagattatgtgtaacagaacaatggctttttatgattttttttttaacattttaagcagactgctaaactgttctctgtataagttatggtatgcatgagctgtgtaaattttgtgaatatgtattatattaaaaccaggcaacttggaatccctaaattctgtaaaaagacaattcatctcattgtgagtggaagtagttatctggaataaaaaaagaagatacctattg

SEQ ID NO: 4594 - DNA, 4269 bp, Homo sapiens
aggagtagggagaagggatgaggtgactttttgggcggggtggggggaacgtctgggcagccagggacctgcccattcactcccctttcccagccccgggagggcgcagcgcccgggtggggagcccgagccagcccaggccggctctggcctcctgacccagacagcgcagggcgcgagggatcgcgcggccgagcccgggtcgcgccgctcccagcatcggggccgctagccaagagttcgaggccttcccgatccggatgtgatgaaaaagagcaacagagggagaagtgtttcaggattgtaggagtggaagaggggaaagagaggcagagagggggaaggccccctcgcaggggagccggctggagtgagctggctggaaagagggggcggagtgcgcggagtcagagccgccaccgctgccgcagttgccgccactgcggcgtctgggctgagccggagggaggcgggaggacgcgcaggggcggccgccgccgtcgtcaggccaccggggcgaaaatgcggccgctgccggaggctcgctaactttccggggcggaagaggaggaggaggaggaggaaggggcttggagcgactacggggggatgcggagaagcagtcagttccctgcacccagcacctcacagcccttcctccgtgcgccctgccgggcggcgagctaggcggcagcggcgcggcgcgggctcggcggagcggcccatgtccggcgcgggcgaagccctcgctcccgggcccgtggggccgcagcgcgtggccgaggcgggcggcggccagctgggctccacagcccagggaaaatgtgataaagacaatactgagaaagatataactcaagctaccaatagccacttcacacatggagagatgcaagaccagtccatttggggaaatccttcggatggtgaactcattagaacccaacctcagcgcttgcctcagcttcagacttcagcccaggtgccaagtggtgaggaaataggcaagataaagaacggccacacaggtctgagcaatggaaatggaattcaccacggggccaaacacggatccgcagataatcgcaaactttcagcacctgtttctcaaaaaatgcatagaaaaattcagtccagcttgtctgtaaacagcgatatcagtaagaagagcaaagtaaatgctgtcttttcccaaaagacaggctcttcacctgaagattgttgtgtccactgtatcctggcttgcttgttctgcgaattcctgaccctttgcaacattgtcctgggacaagcgtcatgtggcatctgcacctcagaagcctgctgctgttgctgtggtgacgagatgggggatgattgtaactgcccttgtgatatggactgtggcatcatggatgcctgttgtgaatcatcagactgcttggaaatctgtatggaatgctgtggaatttgttttccttcataaatatttatcttttgtttgtgttaaaactggagagtgtttaaaaatttccttttggggggaagaaaagcacattgtaagattctcatgaaacaacatggaatttgcactgttaactcattattgtaagtaatctctgaaagcctttttactttaaccaaatctacatggtttaatatgtgaaattttaactactttaactagttttataaatttcttaatatgttacaataacttagggacattttgacaccccccttcccaaatgttaaatgccttctcctttttaccgatatttctgtttcttttaaccgttctcaggagcactttgctccaaatatattatttttcagtgtgtatttaaacgaggcagtttattttgatatgtatctattcatgattgaaaggaagcagtcttggccaggcacggtggcttacacctgtaaccctggcattttgggaggccaaggtgggcagattgcctgagctcaggagttcgagaccagccagggcaacatggtgaaaccccatctctactaaaatacaaaaagttagctgggcttggcggtgtgcgcctgtagtcccagctactcaggaggctgaggcaggagaattgcttgaacccgagaggcggaagttgcagtgagccgagattgtgccactgaactccaacctgcactccagcctgggcaacagagcgagactccatctctaaataaataaataaataaataaataaataaataaataaataaacaaaccagtctttattttaaaagaaactttaggaaacaaacccacataatagttgggaaccagtgttgatctctctcccttaccttctccacttgttcaacagactctgaatgccgactgtgtggactctcttcctcagactgtggggacagatacaattccactcctgtccacaggaacatgagatttagcagactaaggagatctgtaaagaatgaaccataccacaaggcatactgaagtgaggattataagagaaataaactcaaaatgctgttggaatatgcagagaattgctaccagaatattcagtaaggtttcagggagaatgtggcatttgaggactctcttagaatgagtgattcacctgctatttaaatgaattatttagatttttgacaaagatttaggtggacaccctaaactgtgtgtgcctttaaccagttaaaagaacagtgccttcagcatacttttttattagttgtaggaatacagctttttgaaaaagctataaagtttaaattaactaaaaatatgcattttcttacacataatttaaatgttatcatacttttttgatgaaaacataatgccttagtaaaatagctctatttaataaagaagattgagtactctgacacatttcatttaaattaggaaatttttaatattaaaatcccagtgttctgagttattgaaaggctttcttttattttgagagctttaggtctttttgggatgagaacattttagttgtttagtttgtttcttaagcagtgctattttttgtaaacacagataaatggaaaccattcttttcaatgcagaagaaatctagatatcccctactgtgaccaaatttctgtattacgattttatgttaaattaaactaatatggcaggttataatgatccttaagtgtaaagaaatcagtcaattacaagagtaattgtatagttattgagacctatagtgtgtggcttagatgaaagggagagtaaattttcataccatgctctctcctactcagtttgatctctctaaaattgtagtttggtttgatttaatataattcttagtagaaattttgaaagtatgctttgggattaataattatttttaatttttctggctgaatatcaaattgatagtaacaacagaagcataattttaggaaggctttcgcaaacctagccttttaagagaggtttttaacctgaagcatgagaatatatcacctgtggtttttcctttgagatgaaacgtagtttctagttatatcattacttaaagggcttaaaaagaaaaaacttagcaaacttttgaatctttcttttattgctatttacacatacatacacacatacaaaacctttaaattttgggatctgaatataattctggtaaacagctgtcttcatttttctcctctaaagaacttaattcatttgttacataaaatataaggaaatctttatactattttacagtaaccacaatctaaatatttacatatacccaaaattaacttatgctcatatattaggatgtgagaatatcatctgtttatggacacatgaaacctcctaatgacctggaattgttagaatatttgactttttatatgcaaagtttttcaaccaagtggtttgtctaatatttaaacatgtactggcacaatttgtgatgaaaatattagcacatttgcaataatgtttctccataacagagaatgttaatggataccagaattttatttttgtatttatgttcatagtacttttcctcttgtctactccagacagttattccataaagcatttgtataattaaaaggaaaacagaaaaaggaaaagtaggcaaatgtgaaaatagtttcaatatatcttatgatttcttaatgtaaaatgttttgttgaagtatatggctatcatgactaagtgctagaatttatagttacaggcggtgtccttttaaatgtggaaaggcttttaaaatattttaaaactggacctgtattatcctgaatacactattttgaaaattttt

SEQ ID NO: 4595 - DNA, 2889 bp, Homo sapiens
gaagaggttcggcggctgatggcggatcaggatcggaagcctgcgtaactttctcccttgatccgggagtctttccactggattcacaatgacatcctttcaagaagtcccattgcagacttccaactttgcccatgtcatctttcaaaatgtggccaagagttaccttcctaatgcacacctggaatgtcattacaccttaactccatatattcatccacatccaaaagattgggttggtatattcaaggttggatggagtactgctcgtgattattacacgtttttatggtcccctatgcctgaacattatgtggaaggatcaacagtcaattgtgtactagcattccaaggatattaccttccaaatgatgatggagaattttatcagttctgttacgttacccataagggtgaaattcgtggagcaagtacacctttccagtttcgagcttcttctccagttgaagagctgcttactatggaagatgaaggaaattctgacatgttagtggtgaccacaaaagcaggccttcttgagttgaaaattgagaaaaccatgaaagaaaaagaagaactgttaaagttaattgccgttctggaaaaagaaacagcacaacttcgagaacaagttgggagaatggaaagagaacttaaccatgagaaagaaagatgtgaccaactgcaagcagaacaaaagggtcttactgaagtaacacaaagcttaaaaatggaaaatgaagagtttaagaagaggttcagtgatgctacatccaaagcccatcagcttgaggaagatattgtgtcagtaacacataaagcaattgaaaaagaaaccgaattagacagtttaaaggacaaactcaagaaggcacaacatgaaagagaacaacttgaatgtcagttgaagacagagaaggatgaaaaggaactttataaggtacatttgaagaatacagaaatagaaaataccaagcttatgtcagaggtccagactttaaaaaatttagatgggaacaaagaaagcgtgattactcatttcaaagaagagattggcaggctgcagttatgtttggctgaaaaggaaaatctgcaaagaactttcctgcttacaacctcaagtaaagaagatacttgttttttaaaggagcaacttcgtaaagcagaggaacaggttcaggcaactcggcaagaagttgtctttctggctaaagaactcagtgatgctgtcaacgtacgagacagaacgatggcagacctgcatactgcacgcttggaaaacgagaaagtgaaaaagcagttagctgatgcagtggcagaacttaaactaaatgctatgaaaaaagatcaggacaagactgatacactggaacacgaactaagaagagaagttgaagatctgaaactccgtcttcagatggctgcagaccattataaagaaaaatttaaggaatgccaaaggctccaaaaacaaataaacaaactttcagatcaatcagctaataataataatgtcttcacaaagaaaacggggaatcagcagaaagtgaatgatgcttcagtaaacacagacccagccacttctgcctctactgtagatgtaaagccatcaccttctgcagcagaggcagattttgacatagtaacaaaggggcaagtctgtgaaatgaccaaagaaattgctgacaaaacagaaaagtataataaatgtaaacaactcttgcaggatgagaaagcaaaatgcaataaatatgctgatgaacttgcaaaaatggagctgaaatggaaagaacaagtgaaaattgctgaaaatgtaaaacttgaactagctgaagtacaggacaattataaagaacttaaaaggagtctagaaaatccagcagaaaggaaaatggaaggtcagaattcccagagtcctcaatgtttcaaaacatgctcagagcaaaatggttatgttctcacattgtcaaatgcacaaccagttctgcaatatggtaatccttatgcatctcaggaaacaagagatggagcagatggtgctttttacccagatgaaatacaaaggccacctgtcagagtcccctcttggggactggaagacaatgttgtctgcagccagcctgctcgaaactttagtcggcctgatggcttagaggactctgaggatagcaaagaagatgagaatgtgcctactgctcctgatcctccaagtcaacatttacgtgggcatgggacaggcttttgctttgattccagctttgatgttcacaagaagtgtcccctctgtgagttaatgtttcctcctaactatgatcagagcaaatttgaagaacatgttgaaagtcactggaaggtgtgcccgatgtgcagcgagcagttccctcctgactatgaccagcaggtgtttgaaaggcatgtgcagacccattttgatcagaatgttctaaattttgactagttactttttattatgagttaatatagtttagcagtaaaaaaaaaaaaaaaaaccacacctaaaatagaccactgaggagaccatagagcggatgctttcatgcaccctttactgcactttctgaccaggagctactttgagtttggtgttactaggatcagggtcagtctttggcttatcaataaattttaatctctgttaatcttacctgctttaaaaaaaagttcttgtgtgttcgtatctttatttattccctagtttgcagaactgtctgaataaaggatacaaggattatttcaatgttactgcactgaaaaacgtgtatgtattagtgtgctagattatttagcagaatattcacaagtttctgttgaccttgttgattgagcatgactactaaatattatgtaataaaaagcatttgtcataac

SEQ ID NO: 4596 - DNA, 4919 bp, Homo sapiens
gagcaagcggagcggccgtcgcccaagccaagccgcgctgccaaccctcccgcccgcccgcgctcctgtccgccgtgtctagcagcggggcccagcatggtcatggcggatggcccgaggcacttgcagcgcgggccggtccgggtggggttctacgacatcgagggcacgctgggcaagggcaacttcgctgtggtgaagctggggcggcaccggatcaccaagacggaggtggcaataaaaataatcgataagtctcagctggatgcagtgaaccttgagaaaatctaccgagaagtacaaataatgaaaatgttagaccaccctcacataatcaaactttatcaggtaatggagaccaaaagtatgttgtaccttgtgacagaatatgccaaaaatggagaaatttttgactatcttgctaatcatggccggttaaatgagtctgaagccaggcgaaaattctggcaaatcctgtctgctgttgattattgtcatggtcggaagattgtgcaccgtgacctcaaagctgaaaatctcctgctggataacaacatgaatatcaaaatagcagatttcggttttggaaatttctttaaaagtggtgaactgctggcaacatggtgtggcagccccccttatgcagccccagaagtctttgaagggcagcagtatgaaggaccacagctggacatctggagtatgggagttgttctttatgtccttgtctgtggagctctgccctttgatggaccgactcttccaattttgaggcagagggttctggaaggaagattccggattccgtatttcatgtcagaagattgcgagcaccttatccgaaggatgttggtcctagacccatccaaacggctaaccatagcccaaatcaaggagcataaatggatgctcatagaagttcctgtccagagacctgttctctatccacaagagcaagaaaatgagccatccatcggggagtttaatgagcaggttctgcgactgatgcacagccttggaatagatcagcagaaaaccattgagtctttgcagaacaagagctataaccactttgctgccatttatttcttgttggtggagcgcctgaaatcacatcggagcagtttcccagtggagcagagacttgatggccgccagcgtcggcctagcaccattgctgagcaaacagttgccaaggcacagactgtggggctcccagtgaccatgcattcaccgaacatgaggctgctgcgatctgccctcctcccccaggcatccaacgtggaggccttttcatttccagcatctggctgtcaggcggaagctgcattcatggaagaagagtgtgtggacactccaaaggtcaatggctgtctgcttgaccctgtgcctcctgtcctggtgcggaagggatgccagtcactgcccagcaacatgatggagacctccattgacgaagggctggagacagaaggagaggccgaggaagaccccgctcatgcctttgaggcatttcagtccacacgcagcgggcagagacggcacactctgtcagaagtgaccaatcaactggtcgtgatgcctggggcagggaaaattttctccatgaatgacagcccctcccttgacagtgtggactctgagtatgatatggggtctgttcagagggacctgaactttctggaagacaacccttcccttaaggacatcatgttagccaatcagccttcaccccgcatgacatctcccttcataagcctgagacctaccaacccagccatgcaggctctgagctcccagaaacgagaggtccacaacaggtctccagtgagcttcagagagggccgcagagcatcagatacctccctcacccagggaattgtagcatttagacaacatcttcagaatctggctagaaccaaaggaattctagagttgaacaaagtgcagttgttgtatgaacaaataggaccggaggcagaccctaacctggcgccggcggctcctcagctccaggaccttgctagcagctgccctcaggaagaagtttctcagcagcaggaaagcgtctccactctccctgccagcgtgcatccccagctgtccccacggcagagcctggagacccagtacctgcagcacagactccagaagcccagccttctgtcaaaggcccagaacacctgtcagctttattgcaaagaaccaccgcggagccttgagcagcagctgcaggaacataggctccagcagaagcgactctttcttcagaagcagtctcaactgcaggcctattttaatcagatgcagatagcagagagctcctacccacagccaagtcagcagctgccccttccccgccaggagactccaccgccttctcagcaggccccaccgttcagcctgacccagcccctgagccccgtcctggagccttcctccgagcagatgcaatacagccctttcctcagccagtaccaagagatgcagcttcagcccctgccctccacttccggtccccgggctgctcctcctctgcccacgcagctacagcagcagcagccgccaccgccaccaccccctccaccaccacgacagccaggagctgccccagcccccttacagttctcctatcagacttgtgagctgccaagcgctgcttcccctgcgccagactatcccactccctgtcagtatcctgtggatggagcccagcagagcgacctaacggggccagactgtcccagaagcccaggactgcaagaggccccctccagctacgacccactagccctctctgagctacctggactctttgattgtgaaatgctagacgctgtggatccacaacacaacgggtatgtcctggtgaattagtctcagcacaggaattgaggtgggtcaggtgaaggaagagtgtatgttcctatttttattccagccttttaaatttaaagcttattttcttgccctctccctaacggggagaaatcgagccacccaactggaatcagagggtctggctggggtggatgttgcttcctcctggttctgccccaccacaaagttttctgtggcaagtgctggaacatagttgtaggctgaggctcctgcccttcggtcgagtggagcaagctctcgagggcagcactgacaaatgtgttcctaagaagacattcagacccaggtgttatgcaggattacatccgtttattatcaagggcaaccttggtgaaagcagaaagggtgtgtgctattgcatatatatgggggaaaaggcaatatatttttcactgaagctgagcaaccacatattgctacaaggcaaatcaagaagacatcaggaaatcagatgcacaggaaataaaggaaagctgtgctttgtcattgaatcctaagttcttagctgctgatgcaagttgtcccccaaggccatcacaaagcagtggggcatgagctgtgtttcaggggccactaaataacagctggtactgaccccagaaaccgccttcatctccattcggaagcaggtgacacaccccttcagaaggtgccctgggttgccgagtgtcagaatatactcaggactccagaggtgtcacacgtggaactgacaggagacccgccaccgtggaggcagggggcaagaaactcaagaacgcatcaagagcaccagccctgggccagggaagacaggctcttcctgcagtttctcgtggacactgctggcttgcgggcagtcggtctccagggtacctgttgtctcttttccgatgtaataactactttgaccttacactatatgttgctagtagtttattgagctttgtatatttggacagtttcatatagggcttagagattttaaggacatgataaatgaacttttctgtcccatgtgaagtggtagtgcggtgcctttcccccagatcatgctttaattctttcttttctgtagaaaccaacagtttccatttatgtcaatgctaaatccaaagtcacttcagagtttgttttccaccatgtgggaatcagcattcttaatttcgttaaagttttgacttgtaatgaaatgttcaagtattacagcaatattcaaagaaagaaccacagatgtgttaaccatttaagcagatcatctgccaaacattatattactaataaaacttaaccaacacttacaattcagtcatcaaagtaagtaaaaattagatgctacagctagctaactgtatccctagaaatgatgaataatttgccatttggacagttaacatccaggtgttacaaagtcagtgttaattctaaagatgatcatttctgccctttagaatggcttgtcccatcagcagatgaatgtgttaagcacaaagcatcttccttaaagcacaaagagagggactaactgatgctgcatctagaaaacacctttaagttgcctttcctctttgtagttagcgttcaggcaggtgacgtgtggaaagtctagggggttccattctggccatgcgagcccagctcctaccaacgtcggtaacttgagcagtccctgttgctggccagagactgcctggtcgccagcgctcaccatgggtgccaggatgcttcgcagaggcactgtgctcacggttggacttggtgtcagtgggaaagggcagtgtggggactgtcatttttgtgatttaataacacacagtgaaaatccaggaagaatgaattaagcttcttctgggagttgtttattcctgctcgtgcttaagattgatgatttcgtgaaataaagaacatcatttcatttaagagatcatttcattaagatctctaatctgttttgagtctttacaaaatagccagttataaaatggggcttgatttgtttagactgaaggaagacgttttcccaaaatatactacagaag

SEQ ID NO: 4597 - DNA, 2179 bp, Homo sapiens
agccgcgctgccaaccctcccgcccgcccgcgctcctgtccgccgtgtctagcagcggggcccagcatggtcatggcggatggcccgaggcacttgcagcgcgggccggtccgggtggggttctacgacatcgagggcacgctgggcaagggcaacttcgctgtggtgaagctggggcggcaccggatcaccaagacggaggtggcaataaaaataatcgataagtctcagctggatgcagtgaaccttgagaaaatctaccgagaagtacaaataatgaaaatgttagaccaccctcacataatcaaactttatcaggtaatggagaccaaaagtatgttgtaccttgtgacagaatatgccaaaaatggagaaatttttgactatcttgctaatcatggccggttaaatgagtctgaagccaggcgaaaattctggcaaatcctgtctgctgttgattattgtcatggtcggaagattgtgcaccgtgacctcaaagctgaaaatctcctgctggataacaacatgaatatcaaaatagcagatttcggttttggaaatttctttaaaagtggtgaactgctggcaacatggtgtggcagccccccttatgcagccccagaagtctttgaagggcagcagtatgaaggaccacagctggacatctggagtatgggagttgttctttatgtccttgtctgtggagctctgccctttgatggaccgactcttccaattttgaggcagagggttctggaaggaagattccggattccgtatttcatgtcagaagattgcgagcaccttatccgaaggatgttggtcctagacccatccaaacggctaaccatagcccaaatcaaggagcataaatggatgctcatagaagttcctgtccagagacctgttctctatccacaagagcaagaaaatgagccatccatcggggagtttaatgagcaggttctgcgactgatgcacagccttggaatagatcagcagaaaaccattgagtctttgcagaacaagagctataaccactttgctgccatttatttcttgttggtggagcgcctgaaatcacatcggagcagtttcccagtggagcagagacttgatggccgccagcgtcggcctagcaccattgctgagcaaacagttgccaaggcacagactgtggggctcccagtgaccatgcattcaccgaacatgaggctgctgcgatctgccctcctcccccaggcatccaacgtggaggccttttcatttccagcatctggctgtcaggcggaagctgcattcatggaagaagagtgtgtggacactccaaaggtcaatggctgtctgcttgaccctgtgcctcctgtcctggtgcggaagggatgccagtcactgcccagcaacatgatggagacctccattgacgaagggctggagacagaaggagaggccgaggaagaccccgctcatgcctttgaggcatttcagtccacacgcagcgggcagagacggcacactctgtcagaagtgaccaatcaactggtcgtgatgcctggggcagggaaaattttctccatgaatgacagcccctcccttgacagtgtggactctgagtatgatatggggtctgttcagagggacctgaactttctggaagacaacccttcccttaaggacatcatgttagccaatcagccttcaccaaaatctctgaaggggaaagaagtggagagaaaggtttgcttcacttcggggactgcagtttgagaaataaaagggatacagagatatctgcactttgtagaaagggcaagattatttgcttatatctgaagggaggtgggtggttttgctggatgtttggtctgaaagagttacttttgataaagttaatctaactgtagttatattttctgtgtgcttttttttaattactaagaaaaaaattggtgagttcagtagctttggtattatgagtgcaaatcataatagctccaatgtgaaaaaaaaaatcaaaagtataacttgtcacttaatgttagaaaattgcctaaaatgcagtgtaataaataatctctgtaccaaatagtaatttaaatggggtaattttctgcaaggaaaatgtactgtttttatgtttccaaccctcttgaattaaaataaaaacaacttcttttct

SEQ ID NO: 4598 - DNA, 3008 bp, Homo sapiens
gatcttgagagcaaaggccccagcacccgctgaatgaatgattcatcctttacgggatctatgctttatcgctttttaagatttttatgcaccaacatagaaagcccatgtagaaattctgcagacttaaggttttcattttatttgttactcattaagaggaatacaattagaaagaaagaagccaggtctcccgttcccacccctcagtggcatatcctttcgtggggcttgaggacaaagcctttcccaccaccaacacacagcacaaagctagatctgaacacgtttctagaaactccaagtacagagtcaaagctacttgcctataaggaatcaagcagctaccctaaataaatgccaggcaaaacacgtttctgctttgcagaagaacagattctggatgagcagagtgaggtggactcgcaaggagaaggacccacctggagtctgtgctgcaggtactgggtctccaggctctgccgtggggacagctggggatgcacgctggcagggagagtggagacgctttcctgctgctgagaaacttcttcctgaggagcaagggggtggaaacaattttcaattccccatggggaaaaacgtctcagttcttagctgaagcacctttgcaatgtccaataggaataccaactccactgagacttattaatactcaaagcttttacagagccagtaggctgagggctcattactctgcagaacatttatgcatgtattatctctagttaacaattacctagtcagtactagagcaaagactcttggtgtcaccaggaggctatggccttcatgtgggcctcgaactataatcctcttggatgcactgaaaataggctcaaaataaaatcaggtaagtagcagtatttattgtatttttagtatgaataatccacttgtagtatttactaaagtgataccacatcaaaagtagtggtgagaagcttctcatttgggtgtagttcatttgtgtatttttcatttgggtgtgtgtgtggcaggagaaggggagttcaagggcgactgtaagaggtcactcatctgtactctgccctgtgagccaaaaacagcttgagagtgtccaggcctccatctggtattgatcacttggaagcagcgtggatgggttgaacccgtcagtggcaggtggcagcaacaaggcaaagaagctgtgggttttcccaaacagcctgtttgctccaggactggaggaaatcctctaagtgaaaatgaccatcttcaggacaaactcacacctcatcctcacagagccattgagggaagggcccaaggtacccacctgagggcagctgctagcaaggtcctggagctgaggagccgccggcgccaggttagggtctgcctccggtcctatttgttcatacaacaactgcactttgttcaactctagaattcctttggttctagccagattctgaagatgttgtctaaatgctacaattcctgaaagaaagcaccaagaccaaacagtttaactaaaatacaaggcctttcagtgaccacaggtgaccacaccaacatggcaagaaactgctctcctacgacgcgagtttcaaaaagcagaggaggaagtgctcaccctgggtgagggaggtatctgatgctctgcggccctctctgaagctcactggagacctgttgtggacctctcgtttctgggagctcagagcctgcatggctgggttggtaggtctcaggcttatgaagggagatgtcatgcggggtgaaggctgattggctaacatgatgtccttaagggaagggttgtcttccagaaagttcaggtccctctgaacagaccccatatcatactcagagtccacactgtcaagggaggggctgtcattcatggagaaaattttccctttaagagaaaacagaacagataaaaccaacagcaatagcatctccttggaacatagggtacaaagcataaccagcttgagttttgacagctaccatgtccttaatttccaatcaaaacatcttttcagagcccttttactggccaatttagtcatcttcaagtttagtggggaaaacactccagaagtggcatctgtaagatctcagccagtccaaaagagccagagtccctgatcaatcacgtggcacccagatgaatcctggggactatgggagccaactcagagacatttcaattcacctttgatagctgctgccaggctgtgtctgctatacctgctgaatctaatccataaaggaataagctatcgactcaattttaggtgttggctggcatcgtgaccacttgttggcaattggagtatgacatgatgccatgaagactcaagctagtgtcgctcctctaccgtacctgccccaggcatcacgaccagttgattggtcacttctgacagagtgtgccgtctctgcccgctgcgtgtggactgaaatgcctcaaaggcatgagcggggtcttcctcggcctctccttctgtctccagcccttcgtcaatggaggtctccatcatgttgctgggcagtgactggcatcccttccgcaccaggacaggaggcacagggtcaagcagacagccattgacctaaacgccaggggagagaggaaactcagtttctgcactgctgagacagaaaaatccacaaaggaaaacatgtcaagacttgtggcgaactagaaattaagtaaaatatttaaacatgcacatatttattatgcatgacaacacatagattagaagtgaaggcaagtcaactgcaggactcagaactctgagacagaagcccatgatgacccaaactggcactgctgcccaggtttctctgagtcatcattattacaataaacaacttttttagtggtttccagaagaacaggggtatattagtttgaggactaccagttattatttttttttaaataagggaaatgaagagggggaagatgagttgtttttttttttttaactacttggctcattgct

SEQ ID NO: 4599 - DNA, 4608 bp, Homo sapiens
ccctcgcgctactgcgggagcagcgtcctcccgggccacggcgcttcccggccccggcgtccccggaccatggcgctctccgggctcttctctagctctcagcggctgcgaagtctgtaaacctggtggccaagtgattgtaagtcaggagactttccttcggtttctgcctttgatggcaagaggtggagattgtggcggcgattacagaaaacatctgggaagacaagttgctgtttttatgggaatcgcaggcttggaagagacagaagcaattccagaaataaattggaaattgaagatttaaacaatgttgttttaaaatattctaacttcaaagaatgatgccagaaacttaaaaaggggctgcgcagagtagcaggggccctggagggcgcggcctgaatcctgattgcccttctgctgagaggacacacgcagctgaagatgaatttgggaaaagtagccgcttgctactttaactatggaagagcagggccacagtgagatggaaataatcccatcagagtctcacccccacattcaattactgaaaagcaatcgggaacttctggtcactcacatccgcaatactcagtgtctggtggacaacttgctgaagaatgactacttctcggccgaagatgcggagattgtgtgtgcctgccccacccagcctgacaaggtccgcaaaattctggacctggtacagagcaagggcgaggaggtgtccgagttcttcctctacttgctccagcaactcgcagatgcctacgtggacctcaggccttggctgctggagatcggcttctccccttccctgctcactcagagcaaagtcgtggtcaacactgacccagtgagcaggtatacccagcagctgcgacaccatctgggccgtgactccaagttcgtgctgtgctatgcccagaaggaggagctgctgctggaggagatctacatggacaccatcatggagctggttggcttcagcaatgagagcctgggcagcctgaacagcctggcctgcctcctggaccacaccaccggcatcctcaatgagcagggtgagaccatcttcatcctgggtgatgctggggtgggcaagtccatgctgctacagcggctgcagagcctctgggccacgggccggctagacgcaggggtcaaattcttcttccactttcgctgccgcatgttcagctgcttcaaggaaagtgacaggctgtgtctgcaggacctgctcttcaagcactactgctacccagagcgggaccccgaggaggtgtttgccttcctgctgcgcttcccccacgtggccctcttcaccttcgatggcctggacgagctgcactcggacttggacctgagccgcgtgcctgacagctcctgcccctgggagcctgcccaccccctggtcttgctggccaacctgctcagtgggaagctgctcaagggggctagcaagctgctcacagcccgcacaggcatcgaggtcccgcgccagttcctgcggaagaaggtgcttctccggggcttctcccccagccacctgcgcgcctatgccaggaggatgttccccgagcgggccctgcaggaccgcctgctgagccagctggaggccaaccccaacctctgcagcctgtgctctgtgcccctcttctgctggatcatcttccggtgcttccagcacttccgtgctgcctttgaaggctcaccacagctgcccgactgcacgatgaccctgacagatgtcttcctcctggtcactgaggtccatctgaacaggatgcagcccagcagcctggtgcagcggaacacacgcagcccagtggagaccctccacgccggccgggacactctgtgctcgctggggcaggtggcccaccggggcatggagaagagcctctttgtcttcacccaggaggaggtgcaggctccgggctgcaggagagagacatgcagctgggcttcctgcgggctttgcggagctgggccccgggggtgaccagcagtcctatgagtttttccacctcaccctccaggccttctttacagccttcttcctcgtgctggacgacagggtgggcactcaggagctgctcaggttcttccaggagtggatgccccctgcgggggcagcgaccacgtcctgctatcctcccttcctcccgttccagtgcctgcagggcagtggtccggcgcgggaagacctcttcaagaacaaggatcacttccagttcaccaacctcttcctgtgcgggctgttgtccaaagccaaacagaaactcctgcggcatctggtgcccgcggcagccctgaggagaaagcgcaaggccctgtgggcacacctgttttccagcctgcggggctacctgaagagcctgccccgcgttcaggtcgaaagcttcaaccaggtgcaggccatgcccacgttcatctggatgctgcgctgcatctacgagacacagagccagaaggtggggcagctggcggccaggggcatctgcgccaactacctcaagctgacctactgcaacgcctgctcggccgactgcagcgccctctccttcgtcctgcatcacttccccaagcggctggccctagacctagacaacaacaatctcaacgactacggcgtgcgggagctgcagccctgcttcagccgcctcactgttctcagactcagcgtaaaccagatcactgacggtggggtaaaggtgctaagcgaagagctgaccaaatacaaaattgtgacctatttgggactttggaaatcagtagacaccatatgcttcaaaaaacaggggctattaaaatgacatcaggagccagaaagtctcatggctgtgctttctcttgaagtttatacaacaaccagatcaccgatgtcggagccagactgggaaaaaacaaaataacaagtgaaggagggaagtatctcgccctggctgtgaagaacagcaaatcaatctctgaggttgggatgtggggcaatcaagttggggatgaaggagcaaaagccttcgcagaggctctgcggaaccaccccagcttgaccaccctgagtcttgcgtccaacggcatctccacagaaggaggaaagagccttgcgagggccctgcagcagaacacgtctctagaaatactgtggctgacccaaaatgaactcaacgatgaagtggcagagagtttggcagaaatgttgaaagtcaaccagacgttaaagcatttatggcttatccagaatcagatcacagctaaggggactgcccagctggcagatgcgttacagagcaacactggcataacagagatttgaacttgtttggaacttgtcataaaatcgatcagtttggtgaattgcaaccaacaatatttaaaaagaaaacagaacagaacaaaatatcaggatgcaatgtgcatgcctaaatggaaacctgataaaaccagaggaggccaaagtctatgaagatgagaagcggattatctgtttctgagaggatgctttcctgttcatggggtttttgccctggagcctcagcagcaaatgccactctgggcagtcttttgtgtcagtgtcttaaaggggcctgcgcaggcgggactatcaggagtccactgcctccatgatgcaagccagcttcctgtgcagaaggtctggtcggcaaactccctaagtacccgctacaattctgcagaaaaagaatgtgtcttgcgagctgttgtagttacagtaaatacactgtgaagagactttattgcctattataattatttttatctgaagctagaggaataaagctgtgagcaaacagaggaggccagcctcacctcattccaacacctgccatagggaccaacgggagcgagttggtcaccgctcttttcattgaagagttgaggatgtggcacaaagttggtgccaagcttcttgaataaaacgtgtttgatggattagtattatacctgaaatattttcttccttctcagcactttcccatgtattgatactggtcccacttcacagctggagacaccggagtatgtgcagtgtgggatttgactcctccaaggttttgtggaaagttaatgtcaaggaaaggatgcaccacgggcttttaattttaatcctggagtctcactgtctgctggcaaagatagagaatgccctcagctcttagctggtctaagaatgacgatgccttcaaaatgctgcttccactcagggcttctcctctgctaggctaccctcctctagaaggctgagtaccatgggctacagtgtctggccttgggaagaagtgattctgtccctccaaagaaatagggcatggcttgcccctgtggccctggcatccaaatggctgcttttgtctcccttacctcgtgaagaggggaagtctcttcctgcctcccaagcagctgaagggtgactaaacgggcgccaagactcaggggatcggctgggaactgggccagcagagcatgttggacaccccccaccatggtgggcttgtggtggctgctccatgagggtgggggtgatactactagatcacttgtcctcttgccagctcatttgttaataaaatactgaaaacactc

SEQ ID NO: 4600 - DNA, 4732 bp, Homo sapiens
gatgcccccgccaggggggatgcccggcaccgtgcgtccgcggaggccaagatgcagcggccaggggccggcagcctgcgaggggaggcagcttccgccggggccgggctgctgcacagtctgagcggccgggactgcgcgcttcagagcctggagcatcccagtcgctggggccgagacgccgccgccgccgccgttcccgctttctcccgcgagccgggccagtagctttgctaggctggccttcccgtggaggcgttttccagccccagcgcggggagacatgcctgaatttgggagcgatgtgactctcagcctcccacttcacccggggacgcaggcttgctgaagcccgagacaggagggggaccatgggagggacgcaagtcaaatgcctgacttcacccagtccaatccacagtgcaaagagcgagtccattataacccagtcagaagagaaggcagattttgtgattattcccgctgaaggaatagagaacagaacagaagggacagattctccattatctcgagactggcggccagggagcctggaacctatctggagacctcatgggaagaacagctgttggaacaacaagaatatttagaaaaagaaatggaggaagcaaagaaaatgatatcaggactacaggccttactgctcaatggatccttacctgaagatgaacaggagaggcccttggccctctgtgaaccaggtgtcaatcccgaggaacaactgattataatccaaagtcgtctggatcagagtatggaggagaatcaggacttaaagaaggaactgctgaaatgtaaacaagaagccagaaacttacaggggataaaggatgccttgcagcagagattgactcagcaggacacatctgttcttcagctcaaacaagagctactgagggcaaatatggacaaagatgagctgcacaaccagaatgtggatctgcagaggaagctagatgagaggaaccggctcttgggagaatataaaaaagagctggggcagaaggatcgccttcttcagcagcaccaggccaagttagaagaagcactccggaaactctctgatgtcagttaccaccaggtggatctagagcgagagctagaacacaaagatgtcctcttggctcactgtatgaaaagagaggcagatgaggcgaccaactacaacagtcacaactctcaaagcaatggttttctccttccaacggcaggaaaaggagctacttcagtcagcaacagagggaccagcgacctgcagcttgttcgagatgctctccgcagcctgcgcaacagcttcagtggccacgatcctcagcaccacactattgacagcttggagcagggcatttctagcctcatggagcgcctgcatgttatggagacgcagaagaaacaagaaagaaaggttcgggtcaagtcacccagaactcaagtaggtagtgaataccgggagtcctggccccctaactcaaagttgcctcactcacagagctctccaactgtcagcagcacctgtactaaagtgctctatttcactgaccggtcacttacgcccttcatggtcaatataccaaagaggttggaggaggtgacgttaaaggattttaaagcagctattgatcgggaaggaaatcaccggtatcacttcaaagcactggatcctgagtttggcactgtcaaagaggagattttccatgatgatgatgccatccctggatgggaagggaaaattgtagcttgggtggaagaagaccatggagagaattaatgccaagtatcagattgagggcttatggaacctggtcactccctggctgcttcactcaggaaagggaactaaaaccagaatacactaagaagtttctagtttgtgtgccaaaacagaagcttctccaagcatgatggccacaggtcagtcctctttctgtgcctggcatatctggtacttaaaattctgtccaaatgtagaccatgggttcatctggagttccttgtccgtgggaacacagtgttctattctactctgaggacaacaaaccgaaggccttaaacgatggggatggatgatcccgcctctgtaggggcatggctgctattatctggaaattaggaattggatgcatcattcctgtgtgttacagtattattttaattggcctcaatggttgcagcaatcagagtcccagcgtttgtactcacagacaaggcaaaggtaccagcttttctgtttctttgaacctactgcaaaccaagaataactcatgaggtggtaccaaagatgaaagcccagacttcagtaatcttttgaaccagacgtggatggtgctgaattgttgcttggatggaaaaagggctgcccatgttgtgctacactatgctaaaactgtaatttagtaagaccttgggctgcctcttctgtcttaactggttctgcagcttgtccttttgcccacatagggcctatttcatgtactgttagttttctctggggactctttaactttagagccatttctttttcttcaaactgatgaacttttgtttgaaaggcataaggagtgaaaagctccttgaaaatccaggcgggtatggaaaggtgctgctacccatatctttttgactttctttgtttcatgactttaactcatggcatctcctttgtagtaaaaggagacagaccattaatttcagcatttctttgtgatttataagtactgagcatgaagtacttgtctgcccctcatttcaaggccagagttattttctatttatgtattagtctaggctgatcttttagggcacaatagaaaccatggggcgtggagcatgagttgtgaatggcagggatcattctgggtaaaaaaaacctagaatcatttctgatgtgcaacattgtcaagtgaagaagctaacagttcaactaccgagattatttgataacctgggttttctcattcatccatcaagcaccatcaaccagtcagccattattatttatatatgtattaccaaaagcagtctatctgcctgtgacctccaatgtacactgccaaacacaagagtaggacacatctgttctgggttcttgacctatctgtctccaattcatctccccttttcagccatttcaacaaactactctttggagctctgagatgacatcttgttgttttatatagatgtatcttttaaaaatagttcacgtttggagaattcttttgtactcatttgctttttgtctgagaaccatgtctatttttataactggagtgtgagttctgtatcttctcacattctgtatactgtatccattttctagagaacccagtagcttttatacagtctcttcttaccaccccttgtggtttcagaacaagctttattttattacgagtatattaatgacaactaattcctgttccaattctacctgttttagttgtgaaggtagttttgtgtaatccagttgattgctcctctggcagagagaaggagctcaaaagatacttgatgtctttcatgtaagtttacctggtcttttcctattgaagaatttttcatcagaaacgactgggaaagtttgggaaagtcagcaaaagaaagaatgcatttcgaaagcaaacagaagaaaaaagtatattctcacagtttttccccaggaagtctggagaaaaagtcctcatgtcaccaatttctctgttgcatgaattttagtgttttgctataagacagcatgagggctatcaggccaaaattcattattgtatttccaatacagtttgtcttgaatgtctgtctcttaaaccagtttttacttgtcagttttctctcagcaaacagtcttactattatgtggaatttaacttttcagagaaaatttccaaagtcctctaccttatttggcttttatctgtgtcttttggaaaaggagctgcatggcctcagtgcctccataaaaagcttaagttgagttcatgggagaacattaagatcgttttttttcccttttagctcggtaatctcatgtaccacaggtaatgaccaagcatctctgctagaggatgtaactctcataactcctgtgtaaaatgaggatcctgttggtgatcctcattccagtttccaaagcgagaggagccttctgagcagaagtatgcaagactgattctgtttggaacagtttcctatttggctgcattctaggaggcctcctgacttattcatagtattgtcgcctggtggcattggtgtggggtagcttgtcctgctacttgctaaagttctctttctttgagaaaactgaggaaccagaatgcttagagttcataaaataatctctaaaccatgttaggttaaaacaaaatgaccatctcacaaaaacgagtttagttgaatgctcaattccttacaaaatcttcatttaaggctgagtgtggtggctcatgcctgtaattccagcactttgggaggccgaggcaggaagactgcttgagcccaggagttcaagaccagcctgggcaacataggaagactccgtctctacatagaaattttattataaaagtagctggggatggtggcacacacctgtagtcccagctactcaggaggttgaggtgggaagattgcttgagcccaggagtttgaggttgcagtgagctgatcatgccactgcactctagcctaggctacagagcaggaccccatctcc

SEQ ID NO: 4601 - DNA, 1523 bp, Homo sapiens
gtgcggaggtgctcctcgcagagttgtttctcgagcagcggcagttctcactacagcgccaggacgagtccggttcgtgttcgtccgcggagatctctctcatctcgctcggctgcgggaaatcgggctgaagcgactgagtccgcgatggagagagaaaaggaacagttccgtaagctctttattggtggcttaagctttgaaaccacagaagaaagtttgaggaactactacgaacaatggggaaagcttacagactgtgtggtaatgagggatcctgcaagcaaaagatcaagaggatttggttttgtaactttttcatccatggctgaggttgatgctgccatggctgcaagacctcattcaattgatgggagagtagttgagccaaaacgtgctgtagcaagagaggaatctggaaaaccaggggctcatgtaactgtgaagaagctgtttgttggcggaattaaagaagatactgaggaacatcaccttagagattactttgaggaatatggaaaaattgataccattgagataattactgataggcagtctggaaagaaaagaggctttggctttgttacttttgatgaccatgatcctgtggataaaatcgtattgcagaaataccataccatcaatggtcataatgcagaagtaagaaaggctttgtctagacaagaaatgcaggaggacctggaggtggcaattttggaggtagccccggttatggaggaggaagaggaggatatggtggtggaggacctggatatggcaaccagggtgggggctacggaggtggttatgacaactatggaggaggaaattatggaagtggaaattacaatgattttggaaattataaccagcaaccttctaactacggtccaatgaagagtggaaactttggtggtagcaggaacatggggggaccatatggtggaggaaactatggtccaggaggcagtggaggaagtgggggttatggtgggaggagccgatactgagcttcttcctatttgccatgggcttcactgtataaataggagaggatgagagcccagaggtaacagaacagcttcaggttatcgaaataacaatgttaaggaaactcttatctcagtcatgcataaatatgcagtgatatggcagaagacaccagagcagatgcagagagccattttgtgaatggattggattatttaataacattaccttactgtggaggaaggattgtaaaaaaaaatgcctttgagacagtttcttagctttttaattgttgtttctttctagtggtctttgtaagagtgtagaagcattccttctttgataatgttaaatttgtaagtttcaggtgacatgtgaaaccttttttaagatttttctcaaagttttgaaaagctattagccaggatcatggtgtaataagacataacgtttttcctttaaaaaaatttaagtgcgtgtgtagagttaagaagctgttgtacatttatgatttaataaaataattctaaagg

SEQ ID NO: 4602 - DNA, 5786 bp, Homo sapiens
ccccgttcccgattcctgtagtagcggctgtattgcagccgcctgccgaactgacccgggtctggggactggcccctctggcgccgttcggtttctcttattgccttcactgaggatgagtccctttgtggctctatgtggaccctgcggaatccaccggcgcagtttcatctagcgactggtcacccttgcaattatggatatttaaaagggtcagacagtgtggagggggagttcccctcctcactcccccttggtgcttgactccaggaataatttataaactgtggaatttttttaaatgaagaacttgtatttgatatgaactttatagagctatttataatttttttgatttaagtgccaaaaaattgtataaagatatatagttttatactattgtcaggaggatttaaattatcctaaaaaggtaatttattctctgtaacttcctcaatagcacctttgtgtcctggctttttcattttttaaaattagttttcacgattctgaagtaagtggtataaaaacagttaggatgagttcacccatgcctgactgcacatcaaagtgtcgatccctgaagcatgctttggatgtcctttctgtggtaacaaaggggagcgaaaaccagattaaggcctttctctccagtcattgttacaatgctgcaactatcaaggatgtttttggcaggaatgccctccaccttgtttcctcctgtggaaagaaaggagtgttagattggcttattcagaaaggagtggatctgttggtgaaagacaaagagtctggatggacagcattgcacagaagcattttttatggacatattgattgtgtttggtctctattgaagcatggtgttagtctgtatattcaagataaagaaggcttgtcagctttggatcttgtaatgaaggatagaccaactcatgtagtattcaagaatactgatcctacagatgtttatacttggggcgataatacaaattttaccctgggtcatggaagccagaatagcaaacatcatccagagttggtggatctgttctccaggagtgggatttatatcaagcaggtggtgctttgtaaatttcactccgtgtttctgtctcagaaagggcaggtttatacctgtggtcatggtcctggagggcgattaggacatggagatgaacagacatgcttggtccctcggcttgtggaaggactgaatggtcataattgttcccaagtggcagctgctaaggatcatactgttgtattaactgaagatggatgtgtttatacatttggtctaaacatttttcatcaattaggaattattccaccgccttccagttgtaatgtacccagacagatacaggcaaaatatctgaaaggaaggacaatcattggcgttgcagcaggcaggtttcatacagtcctatggactagagaagctgtttacactatgggactaaatggtggacaactgggttgtttgctagatcccaatggagaaaagtgtgtaactgctcctcgtcaggtctctgcccttcaccataaagacattgctctgtctttggttgctgcaagtgatggagctacagtctgtgttaccacaaggggagatatttacttacttgcagactatcagtgcaagaagatggcttctaaacagttgaacttgaaaaaagttcttgtgtctgggggtcatatggaatacaaggttgatcctgaacatttgaaagaaaatgggggtcaaaaaatttgcattcttgcaatggatggagctggaagggtgttttgctggagatcagtcaacagttctctgaagcagtgtcgatgggcctatccacgtcaggtcttcatttctgatattgctttaaatagaaatgaaattctatttgttacgcaagatggagaaggatttagagggagatggtttgaagagaaaagaaagagttctgaaaagaaagagattttatcaaaccttcacaattcctcatcagatgtgtcttatgtctctgatataaatagtgtgtatgaaagaattcgacttgagaaacttacctttgcacatagagctgttagtgtcagcacagatccaagtggatgcaactttgcaatcctgcagtcagatcctaaaacaagcctttatgaaattccagctgtgtcctcatcatccttttttgaagagtttggcaaactgttgagggaagcagatgaaatggacagcattcatgatgtgacatttcaagttggcaatagactcttccctgcacataaatatattttggcagtgcattctgatttttttcagaaattgtttctttcagatggtaatacttcagaatttacagatatttaccagaaagatgaagattctgcagggtgccatctctttgtggtagagaaggttcatcctgacatgtttgaataccttttacaatttatatacacagatacttgtgactttttaactcatggcttcaaaccaagaatacacttaaacaaaaacccagaagaatatcagggaactctgaattctcatttgaataaagtgaatttccatgaagatgataaccagaagtctgcatttgaagtttacaaaagtaatcaagctcaaacagttagtgagaggcagaagagcaaacctaaatcttgtaaaaaaggaaaaaatattagggaagatgatcctgtaagaatgttgcaaactgttgcaaagaaattcgacttcagtaatttgagtagtaggttagatggagtcagatttgaaaatgaaaaaattaatgttattgccaagaacactggtaataaactgaagctaagtcagaaaaaatgttcatttctgtgtgacgtgaccatgaaatcagtggatggaaaggaatttccttgtcataaatgtgttctttgtgctagacttgaatattttcatagtatgctgagtagctcatggattgaggcttccagttgtgcagctctggaaatgccaatacattctgatatattaaaagttattttggactacctctatactgatgaagctgtggtgataaaagaatctcaaaatgtagattttatttgtagtgttcttgtggtggctgatcaacttctcataacccggttgaaagagatttgtgaagtagcattaactgaaaaacttaccctgaagaatgctgctatgctactggaatttgcagcaatgtatagtgcaaaacagttgaaactgtcttgtttacagtttataggattgaatatggcagctttacttgaagcaaggtctcttgatgttttaagcgatggtgttttgaaggatctttctgagttttaccggaaaatgattccagcaatggatagaagagtcattacaccatatcaagatggaccagatattagctatttggaagtagaagatggagatatcttcttgaaagaagaaataaatatggaacaaaatcattcggaaactatgttcaagaaagcaaaaacaaaagctaaaaagaagccacgtaaacgttcagatagttctggaggttataacctttcagatattattcagagtccatcatctacaggattattaaagtctggtaagaccaattctgtggaatctcttccagaactgttgacatcagactctgaaggaagctatgcaggagtgggtagtcctagagatttacagtcccctgatttcacaacaggatttcattcagataagattgaggcgaaagtcaaaccgtatgttaatggtacatctcctgtgtattctagggaagatttaaaaccatgggaaaagtcaccaatacttaaaatatctgctccacagcctattcccagtaacagaattgatactaccagctctgccagttgggttgctggttctttcagtcctgtcagccctcctgttgtggatctcagaactatcatggaaatagaagaaagtagacaaaaatgtggagctacaccaaagtcacatttaggcaaaacagtttctcatggagttaaactttctcagaagcaacgaaaaatgattgcattgactaccaaggaaaacaattcaggaatgaatagcatggaaacagttttattcactccttcaaaagcccccaaaccagtgaatgcatgggcatcttctctgcattcagtttcatccaagtcattccgggatttcttactagaagaaaaaaagtctgttactagccatagttcaggcgatcatgtcaaaaaagtttcttttaaaggaattgaaaattctcaggcaccaaaaattgtcagatgctctacccatggtaccccaggaccagaaggcaaccatatttcagatttaccacttctagacagtcccaatccctggctatcttcttcagtgactgctccatccatggtagccccagtcacttttgcatctattgtagaagaagaactacaacaagaagcagctcttattagaagtcgagaaaaaccgttggctctgattcagattgaggagcatgccatacaagatttattggttttctatgaggcatttggcaaccctgaagagtttgtcattgttgaaaggacaccgcagggaccactggcagtacctatgtggaataagcatggatgctagttcactgtggagttgagatgcattttacataattatgagtttgttcatataaagaaaagctgtggaaaagagtcttagagattttgtaatatcattctaaatagattaagaaaagatataatttctttactgcagttaaatcatataatgtttgtatgattaaaaataaatttctcagaattgtgattttagtaactttatataaaatgtgtgagacaaaaacttattaaggttaaatagaattgtttcttctgaataatctaacaaaggaaaatataagtgattgaatcataagatataaggggggtaaagtattaaaaataacttttttgtttgataacttgagaatttagaagattttgccaagtatgtgttgttgcttgacttcttaaatatggcattgatgaatttaaagtaggagcatcagttattacttctgattcattaatggccagaattttgtgtttggtgtaatagttgtgtcaccattcttgttgctttttaaaaatcaggctaatcatgtggtccatgtctcttcaaagcttgacctgcacaaatgccatatttctatttggaccacatattctccattttgcattgagcagtagagtacagtggaaagggaataagaatactgattattctgaacagtttagtcccaagagaatagcgttttaaaaaagaaaaacaagatttggagtcattgtgggttatttttggtgggatggaggatcttaaaaatgcctaattgtgagagaatcaattgctgaaagtgttaaaatttctgaaaataaatgcttaattacatatacaggaattaaatagtttggaagagggttggattatcattacctttacaatactgtataatcagaagttctctgaacctcaattgtatatctagacataaaaattgttttctgtataggatgttgtttggtttgtttctgagtgtttaaattttgcaaaaacaaatgttaaatttgtgcttcagtacctagataaattggaaaggttaatgttctagtttctggaaggtaagcctgggagacacataagcaattcactgctataatttagttgatgtaaaatgacggaaactgactcaatatgtcaggtttaactctgcccaaaagcagcagacatgtaagcagatgtgcaataaaaaatgatcttgatccatttc

SEQ ID NO: 4603 - DNA, 2333 bp, Homo sapiens
gggaaactatgttcaagaaagcaaaaacaaaagctaaaaagaagccacgtaaacgttcagatagttctggaggttataacctttcagatattattcagagtccatcatctacaggattattaaagtctggtaagaccaattctgtggaatctcttccagaactgttgacatcagactctgaaggaagctatgcaggagtgggtagtcctagagatttacagtcccctgatttcacaacaggatttcattcagataagattgaggcgaaagtcaaaccgtatgttaatggtacatctcctgtgtattctagggaagatttaaaaccatgggaaaagtcaccaatacttaaaatatctgctccacagcctattcccagtaacagaattgatactaccagctctgccagttgggttgctggttctttcagtcctgtcagccctcctgttgtggatctcagaactatcatggaaatagaagaaagtagacaaaaatgtggagctacaccaaagtcacatttaggcaaaacagtttctcatggagttaaactttctcagaagcaacgaaaaatgattgcattgactaccaaggaaaacaattcaggaatgaatagcatggaaacagttttattcactccttcaaaagcccccaaaccagtgaatgcatggcatcttctctgcattcagtttcatccaagtcattccgggatttcttactagaagaaaaaaagtctgttactagccatagttcaggcgatcatgtcaaaaaagtttcttttaaaggaattgaaaattctcaggcaccaaaaattgtcagatgctctacccatggtaccccaggaccagaaggcaaccatatttcagatttaccacttctagacagtcccaatccctggctatcttcttcagtgactgctccatccatggtagccccagtcacttttgcatctattgtagaagaagaactacaacaagaagcagctcttattagaagtcgagaaaaaccgttggctctgattcagattgaggagcatgccatacaagatttattggttttctatgaggcatttggcaaccctgaagagtttgtcattgttgaaaggacaccgcagggaccactggcagtacctatgtggaataagcatggatgctagttcactgtggagttgagatgcattttacataattatgagtttgttcatataaagaaaagctgtggaaaagagtcttagagattttgtaatatcattctaaatagattaagaaaagatataatttctttactgcagttaaatcatataatgtttgtatgattaaaaataaatttctcagaattgtgattttagtaactttatataaaatgtgtgagacaaaaacttattaaggttaaatagaattgtttcttctgaataatctaacaaaggaaaatataagtgattgaatcataagatataaggggggtaaagtattaaaaataacttttttgtttgataacttgagaatttagaagattttgccaagtatgtgttgttgcttgacttcttaaatatggcattgatgaatttaaagtaggagcatcagttattacttctgattcattaatggccagaattttgtgtttggtgtaatagttgtgtcaccattcttgttgctttttaaaaatcaggctaatcatgtggtccatgtctcttcaaagcttgacctgcacaaatgccatatttctatttggaccacatattctccattttgcattgagcagtagagtacagtggaaagggaataagaatactgattattctgaacagtttagtcccaagagaatagcgttttaaaaaagaaaaacaagatttggagtcattgtgggttatttttggtgggatggaggatcttaaaaatgcctaattgtgagagaatcaattgctgaaagtgttaaaatttctgaaaataaatgcttaattacatatacaggaattaaatagtttggaagagggttggattatcattacctttacaatactgtataatcagaagttctctgaacctcaattgtatatctagacataaaaattgttttctgtataggatgttgtttggtttgtttctgagtgtttaaattttgcaaaaacaaatgttaaatttgtgcttcagtacctagataaattggaaaggttaatgttctagtttctggaaggtaagcctgggagacacataagcaattcactgctataatttagttgatgtaaaatgacggaaactgactcaatatgtcaggtttaactctgcccaaaagcagcagacatgtaagcagatgtgcaataaaaaatgatcttgatccat

SEQ ID NO: 4604 - DNA, 1660 bp, Homo sapiens
cggctccgggagctctgtcaacagtgctacagcccgagacccataccaaggagcagatcctggagctgctggtgctggagcagtttctgatcatcctgcctaaggagctccaggcccgggtgcaggagcatcacccagagagcagggaggacgtggttgttgttctggaggatttgcagctggatcttggagaaacaggacaacaggacccagaccagccaaagaaacaaaaaatacttgtggaggagatggcccctctgaaaggagtacaggaacagcaggttcggcatgagtgtgaagttacaaagcctgagaaagagaagggtgaggagacaaggattgagaatgggaagcttattgtagtaacagactcttgtggaagagtagagtcatctgggaaaatatctgaacccatggaggctcataatgagggctctaacttggaaaggcatcaggccaagcccaaagagaagattgagtataaatgctcagaacgtgagcagagattcatccagcacttggacctgattgaacatgcgagtacacacacgggaaagaaactctgcgagtctgatgtgtgtcagagttccagtcttacaggacataagaaagtcctctctagagagaaaggtcatcagtgtcatgagtgtgggaaagcctttcagaggagttcacacctcgtcagacatcagaaaatccatcttggtgagaagccttatcagtgcaatgagtgtggcaaagtctttagccagaatgcaggccttttggaacatctcagaattcatactggagagaaaccttatctatgtatccattgtggaaaaaattttaggcgcagctctcaccttaatcgacatcagagaattcacagtcaggaggagccctgtgagtgcaaggagtgtggaaaaacctttagtcaggccttactcctcacccaccatcagagaatccatagtcactccaaaagccatcaatgtaacgagtgtggaaaagctttcagtttgacctcagaccttattcgacaccacagaattcatactggagaaaaacctttcaagtgtaacatatgccagaaagccttccgactaaactcacaccttgctcagcatgtaagaatccacaatgaagaaaaaccctatcagtgtagtgaatgtggagaagccttcaggcaaaggtcaggtctttttcaacatcagagatatcaccacaaagacaaactggcttgatgaggtgttctctccttgtagaacatcagagaaggcacattgactagcaaacagcactttaggaaaagtcaccgtagcccactgtggcatcagaaaattcttgggggctgagttggaggctccctgcctctattctctctcctttgctttccttgaagtcagctttggaccacaataatttcactgtagatgatatgctaggatcaaagttaaacagcattcttcactgcaggacatctcagagcatgtaacataactgcatgattatatactctaagcaatagagagcttcatgactgagtaagagttttgaagtcagcagtgaatcaagtgcccacagatttgcaggcttaagcagaacaagggaagattgatatttttggatatgctatagcagctttctcctatgaaataaaactgatgatgtttggaag

SEQ ID NO: 4605 - DNA, 2899 bp, Homo sapiens
catcctcccaccaggacatccttcatctgcagccagcgcccccgtctcatgtagtgggcctccaccgccccccccacccccagtcccacctccacccactggggctaccccacctcccccacccccactgccagccggaggagcccaggggtccagccacgacgagagctccatgtcaggactggccgctgccatagctggggccaagctgagaagagtccaacggccagaagacgcatctggaggctccagtcccagtgggacctcaaagtccgatgccaaccgggcaagcagcgggggtggcggaggaggcctcatggaggaaatgaacaaactgctggccaagaggagaaaagcagcctcccagtcagacaagccagccgagaagaaggaagatgaaagccaaatggaagatcctagtacctccccctctccggggacccgagcagccagccagccacctaactcctcagaggctggccggaagccctgggagcggagcaactcggtggagaagcctgtgtcctcgattctgtccagaaccccgtctgtggcaaagagccccgaagctaagagcccccttcagtcgcagcctcactctaggtaccgaacaaccctcctgctcacatgtcccccagggtttggggctcctctgtcccccgtcccgtgactaacacccttgcacgctgtctcacgtcctggcatttaacaacttgctctgcgaaggtggtctgttctttcagacccaggacctcggggtcctgtcagtcagctgctccgtcttttccctctgagagagagaccaagggcaaggagggcagtgacctgtccacagaggtagtgcaggggggggccaacatggagtcccagctctggactcactacgtgtgacagtgggcaagttaggggacctctccaagcctctgttttccccccacaaagtgaggtctgttaacccctgctgcacagggtggtggtggggacagctgtgagcaacagctggacatggggtgtggtcactagccagggctgcaccctacagttcaaccagtcctagcactggcgctgagccctacccctttcctccagcccagagtccttcctctgcggccggcacacagaatcagtttccccacagacatactgaccatatttcccaagccaaaagctggcatgacaacatgatagaatatttggaactgagattgcccaaaaaggcagaggcagccagccacatagtatctggaggtacatgtggcctgaattggaaggcctctagaacctgcgtcaagaatgtctccatcgccaccacaaattgaagggaaaccacccttatcacagagcaggaggcattgaaactggccttgcagagctgaacaggtggtgagagcagagcagtgcaggtggacagagatgaggaagtcttagcagtcagctggggtttgtccaaggcttgtggtcagccaggccgtgtgctggggacagtccctgcctgcaaagagcaccgtgtgaacaaggccactgtggtcctgaggggtgctctggacagggtgcagggccacatggtggaagggacagggtgctttgcggagtggggtggggcaagcctctgtcgggagctggcattttcgttgacccggacgaggaggagtctgctctgcggagatcatggggacagcctcccaagctgaaggaagggtaagtgccagggccctgagcctgcagccacccgccaagctcccccgcacctccacctggaagcagacaggccatggggcaggggaacgggaagggtgaggaagagggtgtgggggagcgcggagttagaagtttgcattgtgttcatgcgcagggcccagtcatggaacttgaggcacagggtgccatggtggaggctgggaaggggaaggcaaccagagtgggcaaaacgagggccctggagcagacacggcagcaaggggagcctgcagcgctcccagcggactccgccacgtcctgctggtggagcaaaggcgggctgccatgttgtgagtggccaagggtcgctcactgggcaggaacattgtcaaggccattcatgcttggaatagggtctctcttcagctctgaggcaaatctgttctctaattttcagatgacttcaaggggaacgtgtaccaccacccctctggtgcgtcacattgcttaggaagcctgctgtgtttatcactgggtggctgtcagggctgagatggagagggccagggcctggcgaggtggagcagtcggcccaggtgtcccagcaattgttgctggaacagggtctggaacccacaggagaggcctgaaggacccagggccctctggctggatgcgtttgcctatcaggacccagaattacttacagacctgtttagggctaggcttggcctctttcttgagctcatctggaggggtgtggcaacactcattcttcatccttattctccctggctgtgggcaacactggtcctcagtgtcaccagatggtcctcctctgtgcccatgacccctcagcagccaaggctggccctgccagataaatgtgtgtgcccatgatcacacccaggggcacaggccacatacgtttccctgaaaccttgggctccagcctccatcccgtccatgtgggagggaacttgggtcccagcagtgtgtctttcagcaccaagtcatgtttaaaagaccagagagacaagcattttgccaagatcttccagggaagatgcatgtgtgacacattaacattcaaatcaggccagcgcggtgctcatgcctgtcatcccagcactttgggaggccgaggcgggaggatcacttgagcccaggacttggagaccagtctgggcaacacagtgagaccccatctctacaaaaagtt

SEQ ID NO: 4606 - DNA, 2225 bp, Homo sapiens
cacttcagaaacccatattcacacacatgtgcacgtgttcacatgaaaagacccccttgcactcaggcccccagagccgaggcattgtgcagccccacagcagccaccttcacagctgctaacagcccctgtgccatgcctgctgcaggcactgtctgctctaggaggggctcttgttttcatggaacccagtggtgaagagacaccccactggcccttctcttccccaattcctgtttcttcattccccatcatttacctgctctttctgtctggtcaagaaagcatgtctcagccaggcccagtggctcagccaggcacagtggctcacaccttctaaccagcactttaggagtctgaagtaggaggattgcttgagcccaggagtttgtgaccagcctgggcaacatagggagatcccatctctacaaataataataataaagagtagctgggagtggtggtacacacccgcggtcccagctacatgggaggctggggtaggaggattgcttgagcctgggaggtcaagggtgcagagagcaatgattgcaccactgcactgtgacctggatgacagagcaaaaccctgtctccagaaaaagaaagaaagaaagaaagcaggtctcaaaagcaatggatgagtattctttaactacaatgtagcagactctttattaaaaatgaaatttgatgtttatttttaatcatgttcaacccactttattctcagatatagtcttcctgtgaataactttcttttcagaatggaggaaccaatctctgtgctgtggatgactccaacgaccatgtgctctctgtatgggactggcagaaagaagaaaaactagcagatgtgaagtgctctaatgaagctgtgtttgctgcggatttccaccccacggacaccaacatcatagttacttgtggaaaatcacatctctacttttggacactagaaggaagctcccttaataagaagcaaggattattcgagaaacaagaaaagccaaagtttgtcctctgtgtgactttctctgaaaacggtgacaccattactggagattcaagtggcaacatcttagtatggggaaaaggtacaaatcgaataagctatgcagttcagggggcccatgagggtggcatttttgcactttgtatgttaagagatggcacactggtgtcgggaggtgggaaagaccgaaagctcatttcttggagcggaaactatcaaaaacttcgtaaaacggagattccagaacagtttggtccaatacggacagtggccgaggggaaaggcgatgtgatcttgattggcacaactcgaaactttgtcctgcagggcactctgtcaggggacttcacacccattactcagggtcacactgatgagctctggggactggccatccatgcctcaaaatctcagttcttgacctgtgggcatgacaagcatgccactctctgggacgctgtgggtcaccgtcccgtctgggacaaaataatagaggtaaacatgcacattacatttccatttttcttacagaaattcatctggaacatgtttatttattttttgcatgaaatcaacagtgatacaaagttgtcccaaagcaaatgttatttatctatttagagttgccttaacattgcaattgcatttaacagtgttacttttaacattgcctcgtggcctcagccatgtaattttgaagtttactgttgaaattttctgacaagaagttgttctttctgagttcattgtcagattttctgagtacagtctctcaaccatcctaagagctgaaaaatacttgttatgagcctgcattctatttacagtgtaccctttgaatgggaatttacaagctgtactaaacacacgattgaatatatctctacattttgagtttgatggtaaagtgaactttcgtttgaaagtcagctgggcacggtggctcatgcctgtaatcccagcactttgggaggccaaggcaggcagatcacctgaggttgggagctcgagaccagcctgaccaacatggagaaaccccgtctctactaaaaacacaaaattagccgggcatggtggtgcatgcctatactcccagctccttggaaggctgaggcaggagaattgcttgaacccggaaggtggaggttgcagtgagccaagatcacgccattgcactccagcctgggcaacaagagcaaaattctgtctc

SEQ ID NO: 4607 - DNA, 5354 bp, Homo sapiens
gtggcttcctgggcattgccttccaccccagcttccagcacaaccgcaggctctacgtctactactcagtgggtatccgcagcagtgagtggatccgcatcagcgagttcagagtctccgaggatgacgagaacgccgtggaccacagctctgagaggataatcctggaggtcaaagaaccagcctcaaaccacaacgggggccagctgcttttcggggatgacgggtacctctacatcttcactggagatggcgggatggccggagacccctttgggacatttggaaatgcccaaaacaagtcggcgctgctgggcaaggtgctgcgcatcgacgtggaccgtaaggagcgcggcctgccctacggcatcccgcccgacaacccgttcgtgggcgaccccgcggcgcagcccgaggtctacgccctgggcgtgcgcaacatgtggcgctgctccttcgaccgtggcgacccctcctcgggcactggccgcgggcgcctcttctgcggcgacgtgggccagaacaagttcgaggaggtggacgtggtggagcgcggcggcaactatggctggcgcgcgcgcgaagggttcgagtgctacgaccgcagcctgtgcgccaacacctctctcaatgacttgctgccgattttcgcctacccgcacacggttggcaagtcggtcacagggggctacgtgtaccggggctgcgagtaccccaacctgaacggcctctacatttttggggatttcatgagcgggcgtctgatgtccctccaagagaacccagggacaggccagtggcagtacagtgagatctgcatgggccacggccagacctgtgagttcccaggcctcatcaacaactactacccgtacatcatctccttcggggaggacgaggccggggagctgtacttcatgtcgacaggggagccgagtgccacagctccacgcggagttgtctacaaaataattgacgcatccaggcgggcaccacctggcaaatgtcagatccagcctgctcaggtgaagatcagaagccgtctcatcccctttgtgcccaaagaaaagttcatcccgaagacacggagcaccccgcggcctacagcgcgggcgcccacgcgggcgccccgccgagggcgccccacggccgctccccccgcgccaaccccgcggccagcgcggcccacccagcagccagggagccggaggggcggcgggcggcggcgggggcggctgaactcggcgagccgggcgttccgggatggcgaggtgcgcctggtgcggcccgcgggcctgagctctggcagcgggcgcgtggaggtgttcgtgggcggacgctggggcaccgtgtgcgacgactcctggaacatcagcggcgccgccgtcgtgtgtcgccagctggggtttgcctacgccgtgcgcgccgtcaagagagccgagttcggccagggcggctcgctgcccattctgctggacgatgtgcgctgcgcgggctgggagcggaacctgctggagtgccagcacaacggcgtgggcacccacaactgcgagcacgacgaggatgcgggcgtcgtgtgcagccaccagaaccccgacctgtaggcaacacgccgctgccccaggccatcccgccggcgggggagcctggcaggggccgctccgccctgtgtgcgcccagcgggtgcacacgtgttctagagtgaagggggtgcgggtgtgtgctgtcctggggacatgtgtgaggcgctgcagtgcatgtgtgtcctctgcagacccaaggcaggagtgtgtgttgggggcggtgtgggctctggaagtgcatggtccatcatgggcgggaggagttcctttcttacctccaagcgtttcagacaccagcaggaacagcagccgggctgtgggaccctgaggagggagggcagccaggcttcgaggacggacatggcccctggctgtgctaacagaggcacagcttgcagactgagggcggtggggagaaccaggcttgtcctgcccacagctggaatggaaggtgcaagaacagccggagggtggcctgaggaatgtggcccggacagcatggcctggtgcccgcatcccccccaccccctggcagtcagaggcgctggagagaaccggaaggcatccagtggggaagggaaagccttctggaaggtgggagcagggtgagctgcaggcctggggccccactggaggggcaggctgcgtggaggagccagcacctgctcagggaggatggctgtgaggactggatgacctccaaggccgtatgctggagaagccactcagcagcatactcagtccttgtgggtgctcctgggatgggaccagcctcctccaaccctgaggcctgattctctcttgctcttggggcagaagccacccacactagctgggcagagctttcaccctggccctccagtgagtcggtgggcctccactactttcaaagctgtgtttgggccctggggccacctctgtcctttccatccccatccctgctcagtgtaaacccaggagacctgattcctccagccctacctcggggctgaccaggctgggggtccagtgaaactactgacactttttcacccagggctatgccaataatgtggctgtttacacaccactttcctgcctcctctctgacctgcacctgtgtgggagccggggtgggaaccaggagaaaggggtgaggcctcccgcttcccacctgcatcacaggtggaagctccttcactccagggatgctcggccctggctctgtgccaggccgcagaggggcacttagtatgactgcgctcagcctcggatgggagcacgggtggggggtgggtaagcagatgagtcaccaggcagtgaagacaggatgtggcccatgtcgggggttggaagaggtctgggtggggcacccaaacccaacctatgggggggctttgggagggggtgatgctgtgccaagttctgggagctggcaccaggggtggctgggcaggccttggggcaggcatgagtctggcagggtctcctagctgctagtatagggtctcctagccactagtataggatcctgggctgcagcagaaagctttaggtcactgtcttggactcctcatactctgtgctttacagaatgggaaactgaggcacacagaggttagatatcttagggcaccaagccagggaagggagaagtcaagtttgaatacagcagcttagtttagagtccccgcaccctaaccactgccctccccagctacactatgcctgcagagagcggtgtgctggggctcctgcctggtgtgggagtgccagcctggctgggaagcagctgatggagatccctgggggctcctcttgcctggcaggtgcccccgctgctggcctcatgctcctctcgggcctccagtggcccaggggaggttgagtgggcatcttcctgggatgcaggggagttctgagctctgacgccgggcgtgttaggagatagcaggccgttaatgaccatcccagccgaattcctcactgtgcagatgaggaagtgagctcagggaggctgagtgtcccaggcctgttgccagatgaggccacgctgagactggagccagggaaggtgcagcaagccttgaggccctcaagaatgcagccgagccagggccctgcttgcctggccccagaagctgttttgctcagagctggattaggagggttggcaaagggagctctgggtgcggcctcaggccctccagtacttctctgggcagttcgggctttggccttcagtcttccaggccaggcgctcttcctccccagcctccaactcatcacctctcaggccccaaaccaggcctgggctaggctgcagcctgcctcctggggactcactccacagtccccaggtcagtggtccccaacctttttggcatcatggactggtttcatgtaagacaatttttccatggatgggggttggggggatggttttgggatgaaatgtcccacctcagatcatcaggcattagattctcataaggagttcacagcctagatccctcgcatgcacagttcatagtaggtttcatgttcctatgcggatctaatgccactgctgatctggcaggaggcagagctcaggtgggaatgcttgctccccacactaccctgccccactgccactcacctcctgctgtgtggcccggttcctaacaggccacccatcagtactggtccgtggcccagggtttggagacctctgccctaggtagtaataagagtggacagctgttatatgtaaatacttgttccccgatgctggaaagaaatagcactaaaacataaatttaattctttcagcaaggcaattttactttctgcagaaagggtgctcatcgcagatggaacaatagtgagaggacacctgaacaaaggagggaagcaattgttagcccttatgcagtttgtccctgctactgtgtcctatgtccattggcagaagccagaccgcacaatctaaactaaaacccgattggctgtttaaaatttttctaaataggtaaaagtaatggaaggataaaggaaaagaggaagttgcttacgaaaggacttagaaaagtaataatattcccaaataaggaaggggtataggctgtgagctgggacatgcctgtgagcacgtccagcacagatatcttggttaaagtataaggacatagaacgtactatgtgcctgtgagcacgtctaacagttacatagaatagggcttgacaaagagttattagcataaagcaaggaggtttgaaggaagttcgtctttaaaagaaaccattatttctaacacttacgatttattctttaacaagaagggaaactttcaagaggaacttttactttctacaacagctgacctctgctgagcgcttactacatgccaagcactgctctgaaagtttaacataccattcactcatgtaatcctcatattaatgcacatttactcacgtggaagccgagttccagggcatttgtcacttaccaaatgtcacatagccaaaatttgaatttgagcccaggtagtccagctctgggaccctgctgtgggccttcctgctgggccacctcaagggcattgaaagccagccccaccccactgggacacaagttcagagaagggcagagctggctgcctgtccagtgcttctttcactccaccacctacagctggccgctgagggagcattcacatgtgactctgtccccagggactccgatcttgccttaaagtcctccagggcctctgaggatgggggcacagccttcaccctcaccccctc

SEQ ID NO: 4608 - DNA, 1506 bp, Homo sapiens
aaagtcccacgcaccccgcgggactcatatttttcccagacgcggaggttggggtcatggcgccccgaagcctcctcctgctgctctcaggggccctggccctgaccgatacttgggcaggctcccactccttgaggtatttcagcaccgctgtgtcgcggcccggccgcggggagccccgctacatcgccgtggagtacgtagacgacacgcaattcctgcggttcgacagcgacgccgcgattccgaggatggagccgcgggagccgtgggtggagcaagaggggccgcagtattgggagtggaccacagggtacgccaaggccaacgcacagactgaccgagtggccctgaggaacctgctccgccgctacaaccagagcgaggctggggtctcacaccctccagggaatgaatggctgcgacatggggcccgacggacgcctcctccgcgggtatcaccagcacgcgtacgacggcaaggattacatctccctgaacgaggacctgcgctcctggaccgcggcggacaccgtggctcagatcacccagcgcttctatgaggcagaggaatatgcagaggagttcaggacctacctggagggcgagtgcctggagttgctccgcagatacttggagaatgggaaggagacgctacagcgcgcagatcctccaaaggcacacgttgcccaccaccccatctctgaccatgaggccaccctgaggtgctgggccctgggcttctaccctgcggagatcacgctgacctggcagcgggatggggaggaacagacccaggacacagagcttgtggagaccaggcctgcaggggatggaaccttccagaagtgggccgctgtggtggtgcctcctggagaggaacagagatacacatgccatgtgcagcacgaggggctgccccagcccctcatcctgagatgggagcagtctccccagcccaccatccccatcgtgggcatcgttgctggccttgttgtccttggagctgtggtcactggagctgtggtcgctgctgtgatgtggaggaagaagagctcagatagaaacagagggagctactctcaggctgcagcctactcagtggtcagcggaaacttgatgataacatggtggtcaagcttatttctcctgggggtgctcttccaaggatatttgggctgcctccggagtcacagtgtcttgggccgccggaaggtgggtgacatgtggatcttgttttttttgtggctgtggacatctttcaacactgccttcttggccttgcaaagccttcgctttggcttcggctttaggaggggcaggagcttccttcttcgttcttggcaccatcttatgaaaagggtccagattaagatttttgactgagtcattctaaagtaagttgcaagacccatgatactagaccactaaatacttcatcacacacctcctaagaataagaaccaacattatcacaccaaagaaaataaataattccataatatt

SEQ ID NO: 4609 - DNA, 1205 bp, Homo sapiens
ctcctctttcgcctcctccgctttgggagccccgggctactctttcacagcccctgttgccctgtgatctgtaggtccttggggacgcacagttaagatgacaggacatcctggaagctgggaaatggctgaatgctatcccagtgaatatacgtgccctgtttgttgaatctactcatccttaaagaggctggacatggtggctgatgcctgtaatcccagtgctgtgggaggccaaggcgggtggatcatgaggtcaggagatcgagaccatcctggacaacatatgtattcatttcctaccaccgtagtggaagagatactatccctatctttacaactgatagcatttccaacagtaagctgtgagattctgcttgaaatcacctctcaaacaaataaaaaacagacctgggagacatgctacgctcattctgctgaagaaataggcatcatagctgggaaacggattcacaagacccaggctgttccctacatatgtttcctcctccgacatcagttcatcagtcaatcaagccatgtgagagtggaggccttgtattccctattattcttgggcactctactccaagtaggaaaaggccaggaggtcctgttaaaggatgcactcagagcccgggctccctaacatatgagagtgctaaccagcaggtgtagacttttcaggagtgaagaatgaggcaggcattccaaacctggaccttcatcaccttttgtttcatctcaagacaattctgagggactgttttggagcgtgtctggaaggtgaaccttgaagaagagtgtgggttttgatgtgactcagttgagatctttcatggggaggcaggaattcaatgcccagaatctgggctggtgtctttgaggtcagtaggttgcgtctttgtatccaagtccattgttactaggttggaggctggagattctaaatggcttccagaccatctctctgattctctttgggagatggggtctgaaagacaatgtcagtagttttgggaaattctagaaagtgtgcttggaaacgtgggaagagctcttgcctagtgcctaaatgctccatttgcagctctagccaagtagatacttggtaggtatagagccgggtttgcgtttatattagcaaaacctatgtcagagttgaagaagtagtcaggaaaaagcgtcttggtcgcaggccgggg

SEQ ID NO: 4610 - DNA, 1204 bp, Homo sapiens
atggtggtcatggcgccccgaaccctcttcctgctgctctcgggggccctgaccctgaccgagacctgggcgggctcccactccatgaggtatttcagcgccgccgtgtcccggcccggccgcggggagccccgcttcatcgccatgggctacgtggacgacacgcagttcgtgcggttcgacagcgactcggcgtgtccgaggatggagccgcgggcgccgtgggtggagcaggaggggccggagtattgggaagaggagacacggaacaccaaggcccacgcacagactgacagaatgaacctgcagaccctgcgcggctactacaaccagagcgaggccagttctcacaccctccagtggatgattggctgcgacctggggtccgacggacgcctcctccgcgggtatgaacagtatgcctacgatggcaaggattacctcgccctgaacgaggacctgcgctcctggaccgcagcggacactgcggctcagatctccaagcgcaagtgtgaggcggccaatgtggctgaacaaaggagagcctacctggagggcacgtgcgtggagtggctccacagatacctggagaacgggaaggagatgctgcagcgcgcggacccccccaagacacacgtgacccaccaccctgtctttgactatgaggccaccctgaggtgctgggccctgggcttctaccctgcggagatcatactgacctggcagcgggatggggaggaccagacccaggacgtggagctcgtggagaccaggcctgcaggggatggaaccttccagaagtgggcagctgtggtggtgccttctggagaggagcagagatacacgtgccatgtgcagcatgaggggctgccggagcccctcatgctgagatggagtaaggagggagatggaggcatcatgtctgttagggaaagcaggagcctctctgaagacctttaacagggtcggtggtgagggctgggggtcagagaccctcaccttcacctcctttcccagagcagtcttccctgcccaccatccccatcatgggtatcgttgctggcctggttgtccttgcagctgtagtcactggagctgcggtcgctgctgtgctgtggagaaagaagagctcagattgaaaaggagggagctactctcaggctgcaatgtgaaacagctgccctgtgtgggactgagtggcaag

SEQ ID NO: 4611 - DNA, 580 bp, Homo sapiens
atggtggtcatggcgccccgaaccctcttcctgctgctctcgggggccctgaccctgaccgagacctgggcgggctcccactccatgaggtatttcagcgccgccgtgtcccggcccggccgcggggagccccgcttcatcgccatgggctacgtggacgacacgcagttcgtgcggttcgacagcgactcggcgtgtccgaggatggagccgcgggcgccgtgggtggagcaggaggggccggagtattgggaagaggagacacggaacaccaaggcccacgcacagactgacagaatgaacctgcagaccctgcgcggctactacaaccagagcgaggccaagcagtcttccctgcccaccatccccatcatgggtatcgttgctggcctggttgtccttgcagctgtagtcactggagctgcggtcgctgctgtgctgtggagaaagaagagctcagattgaaaaggagggagctactctcaggctgcaatgtgaaacagctgccctgtgtgggactgagtggcaagtccctttgtgacttcaagaaccctgactcctctttgtgcagagaccagcc

SEQ ID NO: 4612 - DNA, 856 bp, Homo sapiens
atggtggtcatggcgccccgaaccctcttcctgctgctctcgggggccctgaccctgaccgagacctgggcgggctcccactccatgaggtatttcagcgccgccgtgtcccggcccggccgcggggagccccgcttcatcgccatgggctacgtggacgacacgcagttcgtgcggttcgacagcgactcggcgtgtccgaggatggagccgcgggcgccgtgggtggagcaggaggggccggagtattgggaagaggagacacggaacaccaaggcccacgcacagactgacagaatgaacctgcagaccctgcgcggctactacaaccagagcgaggccaacccccccaagacacacgtgacccaccaccctgtctttgactatgaggccaccctgaggtgctgggccctgggcttctaccctgcggagatcatactgacctggcagcgggatggggaggaccagacccaggacgtggagctcgtggagaccaggcctgcaggggatggaaccttccagaagtgggcagctgtggtggtgccttctggagaggagcagagatacacgtgccatgtgcagcatgaggggctgccggagcccctcatgctgagatggaagcagtcttccctgcccaccatccccatcatgggtatcgttgctggcctggttgtccttgcagctgtagtcactggagctgcggtcgctgctgtgctgtggagaaagaagagctcagattgaaaaggagggagctactctcaggctgcaatgtgaaacagctgccctgtgtgggactgagtggcaagtccctttgtgacttcaagaaccctgactcctctttgtgcagagaccagcc

SEQ ID NO: 4613 - DNA, 904 bp, Homo sapiens
atggtggtcatggcgccccgaaccctcttcctgctgctctcgggggccctgaccctgaccgagacctgggcgggctcccactccatgaggtatttcagcgccgccgtgtcccggcccggccgcggggagccccgcttcatcgccatgggctacgtggacgacacgcagttcgtgcggttcgacagcgactcggcgtgtccgaggatggagccgcgggcgccgtgggtggagcaggaggggccggagtattgggaagaggagacacggaacaccaaggcccacgcacagactgacagaatgaacctgcagaccctgcgcggctactacaaccagagcgaggccaacccccccaagacacacgtgacccaccaccctgtctttgactatgaggccaccctgaggtgctgggccctgggcttctaccctgcggagatcatactgacctggcagcgggatggggaggaccagacccaggacgtggagctcgtggagaccaggcctgcaggggatggaaccttccagaagtgggcagctgtggtggtgccttctggagaggagcagagatacacgtgccatgtgcagcatgaggggctgccggagcccctcatgctgagatggaagcagtcttccctgcccaccatccccatcatgggtatcgttgctggcctggttgtccttgcagctgtagtcactggagctgcggtcgctgctgtgctgtggagaaagaagagctcagattgaaaaggagggagctactctcaggctgcaagcagtgacagtgcccagggctctaatgtgtctctcacggcttgtaaattgtgaaacagctgccctgtgtgggactgagtggcaagtccctttgtgacttcaagaaccctgactcctctttgtgcagagaccagcc

SEQ ID NO: 4614 - DNA, 1432 bp, Homo sapiens
agattctccccagacgccgaggatggccgtcatggcgccccgaaccctcctcctgctactctcgggggccctggccctgacccagacctgggcaggctcccactccatgaggtatttcttcacatccgtgtcccggcccggccgcggggagccccgcttcatcgccgtgggctacgtggacgacacgcagttcgtgcggttcgacagcgacgccgcgagccagaggatggagccgcgggcgccgtggatagagcaggaggggccggagtattgggaccaggagacacggaatgtgaaggcccagtcacagactgaccgagtggacctggggaccctgcgcggctactacaaccagagcgaggccggttctcacaccatccagataatgtatggctgcgacgtggggtcggacgggcgcttcctccgcgggtaccggcaggacgcctacgacggcaaggattacatcgccctgaacgaggacctgcgctcttggaccgcggcggacatggcggctcagatcaccaagcgcaagtgggaggcggcccatgaggcggagcagttgagagcctacctggatggcacgtgcgtggagtggctccgcagatacctggagaacgggaaggagacgctgcagcgcacggacccccccaagacacatatgacccaccaccccatctctgaccatgaggccaccctgaggtgctgggccctgggcttctaccctgcggagatcacactgacctggcagcgggatggggaggaccagacccaggacacggagctcgtggagaccaggcctgcaggggatggaaccttccagaagtgggcggctgtggtggtgccttctggagaggagcagagatacacctgccatgtgcagcatgagggtctgcccaagcccctcaccctgagatgggagctgtcttcccagcccaccatccccatcgtgggcatcattgctggcctggttctccttggagctgtgatcactggagctgtggtcgctgccgtgatgtggaggaggaagagctcagatagaaaaggaggcaagagttgttcctgcccttccctttgtgacttgaagaaccctgactttgtttctgcaaaggcacctgcatgtgtctgtgttcgtgtaggcataatgtgaggaggtggggagaccaccccacccccatgtccaccatgaccctcttcccacgctgacctgtgctccctccccaatcatctttcctgttccagagaggtggggctgaggtgtctccatctctgtctcaacttcatggtgcactgagctgtaacttcttccttccctattaaaattagaaccttagtataaatttactttctcaaattcttgccatgagaggttgatgagttaattaaaggagaagattcctaaaatttgagagacaaaataaatggaagacatgag

SEQ ID NO: 4615 - DNA, 2209 bp, Homo sapiens
aaagtacttacagccaaaagagcttcctctggggcttgcatattcagtttcctttgtcatgtaatcatttaagactgaactctgcttattgatatgtagtattctattctaggttgagctcaaactggtagctgaaatttaggagacatttttaattcatttagtattaggcatcttttgaccttactaaagtaccagtagtagaaaaatatttttgtgtgatgaaactgaaaacatcagtggtcgtatttaataaaaggtgactagtactgcccatttaaagtaggtgtctaactttgaataaatgtggatagcaatgaataagaaatgaccatgcatggtgttagcagaaaattttaacatgtgttttacctttagaatactaactgggttcagcgtagtatgtaattttccttccttatatccatgaaaaaaaatgtacgagtgctccctttcatttcaaaccttcagtagaggaaggaggaagagtagcatttaaaatgtacattaggactggttaggttgcttttcctagttagcactgatcttagaaagaaggttggtaggcatattccaactgccacagcacccttcctgtttcaaatgtggcaggttattcattttgggtgcagtttgtctcctccaatgattagacgaaagagttttctgaccatcattcaaaaggaatgtgagaagttaatgaatcctagaggaaagcggctgagaaaaggcatctggcatttggttgagagcctcctatgtggtgctagtcaaactacttttacttggaccctgaattcaggacagaaaacactgctccttctcctcgctctcagttgttgggaaagcatggttacattgaatggtcagcgttaagtgagctttgcaatagttgctgtgcttataaagcaactgacaactggcccttgtcctttcctaggtattgttgcagcatctggcagtgagactgaggatgaggacagcatggacattcccttggacctttcttcatccgctggctcaggcaagagaaggagaaggggcaacctacccaaggagtctgtgcagattcttcgggattggctgtatgagcaccgttacaatgcctatccttcagagcaagaaaaagcgttgctgtcccagcaaacacacctgtctacgctacaggtctgtaactggttcatcaacgcccgccgcaggctcctccctgacatgctgagaaaggatggcaaagatccaaatcagttcacaatttcccgccgtggggccaagatttctgaaacgagctctgtggagtccgtgatgggcatcaaaaacttcatgccagctctagaggagaccccatttcattcctgtacagctgggccaaacccaaccctagggaggccactgtctcctaagccgtcatccccgggatcagttttggctcgtccatcagtgatctgccataccactgtgactgcattgaaagatgtccctttctctctctgccagtcggtcggtgtgggacaaaacacagatatacagcagatagcggccaaaaacttcacagacacctctctcatgtacccagaggacacttgtaaatctggaccaagtacgaatacacagagtggtcttttcaacactcctccccctactccaccggacctcaaccaggacttcagtggatttcagcttctagtggatgttgcactcaaacgggctgcagagatggagcttcaggcaaaacttacagcttaacccattttcaagcaaaacagttctcagaaatgtcatgattgccggggtgaaggcaagagatgaattgcattattttatatattttttattaatatttgcacatgggattgctaaaacagcttcctgttactgagatgtcttcaatggaatacagtcattccaagaactataaacttaaagctactgtagaaacaaagggttttcttttttaaatgtttcttggtagattattcataatgtgagatggttcccaatatcatgtgattttttttttcctccccttccctttttttgttattttttcagactgtgcaatacttagagaacctatagcatcttctcattcccatgtggaacaggatgcccacatactgtctaattaataaattttccattttttttcaaacaagtatgaatctagttggttgatgccttttttttcatgacataataaagtattttcttt

SEQ ID NO: 4616 - DNA, 779 bp, Homo sapiens
gaattaaacaaccaccatgtcgagcaaaaaggcaaagaccaagaccaccaagaagcgccctcagcgtgcaacatccaatgtgtttgccatgtttgaccagtcacagattcaggagttcaaagaggccttcaacatgattgatcagaacagagatggcttcatcgacaaggaagatttgcatgatatgcttgcttctctagggaagaatcccactgatgcataccttgatgccatgatgaatgaggccccagggcccatcaatttcaccatgttcctgaccatgtttggtgagaagttaaatggcacagatcctgaagatgtcatcagaaacgcctttgcttgctttgatgaagaagcaacaggcaccattcaggaagattacctaagagagctgctgacaaccatgggggatcggtttacagatgaggaagtggatgagctgtacagagaagcacctattgacaaaaaggggaatttcaattacatcgagttcacacgcatcctgaaacatggagccaaagacaaagatgactgaaagaactttagctaaaatcttccagttacattgtcttactctcttttacttctcagacacttcccccaccctcatagaacctgttgcatgcaacttagtttcacagctttgcctcttctttttgatgtatttattccagacctttctgccacttagcacttgtataatcagactggaaatggggatgagggtgtaaattgtattgaaaaagatcgcgaataaaaatcaacaaatgtgaaagccc

SEQ ID NO: 4617 - DNA, 2516 bp, Homo sapiens
tttctccctctcagaaccttcctgccgtcgcgtttgcacctcgctgctccagcctctggggcgcattccaaccttccagcctgcgacctgcggagaaaaaaaattacttattttcttgccccatacataccttgaggcgagcaaaaaaattaaattttaaccatgagggaaatcgtgcacatccaggctggtcagtgtggcaaccagatcggtgccaagttctgggaggtgatcagtgatgaacatggcatcgaccccaccggcacctaccacggggacagcgacctgcagctggaccgcatctctgtgtactacaatgaagccacaggtggcaaatatgttcctcgtgccatcctggtggatctagaacctgggaccatggactctgttcgctcaggtccttttggccagatctttagaccagacaactttgtatttggtcagtctggggcaggtaacaactgggccaaaggccactacacagagggcgccgagctggttgattctgtcctggatgtggtacggaaggaggcagagagctgtgactgcctgcagggcttccagctgacccactcactgggcgggggcacaggctctggaatgggcactctccttatcagcaagatccgagaagaataccctgatcgcatcatgaataccttcagtgtggtgccttcacccaaagtgtctgacaccgtggtcgagccctacaatgccaccctctccgtccatcagttggtagagaatactgatgagacctattgcattgacaacgaggccctctatgatatctgcttccgcactctgaagctgaccacaccaacctacggggatctgaaccaccttgtctcagccaccatgagtggtgtcaccacctgcctccgtttccctggccagctcaatgctgacctccgcaagttggcagtcaacatggtccccttcccacgtctccatttctttatgcctggctttgcccctctcaccagccgtggaagccagcagtatcgagctctcacagtgccggaactcacccagcaggtcttcgatgccaagaacatgatggctgcctgtgacccccgccacggccgatacctcaccgtggctgctgtcttccgtggtcggatgtccatgaaggaggtcgatgagcagatgcttaacgtgcagaacaagaacagcagctactttgtggaatggatccccaacaatgtcaagacagccgtctgtgacatcccacctcgtggcctcaagatggcagtcaccttcattggcaatagcacagccatccaggagctcttcaagcgcatctcggagcagttcactgccatgttccgccggaaggccttcctccactggtacacaggcgagggcatggacgagatggagttcaccgaggctgagagcaacatgaacgacctcgtctctgagtatcagcagtaccaggatgccaccgcagaagaggaggaggatttcggtgaggaggccgaagaggaggcctaaggcagagcccccatcacctcaggcttctcagttcccttagccgtcttactcaactgcccctttcctctccctcagaatttgtgtttgctgcctctatcttgttttttgttttttcttctggggggggtctagaacagtgcctggcacatagtaggcgctcaataaatacttgtttgttgaatgtctcctctctctttccactctgggaaacctaggtttctgccattctgggtgaccctgtatttctttctggtgcccattccatttgtccagttaatacttcctcttaaaaatctccaagaagctgggtctccagatcccatttagaaccaaccaggtgctgaaaacacatgtagataatggccatcatcctaagcccaaagtagaaaatggtagaaggtagtgggtagaagtcactatataaggaaggggatgggattttccattctaaaagttttggagagggaaatccaggctattaaagtcactaaatttctaagtatgtccatttcccatctcagcttcaagggaggtgtcagcagtattatctccactttcaatctccctccaagctctactctggaggagtctgtcccactctgtcaagtggaatccttccctttccaactctacctccctcactcagctcctttcccctgatcagagaaagggatcaagggggttgggaggggggaaagagaccagccttggtccctaagcctccagaaacgtcttcttaatccccaccttttcttactcccaaaaaagaatgaacacccctgactctggagtggtgtatactgccacatcagtgtttgagtcagtccccagaggagaggggaaccctcctccatcttttttgcaacatctcatttcttccttttgctgttgcttcccccctcacacacttggttttgttctatcctacatttgagatttctattttatgttgaacttgctgctttttttcatattgaaaagatgacatcgccccaagagccaaaaataaatgggaattg

SEQ ID NO: 4618 - DNA, 1312 bp, Homo sapiens
atgtgtcactctcgcagctgccacccgaccatgaccatcctgcaggccccgaccccggccccctccaccatcccgggaccccggcggggctccggtcctgagatcttcaccttcgaccctctcccggagcccgcagcggcccctgccgggcgccccagcgcctctcgcgggcaccgaaagcgcagccgcagggttctctaccctcgagtggtgagtatcgccgaagtgggcattcgcggggtgcgctgccctggagtcactggggaacgacccgactccagaggcctcgacctgacctgtctcctgttttgtctccccttaggtccggcgccagctgccagtcgaggaaccgaacccagccaaaaggcttctctttctgctgctcaccatcgtcttctgccagatcctgatggctgaagagggtgtgccggcgcccctgcctccagaggacgcccctaacgccgcatccctggcgcccacccctgtgtcccccgtcctcgagccctttaatctgacttcggagccctcggactacgctctggacctcagcactttcctccagcaacacccggccgccttctaactgtgactccccgcactccccaaaaagaatccgaaaaaccacaaagaaacaccaggcgtacctggtgcgcgagagcgtatccccaactgggacttccgaggcaacttgaactcagaacactacagcggagacgccacccggtgcttgaggcgggaccgaggcgcacagagaccgaggcgcatagagaccgaggcacagcccagctggggctaggcccggtgggaaggagagcgtcgttaatttatttcttattgctcctaattaatatttatatgtatttatgtacgtcctcctaggtgatggagatgtgtacgtaatatttattttaacttatgcaagggtgtgagatgttccccctgctgtaaatgcaggtctcttggtatttattgagctttgtgggactggtggaagcaggacacctggaactgcggcaaagtaggagaagaaatggggaggactcgggtgggggaggacgtcccggctgggatgaagtctggtggtgggtcgtaagtttaggaggtgactgcatcctccagcatctcaactccgtctgtctactgtgtgagacttcggcggaccattaggaatgagatccgtgagatccttccatcttcttgaagtcgcctttagggtggctgcgaggtagagggttgggggttggtgggctgtcacggagcgactgtcgagatcgcctagtatgttctgtgaacacaaataaaattgatttac

SEQ ID NO: 4619 - DNA, 1327 bp, Homo sapiens
gtacgttcctcatgaaagggacgacgggagctgcatgaaagccgaagttatggaccgctagcatctgtcactggccaccggtttccgggagtaagcggcagctaccttacagccctgacacgagccgggtgctctctcttctcaccgcggcccacgtctcctcgctggctccggtggcctcgctgggtcgcgaggaggcggaggactgtactctgaggccaaaagccagagtcggccctgaacgcccacgactctcagggtccagaggccgtgagaccggccgcggctgaaaggtaaagaaaccaagtggaagagtgtttcctcctctggccgtaaagcagctgtccccgccctactccggaccgccccaaagactccatgggatggacctgagtcagccgaatcctagccccttcccttgggcctgctgtggtgctcgacatcagtgacagacggaagcagcagaccatcaaggctacgggaggcccggggcgcttgcgaagatgaagtttggctgcctctccttccggcagccttatgctggctttgtcttaaatggaatcaagactgtggagacgcgctggcgtcctctgctgagcagccagcggaactgtaccatcgccgtccacattgctcacagggactgggaaggcgatgcctgtcgggagctgctggtggagagactcgggatgactcctgctcagattcaggccttgctcaggaaaggggaaaagtttggtcgaggagtgatagcgggactcgttgacattggggaaactttgcaatgccccgaagacttaactcccgatgaggttgtggaactagaaaatcaagctgcactgaccaacctgaagcagaagtacctgactgtgatttcaaaccccaggtggttactggagcccatacctaggaaaggaggcaaggatgtattccaggtagacatcccagagcacctgatccctttggggcatgaagtgtgacaagtgtgggctcctgaaaggaatgttccagagaaaccagctaaatcatggcaccttcaatttgccatcgtgacgcagacctgtataaattaggttaaagatgaatttccactgctttggagagtcccacccactaagcactgtgcatgtaaacaggttcctttgctcagatgaaggaagtagggggtggggctttccttgtgtgatgcctccttaggcacacaggcaatgtctcaagtactttgaccttagggtagaaggcaaagctgccagtaaatgtctcagcattgctgctaattttggtcctgctagtttctggattgtacaaataaatgtgttgtagatga

SEQ ID NO: 4620 - DNA, 2052 bp, Homo sapiens
ggaccccaggcaccctccagcgtcaggtgcggatcccccagatgcccgccccgccccatcccaggacacccctggggtctccagctgcgtactggaaacgagtgggacactctgcatgctcagcgtcctgcgggaaaggtgtctggcgccccattttcctctgcatctcccgtgagtcgggagaggaactggatgaacgcagctgtgccgcgggtgccaggcccccagcctcccctgaaccctgccacggcaccccatgccccccatactgggaggctggcgagtggacatcctgcagccgctcctgtggccccggcacccagcaccgccagctgcagtgccggcaggaatttggggggggtggctcctcggtgcccccggagcgctgtggacatctcccccggcccaacatcacccagtcttgccagctgcgcctctgtggccattgggaagttggctctccttggagccagtgctccgtgcggtgcggccggggccagagaagccggcaggttcgctgtgttgggaacaatggtgatgaagtgagcgagcaggagtgtgcgtcaggccccccgcagccccccagcagagaggcctgtgacatggggccctgtactactgcctggttccacagcgactggagctccaagtgctcagccgagtgtgggacgggaatccagcggcgctctgtggtctgccttgggagtggggcagccctcgggccaggccagggggaagcaggagcaggaactgggcagagctgtccaacaggaagccggccccctgacatgcgcgcctgcagcctggggccctgtgagagaacttggcgctggtacacagggccctggggtgagtgctcctccgaatgtggctctggcacacagcgtagagacatcatctgtgtatccaaactggggacggagttcaacgtgacttctccgagcaactgttctcacctccccaggccccctgccctgcagccctgtcaagggcaggcctgccaggaccgatggttttccacgccctggagcccatgttctcgctcctgccaagggggaacgcagacacgggaggtccagtgcctgagcaccaaccagaccctcagcacccgatgccctcctcaactgcggccctccaggaagcgcccctgtaacagccaaccctgcagccagcgccctgatgatcaatgcaaggacagctctccacattgccccctggtggtacaggcccggctctgcgtctacccctactacacagccacctgttgccgctcttgcgcacatgtcctggagcggtctccccaggatccctcctgaaaggggtccggggcaccttcacggttttctgtgccaccatcggtcacccattgatcggcccactctgaaccccctggctctccagcctgtcccagtctcagcagggatgtcctccaggtgacagagggtggcaaggtgactgacacaaagtgactttcagggctgtggtcaggcccatgtggtggtgtgatgggtgtgtgcacatatgcctcaggtgtgcttttgggactgcatggatatgtgtgtgctcaaacgtgtatcacttttcaaaaagaggttacacagactgagaaggacaagacctgtttccttgagactttcctaggtggaaaggaaagcaagtctgcagttccttgctaatctgagctacttagagtgtggtctccccaccaactccagttttgtgccctaagcctcatttctcatgttcagacctcacatcttctaagccgccctgtgtctctgaccccttctcatttgcctagtatctctgcccctgcctccctaattagctagggctggggtcagccactgccaatcctgccttactcaggaaggcaggaggaaagagactgcctctccagagcaaggcccagctgggcagagggtgaaaaagagaaatgtgagcatccgctcccccaccaccccgcccagcccctagccccactccctgcctcctgaaatggttcccacccagaactaatttattttttattaaagatggtcatgacaaatg

SEQ ID NO: 4621 - DNA, 1569 bp, Homo sapiens
atgctctacgagaagttcagcccggccgggcccatcctctccatccgggtctgcagggacatgatcacccgccgctccttgggctacgcgtatgtgaacttccagcagccggcggacgcggagcgtgctttggacaccatgaattttgatgttataaagggcaagccagtacgcatcatgtggtctcagcgtgatccatcacttcgcaaaagtggagtaggcaacatattcattaaaaatctggacaaatccattgataataaagcactgtatgatacattttctgcttttggtaacatcctttcatgtaaggtggtttgtgatgaaaatggttccaagggctatggatttgtacactttgagacgcaggaagcagctgaaagagctattgaaaaaatgaatggaatgctcctaaatgatcgcaaagtatttgttggacgatttaagtctcgtaaagaacgagaagctgaacttggagctagggcaaaagaattcaccaatgtttacatcaagaattttggagaagacatggatgatgagcgccttaaggatctctttggcaagtttgggcctgccttaagtgtgaaagtaatgactgatgaaagtggaaaatccaaaggatttggatttgtaagctttgaaaggcatgaagatgcacagaaagctgtggatgagatgaacggaaaggagctcaatggaaaacaaatttatgttggtcgagctcagaaaaaggtggaacggcagacggaacttaagcgcaaatttgaacagatgaaacaagataggatcaccagataccagggtgttaatctttatgtgaaaaatcttgatgatggtattgatgatgaacgtctccggaaagagttttctccatttggtacaatcactagtgcaaaggttatgatggagggtggtcgcagcaaagggtttggttttgtatgtttctcctccccagaagaagccactaaagcagttacagaaatgaacggtagaattgtggccacaaagccattgtatgtagctttagctcagcgcaaagaagagcgccaggctcacctcactaaccagtatatgcagagaatggcaagtgtacgagctgttcccaaccctgtaatcaacccctaccagccagcacctccttcaggttacttcatggcagctatcccacagactcagaaccgtgctgcatactatcctcctagccaaattgctcaactaagaccaagtcctcgctggactgctcagggtgccagacctcatcctgctgttcatgtacaaggtcaggaacctttgactgcttccatgttggcatctgcccctcctcaagagcaaaagcaaatgttgggtgaacggctgtttcctcttattcaagccatgcaccctactcttgctggtaaaatcactggcatgttgttggagattgataattcagaacttcttcatatgctcgagtctccagagtcactccgttctaaggttgatgaagctgtagctgtactacaagcccaccaagctaaagaggctgcccagaaagcagttaacagtgccaccggtgttccaactgtttaa

SEQ ID NO: 4622 - DNA, 1435 bp, Homo sapiens
cccagctcctggcggagcgagctagcctgcgaatttcagcatgagtgtactgctgaggtcaggtttggggccgttgtgtgccgtggcgcgcgcagccattccttttatttggagagggaaatacttcagctccgggaatgagcctgcagaaaacccggtgacgccgatgctgcggcatcttatgtacaaaataaagtctactggtcccatcactgtggccgagtacatgaaggaggtgttgactaatccagccaagggttattatgtgtaccgtgacatgctaggcgaaaaaggagatttcattacttcacctgaaataagtcaaatctttggggagctactaggtatatggttcattagtgaatggatggccactggaaaaagcacagctttccagctggtggaactgggcccaggtaggggaaccctcgtgggagatattttgagggtgttcactcaacttggatctgtgctgaaaaattgtgacatttcagtacatctggtagaggtaagccaaaaattaagtgagattcaagcattgacactgactaaagagaaggtcccgttagagcgaaatgctggatccccagtgtatatgaaaggtgtcactaagtctgggattccaatttcctggtaccgagatctgcacgatgttccaaaagggtacagcttttatcttgcacatgaattttttgatgttcttcctgtgcataaatttcagaaaacaccacagggatggcgagaagtatttgttgacattgatccacaggtttctgataaactgaggtttgttttggcaccttctgccaccccagcagaagccttcatacaacatgacgaaacaagggatcatgttgaagtgtgtcctgatgctggtgttatcatcgaggaactttctcaacgcattgcattaactggaggtgctgcactggttgctgattatggtcatgatggaacaaagacagataccttcagagggttttgcgaccacaagcttcatgatgtcttaattgccccaggaacagcagatctaacagctgatgtggacttcagttatttgcgaagaatggcacagggaaaagtagcctctctgggcccaataaaacaacacacatttttaaaaaatatgggtattgatgtccggctgaaggttcttttagataaatcaaatgagccatcagtgaggcagcagttacttcaaggatatgatatgttaatgaatccaaagaagatgggagagagatttaacttttttgccttgctacctcatcagagacttcaaggtggaagatatcagaggaatgcacgtcagtcaaaaccctttgcatccgttgtagctgggtttagtgaacttgcttggcagtgatatttcagcttggacattttacccttcagtcggcccaagaaatcaaaataaaggaaacacatttcatat

SEQ ID NO: 4623 - DNA, 3947 bp, Homo sapiens
ctgctcccaaaaatggcggacgcattcggagatgagctgttcagcgtgttcgagggcgactcgaccactgcggcgggaaccaaaaaagacaaggaaaaggacaaggggaaatggaaggggcctccagggtctgcagacaaggcagggaaacgttttgatggtaaattacaatcagaatcaactaataatggaaaaaataagagagatgtagatttcgaaggtacagatgaacccatttttggaaagaagcccaggatagaagagtcaataactgaagacttaagtttggcagacctgatgcccagagtcaaggtacaatcagttgaaactgttgaagggtgtacacatgaggttgcacttcctgcagaagaggattatttaccacttaaaccacgagttggaaaagctgctaaggaatacccgttcattcttgatgcttttcaaagagaggccattcagtgtgttgacaataatcagtctgttctagtatctgcacatacctcagcgggaaaaacagtatgcgccgagtatgccattgcattggccttaagggaaaagcagcgtgtaatatttaccagcccaattaaggctctgagtaaccaaaaataccgtgaaatgtatgaagaatttcaagatgttggtttgatgactggtgatgttactattaatcctacggcatcttgtcttgttatgaccacagagattttgagaagtatgctttacagaggttccgaagttatgagagaagttgcttgggttatatttgatgaaattcattatatgagagattcagaacgtggtgtagtatgggaagaaactattattttgcttcctgataacgtccactatgtctttctttcggctactattccaaatgcccgacagtttgctgaatggatttgccatttacataaacagccttgtcatgttatttacacagattatcggcccactccattgcaacactacatttttccagcagggggagatggcctgcatcttgtggttgatgaaaatggtgacttcagagaagataattttaatactgcaatgcaagtgcttcgagatgcaggtgatttggccaaaggagaccagaaagggcggaaaggaggaacaaaaggaccatcaaatgttttcaaaattgtgaagatgattatggaaagaaatttccaacctgtgattattttcagttttagtaagaaagattgtgaagcctatgcacttcaaatgaccaaattagatttcaacacagatgaagaaaagaagatggttgaagaagtattcagtaatgcaattgattgcttatccgatgaagataaaaaactccctcaggtagaacatgtacttcctcttttgaagaggggaattggtattcaccatggtggtttacttcctattttgaaagaaactatagaaattctcttttctgaaggattgataaaggccttatttgccacggagacctttgctatgggaattaacatgccagctagaactgttttatttacaaatgcccgcaaatttgatgggaaggatttccgatggatttcttctggtgaatacattcagatgtctggtcgtgctggaaggagaggaatggatgatagaggaattgtaattcttatggtagatgaaaagatgagcccaacaattggaaaacaattacttaagggctccgctgatcctctaaatagtgctttccatttgacctacaacatggttttgaacttactacgtgtagaagaaattaatcctgagtacatgttggaaaaatccttctaccagtttcagcattatagagcaattccaggagtagtagagaaggtaaagaattcagaagaacagtataataaaatagtaattcccaatgaagaaagtgtggttatctattataagattagacagcagcttgccaaattgggtaaagaaattgaagaatatattcacaaaccaaaatactgcttaccttttctacaaccaggtcgtttggtaaaggtaaagaatgaaggagatgactttggctggggagtagtggtgaatttctcaaaaaagtcaaatgttaagcctaactctggtgaactggatcctttgtatgtagtagaagtacttctgcgctgtagcaaagagagcttgaaaaattcagctacagaagctgcaaaaccagctaaacctgatgagaaaggagagatgcaggttgtcccagttttggtgcatctcctgtctgctatcagcagtgttaggctttacattcctaaagaccttcggccggtggacaatagacagagtgttttaaaatcaatacaggaagttcagaaacgttttcctgacggcatccccttattagaccctattgatgatatgggcattcaagatcaagggctgaaaaaagtcattcagaaagtagaagcttttgagcatcgaatgtattctcatccacttcacaatgatccaaatttggaaactgtgtatacgctttgtgaaaaaaaagcacagattgcaatagatattaaatctgcaaagcgagaactgaagaaagcaagaacagtcctacaaatggatgaactcaaatgtcgcaaacgtgttttaagaaggttgggatttgctacttcttctgatgtaatagagatgaaaggacgagtggcttgtgagataagcagtgctgatgagctccttctaactgagatgatgtttaatggccttttcaatgacctttctgcagaacaggcaacagcattattaagctgctttgtgtttcaagagaattctagtgagatgcccaaattaacagaacaattagcaggaccacttcgtcaaatgcaggaatgtgctaaaagaattgcaaaagtttcagcagaagccaaattggaaattgatgaggaaacttatctaagctcatttaaacctcacttaatggatgtagtatatacctgggcaactggagctacatttgcccatatctgcaaaatgacagatgtctttgaaggcagcataattcgttgtatgaggcgcctggaagaattgcttcgacaaatgtgtcaagcagcaaaagccattggaaacactgagctggaaaataaatttgcagaaggaatcaccaaaatcaagagagatattgtgtttgctgccagcctctacttgtagagtcagctaaaggaatgtgagattttaaattattgaccacctgtttgattacagttgactacaaatgcctgcaagtgtggatttggttctcccatacattttaatatgtattatatttaaatcaaacatcattcatagaaagcatattacatacatgtttatacataagcattacatttttttaataaaaatgtatacaggtggggcactgttttggtggaaggcttggagtttttttaatgagtttagagctattagataaccactgagttaaaggtaactatgtacacacaaagtgtgcatccaagaggcatagcagcagcagaagtctttaaaggcttgtacaccaggaagaaagatgcatcctcttgccttgtggcaatcattttcctttagaaaacaggccagcttcacctgggcaccctgctgcctttcaaggctggtgattgctcggatagtgattcccagttgttggtgtttcatgcagagttgtatgagagtcctcctcttttctttctttaaaagaagttctttctttgaagaaatccgatacatatacagcctacagtgcaaaatatttaatggtataatttagatcaagttaaaaactacatacaaagttgtgatcaacagcatcctaagataaatataaacaaaaggatatactttgaggtgtacagattaagcatataaaaaattagagactaactgggattttttaaagattattccaaattaagagttgctttgttatgccttcagcaaatagcttcattttgccaatactgaataaaagagttatttct

SEQ ID NO: 4624 - DNA, 1724 bp, Homo sapiens
gcactttcgagtgcgcgtttgctgcccgccgcagcccgggcgttgaaggtagtaaagcggccacccggccgcatcatggtgaccccctgtcccaccagcccctcgagccccgccgcccgagcggggaggcgggacaacgaccagaaccttcgcgccccggtgaagaagagcaggcgtccgcgcctccggaggaagcagccgctgcatcccctgaacccgtgcccgctcccgggagactccggcatttgcgacctgttcgagtcccccagctccggctcagacggcgcagagagcccctctgcggcgcggggtggtagccccctgcccggcccggcccagcccgtggcgcagctagatctacagaccttccgcgactacggccagagctgctacgccttccgcaaggcgcaggagagccacttccacccgcgggaggcgctggcacggcagccacaagtgaggtgctggtagagccagctccacgccgccgctcttcctctcctcccaggctctctcctctcctgccggctcggccctccgagcgcccgggcccgcgacagcccaggtcccgccccgagtcgaagcacaaggggccgtggaggggcgtcaccggcctcattttacagatggagaaaagtggggcgtagacggcttgagggacttgccccgtcccaagctggctactggggcacggtagagaggaattcgtttccgggttgagtctggactcctaccgaactcgggcaagttatttaacacccctgagcttctttcttcatctgcaaaatggaacccctccccttcctttgaattgctgagcccattacgcgaggtgacggcggaatcccgctgtaagctgctcagctggctgatcccggtgcaccgccaattcggcctctccttcgagtcgctgtgcctgacggtgaacactctggaccgcttcctcaccaccacgccggtggctgcagactgcttccagctgcttggggtcacctccttgctcatcgcttgcaaacaggtggaggtgcacccgccgcgcgtgaagcagcttctggccctctgctgcggcgccttctcccggcagcagctctgcaacctcgagtgcatcgtgctgcacaagctgcacttcaccctgggtgcgcccaccattagcttcttcctggagcatttcacgcacgctcgcgtggaggcggggcaggctgaggcctccgaagctctggaagcgcaagccctggcgcggggggtggcagagctgagtctggccgactatgccttcaccagctactccccttccctcctggcgatctgctgcctggcgctggcggaccgcatgctgcgggtctcgcggcccgtggacttgcgactgggagaccacccggaggcggcgctggaggactgtatgggcaagttgcagctgctggtggccataaacagtacttccttgactcacatgctgcccgttcagatctgcgagaagtgcagcctgcccccgagctcgaaataaaacagatccttcgtttccttttagtccctggcccggctgctggacctctcccgtagcctcagaagagtgcagtactggtccacagagaaggcttcaggacctgcttggtcagctgcaggttgtaaatagtgtacgatactagcatctggtattttatttattttgcagcgagcacatgaggaagctgagtctttcaccaataaacagttgtggtttgtct

SEQ ID NO: 4625 - DNA, 1467 bp, Homo sapiens
ggaaaatcgcggctccggtgccgctctgggctcagccagtgagaggccgggggtgtggtagagagaaggagccggccgggtacttaggaccgcgccagcctctgagcccggcctccttcgcactttcgagtgcgcgtttgctgcccgccgcagcccgggcgttgaaggtagtaaagcggccacccggccgcatcatggtgaccccctgtcccaccagcccctcgagccccgccgcccgagcggggaggcgggacaacgaccagaaccttcgcgccccggtgaagaagagcaggcgtccgcgcctccggaggaagcagccgctgcatcccctgaacccgtgcccgctcccgggagactccggcatttgcgacctgttcgagtcccccagctccggctcagacggcgcagagagcccctctgcggcgcggggtggtagccccctgcccggcccggcccagcccgtggcgcagctagatctacagaccttccgcgactacggccagagctgctacgccttccgcaaggcgcaggagagccacttccacccgcgggaggcgctggcacggcagccacaagtgacggcggaatcccgctgtaagctgctcagctggctgatcccggtgcaccgccaattcggcctctccttcgagtcgctgtgcctgacggtgaacactctggaccgcttcctcaccaccacgccggtggctgcagactgcttccagctgcttggggtcacctccttgctcatcgcttgcaaacaggtggaggtgcacccgccgcgcgtgaagcagcttctggccctctgctgcggcgccttctcccggcagcagctctgcaacctcgagtgcatcgtgctgcacaagctgcacttcaccctgggtgcgcccaccattagcttcttcctggagcatttcacgcacgctcgcgtggaggcggggcaggctgaggcctccgaagctctggaagcgcaagccctggcgcggggggtggcagagctgagtctggccgactatgccttcaccagctactccccttccctcctggcgatctgctgcctggcgctggcggaccgcatgctgcgggtctcgcggcccgtggacttgcgactgggagaccacccggaggcggcgctggaggactgtatgggcaagttgcagctgctggtggccataaacagtacttccttgactcacatgctgcccgttcagatctgcgagaagtgcagcctgcccccgagctcgaaataaaacagatccttcgtttccttttagtccctggcccggctgctggacctctcccgtagcctcagaagagtgcagtactggtccacagagaaggcttcaggacctgcttggtcagctgcaggttgtaaatagtgtacgatactagcatctggtattttatttattttgcagcgagcacatgaggaagctgagtctttcaccaataaacagttgtggtttgtct

SEQ ID NO: 4626 - DNA, 1008 bp, Homo sapiens
gcttctgcgcgccggggccgcctctccttccgccggtgccgcggcgcctcatggaagccccggaggcggcggaggggggcctgcagcgcggggcccggagggcagccggcgcccgaagccagggtgcacttccgagtggcgaggttcatcatggaggcaggtgtcaagctagggatgcggtccattcccattgccactgcttgcaccatttaccataagttcttttgcgagaccaacctggacgcctatgacccttacctgattgccatgtcttcaatttacttggccggcaaagtggaagagcagcacctgcggactcgtgacatcatcaatgtgtccaacaggtactttaacccaagcggtgagcccctggaattggactcccgcttctgggaactccgggacagcatcgtgcagtgtgagcttctcatgctgagagttctgcgcttccaggtctccttccagcatccacacaagtacctgctccactacctggtttccctccagaactggctgaaccgccacagctggcagcggacccctgttgccgtcaccgcctgggccctgctgcgggacagctaccatggggcgctgtgcctccgcttccaggcccagcacatcgccgtggcggtgctctacctggccctgcaggtctacggagttgaggtgcccgccgaggtcgaggctgagaagccgtggtggcaggtgtttaatgacgaccttaccaagccaatcattgataatattgtgtctgatctcattcagatttataccatggacacagagatcccctaaggtcctggcccaggcctgcccaaagagaagccacatctgcgtttgtcctttgagaggactttgactacaatacaggcatgacatcaatgaaaggaaagtcatgaaatcgatgagactgaatccctacggatttcttaaaagccagatttgtagggagaatgaatgtgcaacgtggctgaaatctattttgtgtaataaaaggtgatacaagtc

SEQ ID NO: 4627 - DNA, 1592 bp, Homo sapiens
ttctgcagatgaggcagagacacttttcttccagtggcccttatttggagaagcctggcagaagggcgtgagcctagccaagcagctatctattggtggttctctgtcatcctgcctggtgcaggggtgcgggtgagggtggagagtgtggagaacctgtctagccaacgaacagccctgcctctcactagagagttgcttggaggaacccaacagctttggggcacgttctgagcctgaaaatccaactgtacaaatctgtctcagcagcagcttacatgaaaattgtaagtttggggtgagctggcagtttggcagtgccaccaaaaagtcaaatggggtctgagactgcattcacagaagcagagggtccaggacaaaggaggggactgcttgaccaggtgtctcctttgtgaaaacctctccagttctcagaggttaggaaaaacctgagtggctttccagatggcttggaccatgtgaggacagcatcagccagtcacagtctcaggggagctgaggtgctgtctccagatccctggggcagtgtgggctggctgggggctagttacagtggggcagccagccccccacccgctttggaggagacaggagcaggcaactcgggctgtgctgatgaaaagggtctgccctgagggccgctgttccagaaatgctgggtggtgtccctaccctttgcgggactgggaacgagacatggactctccttgctctaggccaggccattgctcggcgtctgaaaccattcggtgtccagagatttctgtacacagggcgccagcccaggcctgaggaagcagcagaattccaggcagagtttgtgtctacccctgagctggctgcccaatctgatttcatcgtcgtggcctgctccttaacacctgcaaccgagggactctgcaacaaggacttcttccagaagatgaaggaaacagctgtgttcatcaacatcagcaggtatcctagggccaccttacccagcaagcctggagaggagccatccccactgctgccatctggagattttcttccccgtgggttgttggtgagaccccaggctgagcttgctggtttccataaaccaaacaaccaactcagaaattcgtgggaatacacgagacctccgtacagggaagaagagccgtcagagtgggcctggcctgtctgcttctcagcagtggcccccacccggcggggcctggcacacagcagcgtggcttcagggagtgttcccagggagcctctgcaggcccattatcctccaccacaaagggctggacttgaggatctgaagggccctctggaggccgcctcccacactgctgagcctggctttgtctggctgtggttcagtgatactttgaaccttatgctcctgggcggacagaccctaaaactcacgtggtcgtagctcctcacactgtccctaggggtgccttcaggccactgggcatgtatggaggtgtgattctctgaggaaagagtgattctgatatatgtacttgtcacattggtgttggacacatttgcgccaaaagtatggtaattctattattaaataattctctgag

SEQ ID NO: 4628 - DNA, 4762 bp, Homo sapiens
tacacgcctgtagtcccaactactcgggaggctgaggtgggaggattgcttgaacccaggaggcagaggctgcagtgaaccgagatcatgtcactgtactccagtctgggcgacacagcaagaccctgtctccaaaaaaaaaaaaaaaaaaagttgggggaagcattccatgtgcagatggagggactggcccgagtcaaggtgggaggcgtgcaaacgcaggctctcacagtgcgtggccagcagcgtgggccccggcacggggcatggagcagagtagacagtgctgagtcctgctcactgtcctgtctggggagtcatcacatctactggaggtggctcagggcaggctccatctcttgcccagggcagcagggtgggccctgtggctgtactctttgttgctgccctaaagtgccaagagaacttgttttggaatcataaatcctgagtttgcagcctgttgctctcaactcttccctggttgtgtgacctcaggcaagtcaccctttctggtttgttttcccatctgcaaaacaggatgagagccagtaaggccccttcccgccctcaagttctatgtctctggtggctttaaaggtggagtcgtttctgctgctcatctgcagtgccgagtggcagtgcctcatcccactctcagtccgtgacctggagggtgggtttataccttggaccacagtcagaggtgccgggttctcagcggcccccatcttggtccaaggctgggcctctcacctgcccctctctctcccctcagtggtggctggacctcgtggaagcccctctggctgtgtggctatggactcacgcagagcactgtcggcatcatcgggctggggcgcataggtgaggctcccaccggcccgcttgcccgccccggctctcacagcgtggtttgcatccctggcaccacgtgtctgaaggctgagaagacccacatgctgtcagggcactttgcttgcagtagagatatctctaatgagggatacagctttgtaaaacacaggcaaatacataaataaaccaaagcaggattccttaagaactcaccaggtgataaaagcaagttgcctaagggtcagggggcttcatgattccggctccataaagaacagatgaagactacaaatgtgttggggccgttaggagtggttaccgtgagagagcccattcccccgacacctactccggcttgcgttctggaaggtatgtgactcacaaagccctaactcgggccggagggctcagtgggcagagttgatctgcagttctgcagatgaggcagagacacttttcttccagtggcccttatttggagaagcctggcagaagggcgtgagcctagccaagcagctatctattggtggttctctgtcatcctgcctggtgcaggggtgcgggtgagggtggagagtgtggagaacctgtctagccaacgaacagccctgcctctcactagagagttgcttggaggaacccaacagctttggggcacgttctgagcctgaaaatccaactgtacaaatctgtctcagcagcagcttacatgaaaattgtaagtttggggtgagctggcagtttggcagtgccaccaaaaagtcaaatggggtctgagactgcattcacagaagcagagggtccaggacaaaggaggggactgcttgaccaggtgtctcctttgtgaaaacctctccagttctcagaggttaggaaaaacctgagtggctttccagatggcttggaccatgtgaggacagcatcagccagtcacagtctcaggggagctgaggtgctgtctccagatccctggggcagtgtgggctggctgggggctagttacagtggggcagccagccccccacccgctttggaggagacaggagcaggcaactcgggctgtgctgatgaaaagggtctgccctgagggccgctgttccagaaatgctgggtggtgtccctaccctttgcgggactgggaacgagacatggactctccttgctctaggccaggccattgctcggcgtctgaaaccattcggtgtccagagatttctgtacacagggcgccagcccaggcctgaggaagcagcagaattccaggcagagtttggtaagtgaagccttgatttccacaggagcctatctgtgcccagttgagaggctgtattttctctcaatggtggcattttcaggcagagggcaggagctccaggcatgtccaggggctgctgtctggtagatgtttaatctacctgcccctggacactggcccactcagggagcacagggacttacccaggtcctctccgagccagcagagcagtccagggctcccgtctttcagagtcctttgttaccattccccattgtgggcggagcagcggggatggtggtgggtgtgaggaagggctgggcactttcactgtcttttccttcataaactggcaagcactaccctagcctttgtgtgcgccccttagtccaggcggatccagcacctggcgggtccacagcctggtgagcagatggcaggctggatctcaagcattccccacgcccctgggcactttgggccctgaaggtagttaaagccagagtggtccagatcccactgtgtgtgatttgactttgtgcactcatgagagttgtccaggtagagactcggccttcaggaagcatcttgggagtttctgttagggagtcgggagcaaggggctggtctcccgccatctggttgtccctagcctgggactcagtgcctgatggagtcctgccctccctcagtgtctacccctgagctggctgcccaatctgatttcatcgtcgtggcctgctccttaacacctgcaaccgagggactctgcaacaaggacttcttccagaagatgaaggaaacagctgtgttcatcaacatcagcaggtatcctagggccaccttacccagcaagcctggagaggagccatccccactgctgccatctggagattttcttccccgtgggttgttggtgagaccccaggctgagcttgctggtttccataaaccaaacaaccaactcagaaattcgtgggaatacacgagacctccgtacagggaagaagagccgtcagagtgggcctggcctgtctgcttctcagcagtggcccccacccggcggggcctggcacacagcagcgtggcttcagggagtgttcccagggagcctctgcaggcccattatcctccaccacaaagggctggacttgaggatctgaagggccctctggaggccgcctcccacactgctgagcctggctttgtctggctgtggttcagtgatactttgaaccttatgctcctgggcggacagaccctaaaactcacgtggtcgtagctcctcacactgtccctaggggtgccttcaggccactgggcatgtatggaggtcagaccttccttctctgccactccaagcccttcctagctggtgccccttgagcctgtttacatcagtttaggggaagggggattgggtgaggtcatcctgaggactcgtccaccccaaaggtacctgtaattaccaacatttagctacaaaacaggtgacctgggaatggaagagtgaaacatgcaggaccacagggctcgcactgctggctggcagcagtcacagctgccgtgtactgggtgcctgcgtgtacccaggacagcccaggaccgtgtattactcattagtgcacaagtattacttagtgcacaatatacagtctctagaagatgacttcttgccttcagtcgccgctccctttgatggctgtggttaggggtgtgctcgttcctctgccctggtttagacaggtacctgatagcacactgtggtgcttctcagtgggggtctgggggtcaaccagatcagaaacacttggatggggcctaacacagatgcccttctgggccctgttcatgcagtagagcatgtaagaaagctttaatcctcccaacatgcctgggagttaggtggtattctccttatctcacagagtagataatttgagacacagataattcgaggcacagagaatttgagacacttgcccaaggtcacacagctagaaggaggcagggctggagttctctgagtatataagacttacagacatactgtaagtatacctaagacttactgctttaaaagtcagtgccaagtgagtggaaaaattcattctgtaggttgttctgcctcaaaggtggcctgggcggagggatctttggggtacccatgtcaccactgtcattcccaggggcgacgtcgtaaaccaggacgacctgtaccaggccttggccagtggtaagattgcagctgctggactggatgtgacgagcccagaaccactgcctacaaaccaccctctcctgaccctgaagaactgtgtgattctgccccacattggcagtgccacccacagaacccgcaacaccatgtccttgttggcagctaacaacttgctggctggcctgagaggggagccgatgcctagtgaactcaagctgtagccaaacagtagagatggagggccgggaagcaaaccgtgccctggtattgtcagacacacccaggcttgatttggatccacaggcagagccaagggaaggtgtgattctctgaggaaagagtgattctgatatatgtacttgtcacattggtgttggacacatttgcgccaaaagtatggtaattctattattaaataattctctgag

SEQ ID NO: 4629 - DNA, 4131 bp, Homo sapiens
gcaccagaagccagcagtggggttgcacacgcgcctcttcacgaggtggaaacaagatggaggattcggcctcggcctcgctgtcttctgcagccgctactggaacctccacctcgactccagcggccccgacagcacggaagcagctggataaagaacaggttagaaaggcagtggacgctctcttgacgcattgcaagtccaggaaaaacaattatgggttgcttttgaatgagaatgaaagtttatttttaatggtggtattatggaaaattccaagtaaagaactgagggtcagattgaccttgcctcatagtattcgatcagattcagaagatatctgtttatttacgaaggatgaacccaattcaactcctgaaaagacagaacagttttatagaaagcttttaaacaagcatggaattaaaaccgtttctcagattatctccctccaaactctaaagaaggaatataaatcctatgaagccaagctccgccttctgagcagttttgatttcttccttactgatgccagaattaggcggctcttaccctcactcattgggagacatttctatcaaagaaagaaagttccagtatctgtaaaccttctgtccaagaatttatcaagagagatcaatgactgtataggtggaacagtcttaaacatttctaaaagtggttcttgcagtgctatacgtattggtcacgttggaatgcaaattgagcacatcattgaaaacattgttgctgtcaccaaaggactttcagaaaaattgccagagaagtgggagagcgtgaaactcctgtttgtgaaaactgagaaatcggctgcacttcccatcttttcctcgtttgtcagcaattgggatgaagccaccaaaagatctttgcttaataagaagaaaaaagaggcaaggagaaaacgaagagaaagaaattttgaaaaacaaaaggagaggaagaagaagaggcagcaggctaggaagactgcatcagttcttagtaaagatgatgtggcacctgaaagtggtgatactacagtgaagaaacctgaatcaaagaaggaacagaccccagagcatgggaagaaaaaacgtggcagaggaaaagcccaagttaaagcaacaaatgaatccgaagacgaaatcccacagctggtaccaataggaaagaagactccagctaatgaaaaagtagagattcaaaaacatgccacaggaaagaagtctccagcaaagagtcctaatcccagcacacctcgtgggaagaaaagaaaggctttgccagcatctgagaccccaaaagctgcagagtctgagaccccagggaaaagcccagagaagaagccaaaaatcaaagaagaggcagtgaaggaaaaaagtccttcgctggggaaaaaagatgcgagacagactccaaaaaagccagaggccaagtttttcaccactcctagtaaatctgtgagaaaagcttcccacacccccaaaaaatggcccaaaaaacccaaagtaccccagtcgacctaaagtcagtgattcaactggaaggaaacctcaatgctgcctccagagctttttggaaatactcagatcctggccgcctttgtaaccttctctaaacgtcaggcctggacttaaaagattttttaaaacctccataagtagtccaggggcggtggctcacgcctgtaatcccagcactttgggaggccgaggcaggcggatcacaaggtcaacgagatcgagaccatcctggccaacatggtgaaaccctgtctgtaccaaaaatacaaaaattaattgggcatggtggtggacacctgtaatcccagctactagggaggctgaggcaggagaattgcttgaacctgggaggcggaggttgcagtgagccactgcactccagcctgatgacagagcaagactcagtctcaaaaataaataaaaataataaaacctccataagtaatcctgacatatgttcctgggtataatctgtttctaaattgtccttctgtgtatttgctaatgtaatagagggaaaaatagagtgcttctctgtggttgttcagcactttaggtagccaaggtgagaggattgcttgaggccaggagtttgagactagcctgggcaacttggtaaaaccccatctctacaaaagaaaaaaaaaaattagtgtggcatggtggcatgcatctgtgctcccagctcctcacgaggctgaggtggaaggatcaagtgagcgcaagaggttgaggctccagtgagccacgatcaccccactgtgctgtagcctgggtgacagtgtgagattctgtctcagaaaaaacaaagtataacattgctttgcttctgagtatactgttggctttccaaatcagtgggtctgacttgaggtctgtgatgtgacccttttcctcacctgctcaaccattattcacatggactccatcatattcatttgtagtcattcccagagtggcccagtgagggtctcgctgtatgagagtcggctacggaatttaggagaaacagaagtttcttggctttcatgctgagcttgttggtctaagcttatgagtcactggattagcatccatatgggaagggaaattaacatggagtcatttatacagggactaaattgaatcctacctaccggaggcaagaacatgatttatcttccataagccttatcctcttcctccttattcctcagtccatatggatttgcttatgtatgacaactccaaggaatcttggaagagtagattgctaacgtttccacaattgtcaagtatattctgaggcagtaaacacctttttaggtacgtggcctttcactggttgtgaattggtatgcatccgtagtagtaagttcacagattcactgcagtgcaggaatgttcttgcatgccaaagactcaactgctttcaaagataatgtgggtgctagatgcagtggcttacatctgtaaccctgttagggtgaccagacccaacaccaggtcgtgggggtgacaaagtccagtggagtcaaaggattgagaaaaagacagtttgagagagaagtaggaccagcagaccatcgggatggtggaggctgtgaaggccgtgagctctgggagcccacactatttattggtaatccaacaaagaaacagatggtgagaatgtgaaggtcagaagggcaccttgcattaagcacatgatttacagctgtgatggtttagcatttgctctgctacttgagatgatggagagcaggttcttttaactcaagttacagtcgatcctgggagagcaaggagccagcaagtctagacattccagagccacaggccctggattttatccaagccacgagggattttatgccctgggcttagattatggtgcgtcagggcagccttccaccctttagcacagagcttggtgttccaaagaccacaaggggttttagacccttgaccctggacatattccaagactcttttacattatgtcagaatgcaagccctgcctcagcttctcccaacactcagcttttcgcaacataatcccagcactttggaacgctgggtggattgcttgaacccaggagttcgagaccatcctgggcaatatggcaaaaccccatctttaccaaaaataagctgggtgtggtggaacatgcctgtggtcccagcttcttgggaggctgaggtgggaggattgcttgaacccgggaggtagaggctgcaatgggccatgatcacgatcctgcactccagcctgggcaacagagagagacagtccctggcccactgcccccttccctggcccagtctcaaaaaaaatgaggctgggcgtggtggctcacatctgtaatcccagccaaggctggcagatcacttgaggccaggagttctgagaccagcctggcttacatggtgaaaccccatctctactaaaaatacaaaaactagccaggcatggtgggaggcacctgtaatcccagctacttgggaggctgaagcaggagaatcactttaacccgggaggtggaggttgcagtgagctgagatcacaccactgcactccagcctgggcggcagagcaaaactgaaaaaaagagaaaaaaaaaaa

SEQ ID NO: 4630 - DNA, 1400 bp, Homo sapiens
atggcccctgcactgctcctgatccctgctgccctcgcctctttcatcctggcctttggcaccggagtggagttcgtgcgctttacctcccttcggccacttcttggagggatcccggagtctggtggtccggatgcccgccagggatggctggctgccctgcaggaccgcagcatccttgcccccctggcatgggatctggggctcctgcttctatttgttgggcagcacagcctcatggcagctgaaagagtgaaggcatggacatcccggtactttggggtccttcagaggtcactgtatgtggcctgcactgccctggccttgcagctggtgatgcggtactgggagcccatacccaaaggccctgtgttgtgggaggctcgggctgagccatgggccacctgggtgcccctcctctgctttgtgctccatgtcatctcctggctcctcatctttagcatccttctcgtctttgactatgctgagctcatgggcctcaaacaggtatactaccatgtgctggggctgggcgagcctctggccctgaagtctccccgggctctcagactcttctcccacctgcgccacccagtgtgtgtggagctgctgacagtgctgtgggtggtgcctaccctgggcacggaccgtctcctccttgctttcctccttaccctctacctgggcctggctcacgggcttgatcagcaagacctccgctacctccgggcccagctacaaagaaaactccacctgctctctcggccccaggatggggaggcagagtgaggagctcactctggttacaagccctgttcttcctctcccgctgaattctaaatccttaacatccaggccctggctgcttcatgccagaggcccaaatccatggactgaaggagatgccccttctactacttgagactttattctctgggtccagctccataccctaaattctgagtttcagccactgaactccaaggtccacttctcaccagcaaggaagagtggggtatggaagtcatctgtcccttcactgtttagagcatgacactctccccctcaacagcctcctgagaaggaaaggatctgccctgaccactcccctggcactgttacttgcctctgcgcctcaggggtccccttctgcaccgctggcttccactccaagaaggtggaccagggtctgcaagttcaacggtcatagctgtccctccaggccccaaccttgcctcaccactcccggccctagtctctgcacctccttaggccctgcctctgggctcagaccccaacctagtcaaggggattctcctgctcttaactcgatgacttggggctccctgctctcccgaggaagatgctctgcaggaaaataaaagtcagcctttttctac

SEQ ID NO: 4631 - DNA, 1718 bp, Homo sapiens
gctccctggggaagggaatgcagggttgctggggctgggcccagaagcagcagcaccagggaaaaggattcgaaaaccctctctcttgtatgagggctttgagagccccacaatggcttcggtgcctgctttgcaacttacccctgccaacccaccacccccggaggtgtccaatcccaaaaagccaggacgagttaccaaccagctgcaatacctacacaaggtagtgatgaaggctctgtggaaacatcagttcgcatggccattccggcagcctgtggatgctgtcaaactgggtctaccgattcccacctcgggttgggagaggaccacggtggccaaaattcttagcttcttcctttccctcatgcagcccatggatagccagccccagaggattatcacaaaattataaaacagcctatggacatgggtactattaagaggagacttgaaaacaattattattgggctgcttcagagtgtatgcaagattttaataccatgttcaccaactgttacatttacaacaagcccactgatgatattgtcctaatggcacaaacgctggaaaagatattcctacagaaggttgcatcaatgccacaagaagaacaagagctggtagtgaccatccctaagaacagccacaagaagggggccaagttggcagcgctccagggcagtgttaccagtgcccatcaggtgcctgccgtctcttctgtgtcacacacagccctgtatactcctccacctgagatacctaccactgtcttcaacattccccacccatcagtcatttcctctccacttctcaagtccttgcactctgctggacccccgctccttgctgttactgcagctcctccagcccagccccttgccaagaaaaaaggcgtaaagcggaaagcagatactaccacccctacacctacagccatcttggctcctggttctccagctagccctcctgggagtcttgagcctaaggcagcacggcttccccctatgcgtagagagagtggtcgccccatcaagcccccacgcaaagacttgcctgactctcagcaacaacaccagagctctaagaaaggaaagctttcagaacagttaaaacattgcaatggcattttgaaggagttactctctaagaagcatgctgcctatgcttggcctttctataaaccagtggatgcttctgcacttggcctgcatgactaccatgacatcattaagcaccccatggacctcagcactgtcaagcggaagatggagaaccgtgattaccgggatgcacaggagtttgctgctgatgtacggcttatgttctccaactgctataagtacaatcccccagatcacgatgttgtggcaatggcacgaaagctacagatgtatttgagttccgttatgccaagatgccagatgaaccactagaaccagggcctttaccagtctctactgccatgccccctggcttggccaaatcgtcttcagagtcctccagtgaggaaagtagcagtgagagctcctctgaggaagaggaggaggaagatgaggaggacgaggaggaagaagagagtgaaagctcagactcagaggaagaaagggctcatcgcttagcagaactacaggaacagcttcgggcagtacatgaacaactggctgctctgtcccagggtccaatatccaagcccaagaggaaaagagagaaaaaa

SEQ ID NO: 4632 - DNA, 2882 bp, Homo sapiens
  misc_feature (1178)..(1213): n is a, c, g, or t
ggtctgaagggtcataagggtgagaaggtgaggatggctttcctgggttcaaaggtgacataggcgtgaaaggtgacaggggcgaagttggagtccctggttccaggggagaggatggtcctgaggggccaaagggacgcactggaccgactggagaccctgggcccccagggctcatgggcgagaagggcaagctgggtgttcctggtctgcctggctatcctggacgtcagggacccaaggggtccctaggatttcctggctttcctggtgccagtggagagaagggagcccggggcctgtcggggaagtcagggcctcggggagaacggggccccacgggtccacggggtcagcggggaccccgaggtgccactgggaagtctggagctaagggaacatctggtggtgatggcccccatgggccccctggagagaggggcctccctggacctcagggtcccaacgggtttcctggaccgaaaggacccccgggcccccctgggaaggatgggctgccgggacacccaggccaaagaggagaagtgggtttccaagggaagaccggcccccctggtcctccaggagtggtgggacctcagggagcagcaggagaaaccggccctatgggggagagaggtcacccaggccccccggggccccctggagagcagggactacctgggacagctggaaaagaaggaacaaagggtgaccctggtccccctggggccccagggaaggatggtcctgctggtctgaggggattcccaggagagagaggcctcccaggcactgctggtggacctggtttgaaggggaatgaaggtccgtctggcccccctggccctgcaggctcccctggggaacgaggtgcagcaggatcagggggacccattggtccgccagggcgcccaggcccgcagggtccccctggagcagcaggagagaaaggtgtcccagtgagaagggccccattggcccgactggccgagatggagtgcagggtcctgtggggcttcctggtcctgctgggcctccaggtgtggctggagaggatggagacaagggtgaggtgggggaccccggacagaagggcaccaaagggaacaagggtgaacatggccctcctggaccccctggacccattggtcctgtggggcagcctggagcagcgnnnnnnnnnnnnnnnnnnnnnnnnnnnnnnnnnnnnggacactttggagccaaaggtgatgaaggaacaagaggattcaatgggcccccaggacccattggcctacagggtttgccaggcccctctggggagaagggagaaacaggagatgtgggtcctatgggaccacctggccccccaggacctcgaggtccagctggacccaatggcgctgatggcccacaaggtcccccaggaggtgttgggaacctgggtccccctggagagaagggggaaccaggagagtcaggatctccagggatccagggcgagccaggtgtcaagggtccacgcggggaacgtggagagaaaggagagtcggggcagccaggagagccagggccaccagggcctaaaggccccacaggcgatgatggccccaaagggaaccctggtcctgttggttttcctggtgaccctggcccccctggagaaggtggccctcggggccaggatggtgctaagggtgaccgaggcgaggatggtgagccaggacagcctggatcccctggtcccaccggggagaatggacccccagggccacttggaaagcgaggtcctgctggctcgcctggttccgaggggcgacaaggagggaagggagccaagggagatcctggcgctataggtgccccggggaagacaggcccggtgggtcctgcaggcccagcagggaaacctggccctgatggtctgagggggctcccaggctcagtgggtcagcaaggccgacctggagctacaggccaggctgggcccccaggtcctgtgggacccccagggctgcctggtctccggggcgatgctggagccaagggagagaagggccacccaggtctcattggactgattgggcccccgggtgagcagggagagaagggagatcggggacttcctgggcctcagggctcccctgggcagaagggtgagatgggtatcccaggagcatccggccccattggtcctggaggtccccccggcctccccggacctgctggccccaaaggagccaaaggagccacaggcccaggcggacccaagggagagaagggtgtgcagggccctccaggacacccggggtcccccaggcgaggtgatccagccactgcccattcagatgcccaagaagactcggcgctcggtggatggaagccgtctgatgcaggaagatgaggccataccgaccgggggagcccccggcagtcctggggggctggaggagatctttggctcactcgactccctgcgggaggagatcgagcagatgaggcggccaacagggacccaggacagccctgctcgcacctgccaggacctgaagctgtgccacccagagcttcccgatggagagtactgggtcgaccccaaccagggctgtgctcgggatgccttccgagttttctgcaacttcacagcagggggtgagacctgtgtgacgcctagggatgacgtcacgcagttctcttacgtggactcagagggctccccagtgggtgtggtccagctcaccttcctgcggctgctcagcgtctcagcccaccaggacgtctcctacccctgctctggagcagcccgtgacggtcccctgagactccgtggggccaatgaggatgagctgagcccggagactagcccctatgtcaaagaattcagagatggctgccag

SEQ ID NO: 4633 - DNA, 2202 bp, Homo sapiens
gcagcgccatgaagtccctgtctctgctcctcgctgtggctttgggcctggcgaccgccgtctcagcaggacccgcggtgatcgagtgttggttcgtggaggatgcgagcggaaagggcctggccaagagacccggtgcactgctgttgcgccagggaccgggggaaccgccgccccggccggacctcgaccctgagctctatctcagtgtacacgaccccgcgggcgccctccaggctgccttcaggcggtatccccggggcgcccccgcaccacactgcgagatgagccgcttcgtgcctctccccgcctctgcgaaatgggccagcggcctgacccccgcgcagaactgcccgcgggccctggatggggcttggctgatggtcagcatatccagcccagtcctcagcctctccagcctcttgcgaccacagccagagcctcagcaggagcctgttctcatcaccatggcaacagtggtactgactgtcctcacccacacccctgcccctcgagtgagactgggacaagatgctctgctggacttgagctttgcctacatgccccccacctccgaggccgcctcatctctggctccgggtccccctccctttgggctagagtggcgacgccagcacctgggtaagggacatctgctcctggctgcaactcctgggctgaatggccagatgccagcagcccaagaaggggccgtggcatttgctgcttgggatgatgatgagccatggggcccatggaccggaaatgggaccttctggctgcctacagttcaaccctttcaggagggcacctatctggccaccatacacctgccatacctgcaaggacaggtcaccctggagcttgctgtgtacagtgagttgggggacagaggtctccaggggtagagggtgggcactggattgtggggaccgtaatagggggagggatgatggataagagggtgcctgggcaagtaagtagagatagaaagaggttcctgggagttagaggggtaatgggaggctagaagtttcctggaaatttgaggggctttgacatgggtatttctgtgacgcaccaatggagagacagtgggttccctatttcaggagaagaaacctaaccttctttagttctgaggaagccagcaggcaaactgagggtctcttagggaggacagtatggactgatttccctatgctcatttcgtcctctttccccagaaccccccaaagtgtccctgatgccagcaacccttgcacgggccgccccaggggaggcacccccggaattgctctgccttgtgtcccacttctacccttctgggggcctggaggtggagtgggaactccggggtggcccagggggccgctctcagaaggccgaggggcagaggtggctctcggccctgcgccaccattccgatggctctgtcagcctctctgggcacttgcagccgcccccagtcaccactgagcagcatggggcacgctatgcctgtcgaattcaccatcccagcctgcctgcctcggggcgcagcgctgaggtcaccctggaggtagcaggtaagagctgggagctctgcggaatctgagccagcacccaggaagacaggagctcactctcaccccttctgcctgccaggtctttcagggccctcccttgaggacagcgtaggccttttcctgtctgcctttcttctgcttgggctcttcaaggcactgggctgggctggtaagtgtcagccctaccctgaccatgacctgaggttggtggactttccccacctactcccaagagcctgacacccatccctctgccctccacctctaccactccagcatcccatcccttctcaatctttccccacagctgtctacctgtccacctgcaaggattcaaagaaggtacagtgctccacctctctgtatctttcccttgtcactttatctcctcatcctatctcaaaacccatggagggaggctgctggtgtggtaggcagaacctaggcttggaattcacactgatctgggttaaaacctggcactatatcctaactgtaggactctttgagcatgctacttaatctatatgtttccttgggtgtagggattttaaaaagttacttaggcagtgctgtccaatagaaagataatgcaagccacatatgtaaatttaaatactctagtactcacatt

SEQ ID NO: 4634 - DNA, 4294 bp, Homo sapiens
cgtcggcggagctggaggtgcagcgcaggcactcgctggtctcgtttgtggtgcgcatcgtgcccagccccgactggttcgtgggcgtggacagcctggacctgtgcgacggggaccgttggcgggaacaggcggcgctggacctgtacccctacgacgccgggacggacagcggcttcaccttctcctcccccaacttcgccaccatcccgcaggacacggtgaccgaggtgagtgggcaccccgcgtgcgcaagggccgctatggcccccgcggtggggacggggctggggcctggctgcaccctcgcctcccagcccaggacagccgcttgcggcttttgtgtggaagaggctctgcttctagcgccagcagtgagcaagggggtgcagccctcccatactctcccaacccggggtcacagcaccgcagggaggacagcgggacgcgcgtcccgaggaggctgccccttcctggcctcggtttccagcccgtgttccgtgggatggctgagaggagtacatgggaccctgtccccaacagtggtgcagagggcacgctggacgctgggcagtggccccagtgaggccatacgcataccagaaggtgggcttctcggaccccaggccaacctcctcttcttcctccccagataacgtcctcctctcccagccacccggccaactccttctactacccgcggctgaaggccctgcctcccatcgccagggtgacactggtgcggctgcgacagagccccagggccttcatccctcccgccccagtcctgcccagcagggacaatgagattgtagacagcgcctcaggtaacggacatacaggtcacatgggacacacagcagccccgaaccctgccacagggcgaccaccaaacccgaacctaaggctctgagaaattccaagtagggattcgtagtgcgtactgcaagatggtgcctagaagatttaggattctgttgattcacacactgaagatgtgactcttgcacattatttgcagttgaaagcatcttacagggccacagcccagaggaaagaatgaaaggaggctccagacagtacctgagagactctgtcctgtcagacacgcacccacaggtgacctgtgtgtcacagctgacaaggaagcttgctaggatggccctgtgtggccaccgggtgacagctatgctgcagggcacctgtgggggtctcgggacccagccaccacacagctcggggctctgctcacaggcgccttggcctggggcggggcaggtgctgatgagcattctcctagctcttccaggcacctgctggacagggcaggctgggaacgctggggccgagtggcagttccctccctactcagctgggtggcagccactggcctcacggagcgcctgtggtctggagcgcattgctgggtcgtgggtcagggcctgttggctctgggtctctgggtctcacctgatatgggtgtgggacagtcagtgtaggccccagacaacagcggacttcagactttcccgaggaggaactggagcccaccaacctggccatgggccccgtcgtcctccaccctccatgttgctggctggagttgaggcaggtacggggccgccccacacctgccccccaagccatgtggtagggacagatgtcgtcttgaggagcagcagtaattacaagcttactgtcagccgtccctggaagcaagggccaggtcaggtcagacaggaggccgcctggctggcgggaaccactccccagacagagactgtgcccagtcctgggtccctcctcatttgggatgaactgggcctccctgtgccagcctcggtgctgcccctgcccagtgcaggcttgggctcctcactcatttgtccacgcggatgccccattccaagcagatgtccccgagccacttacccaacaggcagacgtgccagcactgttcgtggtgtgcaactggtctggcgggaagagcccctcgtgggcagagggtccagagaggtgcggtttgccccacatttgggggcactgggccacagtgggcaggggagcacatggccagtgccctgggctaggagagggataaagtcagctgtggccaagcagaagcagtattgcaggggaagggtggggagagactgtgctatgagctctgagcaggaggcaggacatggagagaagggtgggagacggacagagccagctgtgccagccgagggaccagagtgggcagtggggacggagcacagaccaccgcccacaagggtctctcctgtgacttctggcttcccgagggcagaggctgggatgggcatgtggcggctggcacccaggaggctccgccaggtccacgccaagccagcctggctcagctctggcttcctgctcacacgctggatgcctgtccccaggcctcctgacagggctctgcagcattggagaggcttgtggtggggccctcgctgtagaacaggcactgccagtgctcactgactcctcattgcagccagggcaggggcgctcccaccacctcggtttcagtcaggaagctggggggtgctgggatctgccagcagctctgtgtgctccccaggtgggctgcccggggccctggctctctggcttctacaccagtgcccctgcgaagcctcagcgcccaaggtctttgcaagccctgttcctgcatctctggagagggctgctccaggtgtgggcctggccagggcttccagaccagtccaggcactgcacctgcacattgacccccttctccactctctctcatccttcagtagccacaaagctggcagcagggtactcgcagatttgtgaggagagccgagcccttgctgactgtcctcccgtgcacggcagagtgaggcggggctcctggcctccttaggggctgcccgctctgggccacacagccagagaaacactgtccatctggctggcttggcctgtggggtgcaaaagaggtgttttcactttgctttggaaacatggaaattaccaagtgacttaaccataacaccaaatgatgatttttaaatttatgaaaattatggaaccagatgggacacagggaaacgagaacgatactgaaaaggtctgagtcctgtggggggtccaggtcccgcaagacagctaatcaggtgcccctgtctgttattcgggtaaatgtagcagctgggtccaggctcgggcagagcagctttctacagcaggggtgtccgccctctcccggggttcccacggggttcccaggggccccttactctgccacgatgtgggagttccaccaccacagggacttgagcggcagctccggctcttacgtagaaacgcgcaactccagtccctaggttgtgtccgaggttgctatggtgccatcccatcttgccgctcactctgcgactgtgcggagaaacgcaagtgcccccgaagggtgggcgtggcctctgatgaatgcacacgttggtgggaggtggcttccgtttgtacgaagcgcctcttcacgcgagcgttcacctcggtctcccctttgcttggtccagttccagaaacgccgctggactgcgaggtctccctgtggtcgtcctggggactgtgcggaggccactgtgggaggctcgggaccaagagcaggactcgctacgtccgggtccagcccgccaacaacgggagcccctgccccgagctcgaagaagaggctgagtgcgtccctgataactgcgtctaagaccagagccccgcagcccctggggccccccggagccatggggtgtcgggggctcctgtgcaggctcatgctgcaggcggccgagggcacagggggtttcgcgctgctcctgaccgcggtgaggccgcgccgaccatctctgcactgaagggccctctggtggccggcacgggcattgggaaacagcctcctcctttcccaaccttgcttcttaggggcccccgtgtcccgtctgctctcagcctcctcctcctgcaggataaagtcatccccaaggctccagctactctaaattatgtctccttataagttattgctgctccaggagattgtccttcatcgtccaggggcctggctcccacgtggttgcagatacctcagacctggtgctctaggctgtgctgagcccactctcccgagggcgcatccaagcgggggccacttgagaagtgaataaatggggcggtttcggaagcgtcagtgtttccatgttatggatctctctgcgtttgaataaagactatctctgttgctcac

SEQ ID NO: 4635 - DNA, 4843 bp, Homo sapiens
aggccaagtcctgtatctgccatgtctgtggcgtccacctcaacaggctgcattcctgcctctactgtgtcttcttcggctgtttcacaaagaagcatattcacgagcatgcgaaggcgaagcggcacaacctggccattgatctgatgtacggaggcatctactgttttctgtgccaggactacatctatgacaaagacatggaaataatcgccaaggaggagcagcgaaaagcttggaaaatgcaaggcgttggagagaagttttcaacttgggaaccaaccaaacgggagcttgaactgctgaagcacaacccgaaaaggagaaagatcacctcgaactgcaccataggtctgcgtgggctgatcaaccttgggaacacatgcttcatgaactgcatcgtgcaggccctgacccacacgccacttctgcgggacttcttcctgtctgacaggcaccgctgtgagatgcagagccccagctcctgtctggtctgtgagatgtcctcactgtttcaggagttttactctggacaccggtcccctcacatcccgtataagttgctgcacctggtgtggacccacgcgaggcacctagcaggctacgagcagcaggacgcccacgagttcctcatcgcggccctggacgtgctccaccgacactgcaaaggtgatgacaatgggaagaaggccaacaaccccaaccactgcaactgcatcatagaccagatcttcacaggcgggttgcagtcagacgtcacctgccaagtctgccatggagtctccaccaccatcgaccccttctgggacatcagcttggatctccccggctcttccaccccattctggcccctgagcccagggagcgagggcaacgtggtaaacggggaaagccacgtgtcgggaaccaccacgctcacggactgcctgcgacgattcaccagaccagagcacttgggcagcagcgccaagatcaagtgcagcggttgccatagctaccaggagtccacaaagcagctcactatgaagaaactgcccatcgtagcctgttttcatctcaaacgatttgaacactcagccaagctgcggcggaagatcaccacgtatgtgtccttccccctggagctggacatgacccctttcatggcctccagcaaagagagcaggatgaatggacagtaccagcagcccacggacagtctcaacaatgacaacaagtattccctgtttgctgttgttaaccatcaagggaccttggagagtggccactacaccagctttatccggcagcacaaagaccagtggttcaagtgtgacgatgccatcatcaccaaggccagcatcaaggacgtcctggacagcgaagggtacttgctgttctatcacaaacagttcctggaatacgagtagccttatctgcagctggtcagaaaaacaaaggcaatgcattggcaagcctcacaaagtgatcctccctggcccccccctcccccaagtctcccgccgcctccccggcctggtgacaccacctcccatgcagatgtggcccctctgcacctgggacccatcgggtcgggatggaccacacggacggggaggctcctggagctgctttgaagatggatgagatgaggggtgtgctctgggtgggaggagcagcgtacacccgtcaccagaacatctcttgtgtcatgacatgggggtgcaacgggggcctcacagcacagagtgaccgctgcctggcgttccccagcactcggtgtggaaaggcccctacctgctgtaagattatgggtccatgaaagcagtaagctggacacagaggtgtagtgtgcgggacagagggccttgcagatgcctttctgttggtgttttagtgttaaaatacggagagtatggaactcttcacctccattttctcagcggctgtgaagcagcctcctagcttcggaagtacggacactacgtcgcgttttcaagcgtgtctgttctgcaggtaacagcatcaagctgcacgtggaagcatctcgcggttttctagaaacaggcattttcttatccctctcccgctcctttttccacaaaggtgaatttcataaatgtaatactagtaaagtgaatgaattactgagtttatacagaaatttaggtaacttctcctttagtctcaagagcgagtcttgctttttaatgggtgccgtttatgttgctgcccgccctgtgtgcctggctcctctgggtgccttggtgtctgctggtggctggcagtgggcgcagcggaggagagttgtgctgcagctcatacggtgtgtctgtcatctcagtctggagtaaatgcagtgtctgccggtgtctgatgggttctgtccctcgtattttctttgccttctatcccattgcctggctaccgctgcctggcagccaagggtgttggtcgcgaagctggagtggcctctggtggagcctgcatcttgtctcgtctgcctctgctttacatttggtgtactttcgggcgtggtggcagtaaaatgacaccgtgattgagcttgtcagcagagctgaaagagaaagtagaaggatgtgcattgtttcttgtaagatatcttgcatgtatctgtgtattcaaattcaaacagagatggtttgtccatttgtccactgagaaattagaaactagggacaagggggaggaaaagtactgaaatacagtttatgaagcaagtgtgtctcgggctgtgcttgtcccaggagccccagcagcatctgaactgaggcttcttcagtcctgcaggaacaggatcatctgtctcagcggtgggcagatgttttcatagacagccagggagtaaacactgttggctctgtgggctgtatggtctctgccataaatagtacagagatgtggctgtgtctagtacaacttttagacacagaaatctgaatgacatatattgttctgtgtcaagaaacttagattttttttttaactatttaaaaacgtgaaacctattcttagctcacaggccatggagaagctggtggggaccagacccagctccttagctggctgggctggggagggggtagtgacagtggcagctgctactcactgctcagtgtggaaaacacaggacttggcaatcacagcccgcagaaccatcatgtgtggcagaagcctgagggatgcggtttcttgcccacgtgctctgttcattttctgttgtttttctgcacttaaagaattcacatggaagcatgttttataaaatgaattaccagagaaacagagatgggccgagattttcagaaatggtcccatgtgaccaagttctgctgtttgggtgacagtgctttgaagatctcctttgaggatgtgcagtctttttttttttttttttgagatggagtttgttgcccaggctggagtgagtggcacagtctcggctcactgcaacctccacctcctgggttcaagcagttctcgtgccgcagcctcccaagtagctgggactacaggcatgcaccaccacgccaggctaatttttgtatttttagtagagatggggtttcaccatgtctcaaactcctgacctcaggcgatccacccacctcagcgtcccaaagtgctgggattataggcgtgagccaccgcacctggcctatgagtggtcttttaattaggaacaaatctaatggaaaggagagttgactgaagttggcccacaggattgtgagctgggcagtgccttcatgaaggcttgccaccttgggacgccccagtttactggggtgtcttgcggagtgcagaaggctttctggcagctgcctgggtttggccagaccctgcctcccctcccgccggccaacccctagtccccttcctgtctccacttgcattcaggggtggctgctgttctgagaacattagaactgggaagagagatggagtcacatggatttttggtgggcattattctaaactttcgtatccaagttagtcccccttattccactgtggcattgccgttctaagcagttacctgatgcctgctgctgaagagctgctcacaggaggcggcggcggccctggcactgccccttgcattaggtcttgtgtttgatgtgttcttgtgaatttactttgtcagaacaaaatatttacgcgttgggttcaggaatttcttttagctccccatctggctgtgaaattcaggaaacctcccgttgcctagtaatcaccccatgtaggtgtacattgtgacaaagtgcatctgaccactaaggggcccccttggtgaccccagcacattcacagcagtgttaaaatggcctgcattttggagatgctggctggcctttcagtgcctcccaggaagacacatggcctttccctcttcagatgcctgaagggagtgctttgaggcaggtgatgtgctgggagtgtgggcggcctccctctggccccggggccctctgtggaccttggctccctccgtggacctgggcttcgtggtgagcactgcagcctccctgggcattccctccagcgccagcaccactgcaacatatagacctgagtgctattgtattttggcttggtgtgtatgctcttcattgtgtaaaattgctgttcttttgacaatttaagtgattgttttgtttactgtaagtttgaaaataaaaatgaagaaaaaaattccaatgactgtgctgtggttggagactttatttaccaagatgtttactcttcctttccccttccattttgaggagctgtgtcactcctcctcccccccagtgctttgtagtctctcctatgtcataataaagctacattttctctg

SEQ ID NO: 4636 - DNA, 2059 bp, Homo sapiens
  misc_feature (136)..(136): n is a, c, g, or t
agtctccaccgccgtccaggacccacttgcagcatggagtcgcccgcctcgagccagcccgccagcatgccccagtccaaaggaaaatccaagaggaagaaggatctacggatatcctgcatgtccaagccacccngcacccaaccccacacccccccggaacctggactcccggaccttcatcaccattggagacagaaactttgaggtggaggctgatgacttggtgaccatctcagaactgggccgtggagcctatggggtggtagagaaggtgcggcacgcccagagcggcaccatcatggccgtgaagcggatccgggccaccgtgaactcacaggagcagaagcggctgctcatggacctggacatcaacatgcgcacggtcgactgtttctacactgtcaccttctacggggcactattcagagagggagacgtgtggatctgcatggagctcatggacacatccttggacaagttctaccggaaggtgctggataaaaacatgacaattccagaggacatccttggggagattgctgtgtctatcgtgcgggccctggagcatctgcacagcaagctgtcggtgatccacagagatgtgaagccctccaatgtccttatcaacaaggagggccatgtgaagatgtgtgactttggcatcagtggctacttggtggactctgtggccaagacgatggatgccggctgcaagccctacatggcccctgagaggatcaacccagagctgaaccagaagggctacaatgtcaagtccgacgtctggagcctgggcatcaccatgattgagatggccatcctgcggttcccttacgagtcctgggggaccccgttccagcagctgaagcaggtggtggaggagccgtccccccagctcccagccgaccgtttctcccccgagtttgtggacttcactgctcagtgcctgaggaagaaccccgcagagcgtatgagctacctggagctgatggagcaccccttcttcaccttgcacaaaaccaagaagacggacattgctgccttcgtgaaggagatcctgggagaagactcataggggctggcctcggaccccactccggccctccagagccccacagccccatctgcgggggcagtgctcacccacaccataagctactgccatcctggcccagggcatctgggaggaaccgagggggctgctcccacctggctctgtggcgagccatttgtcccaagtgccaaagaagcagaccattgggctcccagccagcccttgtcgccccaccagtgcctctccctgctgctcctaggacccgtctccagctgctgagatcctggactgagggcctggatgccccctgtggatgctgctgatcctgcacagcaggctgccagtgcctgggtggatggccaccgccttgcccagcctggatgccatccaagttgtatatttttttaatctctcgactgaatggactttgcacactttggcccagggtggccacacctctatcccggctttggtgcggggtacacaagaggggatgagttgtgtgaataccccaagactcccatgagggagatgccatgagccgcccaaggccttcccctggcactggcaaacagggcctctgcggagcacactggctcacccagtcctgcccgccaccgttatcggtgtcattcacctttcgtgttttttttaatttatcctctgttgattttttcttttgctttatgggtttggcttgtttttcttgcatggtttggagctgatcgcttctcccccaccccctagggtaccagcaggcagagccttgccctctgctcaggctggggtccagtgggaggggcccaagatctctgctcagagaagtgcagggggagccttccagctcactctccctgaggactggcttgacaggggctatgggtttgctttggtgttgtttttaaaaaaagaaaatatatttttttgaaaaaacgactgcccatcccgggtcctttccctgatgggttggggcagttacctggttgctgttttaattaaaaa

SEQ ID NO: 4637 - DNA, 3258 bp, Homo sapiens
ggtgtggagcagccaagatggagccggcagtcggcggtccgggcccactgatcgtgaacaacaaacagccccagcccccgccacctccgccgccggcagccgcacagccaccacccggggcaccgcgggccgccgcgggcctcctgcctgggggcaaagcccgcgagttcaaccgcaaccagcgcaaagactcagagggctattcggagtcaccagacctggagtttgagtatgctgacacagacaagtgggctgcagagctctcggagctttacagctacacggaagggccagaattcctgatgaatcgaaaatgctttgaggaggacttccggatccatgtgacagacaagaagtggactgagctggataccaaccagcaccggacccatgccatgaggctcctggatggcttggaagtcactgccagggagaagagactcaaggtggctcgagcaattctctatgttgctcaaggcacgtttggggagtgcagctcggaggcagaggtgcagtcctggatgcgctacaacatctttctcctcctggaggtgggcacgttcaatgctttggtggagcttctgaacatggaaatagacaacagtgccgcctgcagcagtgctgtgaggaagcctgccatctccctggctgacagcacagacctcagggtcctgctcaacatcatgtacctgatagtggagaccgttcatcaggagtgtgagggtgacaaggctgagtggaggaccatgcggcagaccttcagagccgagctgggctccccgctgtacaacaatgagccatttgccatcatgctgtttgggatggtgaccaaattttgcagtggtcacgcccctcactttcccatgaagaaagttctcttgctgctctggaagacagtattgtgcacgctaggcggctttgaggagctgcagagcatgaaggctgagaagcgcagcatcctgggcctccccccgcttcctgaggacagcatcaaagtgattcgcaacatgagagcagcctctccaccagcatctgcttcagacttgattgagcagcagcagaaacggggccgccgagagcacaaggctctgataaagcaggacaacctagatgccttcaacgagcgggatccctacaaggctgatgactctcgagaagaggaagaggagaatgatgatgacaacagtctggagggggagacgtttcccctggaacgggatgaagtgatgcctcccccgctacagcacccacagactgacaggctgacttgccccaaagggctcccgtgggctcccaaggtcagagagaaagacattgagatgttccttgagtccagccgcagcaaatttataggttacactctaggcagtgacacgaacacagtggtggggctgcccaggccaatccacgaaagcatcaagactctgaaacagcacaagtacacgtcgattgcagaggtccaggcacagatggaggaggaatacctccgctcccctctctcagggggagaagaagaagttgagcaagtccctgcagaaaccctctaccaaggcttgctccccagcctgcctcagtatatgattgccctcctgaagatcctgttggctgcagcacccacctcaaaagccaaaacagactcaatcaacatcctagcggacgtcttgcctgaggagatgcccaccacagtgttgcagagcatgaagctgggggtggatgtaaaccgccacaaagaggtcattgttaaggccatttctgctgtcctgctgctgctgctcaagcactttaagttgaaccatgtctaccagtttgaatacatggcccagcacctggtgtttgccaactgcattcctttgatcctaaagttcttcaatcaaaacatcatgtcctacatcactgccaagaacagcatttctgtcctggattaccctcactgcgtggtgcatgagctgccagagctgacggcggagagtttggaagcaggtgacagtaaccaattttgctggaggaacctcttttcttgtatcaatctgcttcggatcttgaacaagctgacaaagtggaagcattcaaggacaatgatgctggtggtgttcaagtcagcccccatcttgaagcgggccctaaaggtgaaacaagccatgatgcagctctatgtgctgaagctgctcaaggtacagaccaaatacttggggcggcagtggcgaaagagcaacatgaagaccatgtctgccatctaccagaaggtgcggcatcggctgaacgacgactgggcatacggcaatgatcttgatgcccggccttgggacttccaggcagaggagtgtgcccttcgtgccaacattgaacgcttcaacgcccggcgctatgaccgggcccacagcaaccctgacttcctgccagtggacaactgcctgcagagtgtcctgggccaacgggtggacctccctgaggactttcagatgaactatgacctctggttagaaagggaggtcttctccaagcccatttcctgggaagagctgctgcagtgaggctgttggttaggggactgaaatggagagaaaagatgatctgaaggtacctgtgggactgtcctagttcattgctgcagtgctcccatcccccaccaggtggcagcacagccccactgtgtcttccgcagtctgtcctgggcttgggtgagcccagcttgacctccccttggttcccagggtcctgctccgaagcagtcatctctgcctgagatccattcttcctttacttcccccaccctcctctcttggatatggttggttttggctcatttcacaatcagcccaaggctgggaaagctggaatgggatgggaacccctccgccgtgcatctgaatttcaggggtcatgctgatgcctctcgagacatacaaatccttgctttgtcagcttgcaaaggaggagagtttaggattagggccagggccagaaagtcggtatcttggttgtgctctggggtgggggtggggtgtttctgatgttattccagcctcctgctacattatatccagaagtaattgcggaggctccttcagctgcctcagcactttgattttggacagggacaaggtaggaagagaagcttcccttaaccagaggggccatttttccttttggctttcgagggcctgtaaatatctatatataattctgtgtgtattctgtgtcatgttggggtttttaatgtgattgtgtattctgtttacattaaaaagaagcaaaaat

SEQ ID NO: 4638 - DNA, 1321 bp, Homo sapiens
ctgaacactcggaggtggcggtggatcttactccttccagccagtgaggatccagcaacctgctccgtgcctcccgcgcctgttggttggaagtgacgaccttgaagatcggccggttggaagtgacgaccttgaagatcggcgggcgcagcggggccgagggggcgggtctggcgctaggtccagcccctgcgtgccgggaaccccagaggaggtcgcagttcagcccagctgaggcctgtctgcagaatcgacaccaaccagcatcatgtccatgacactggggtactgggacatccgcgggctggcccacgccatccgcctgctcctggaatacacagactcaagctacgaggaaaagaagtatacgatgggggacgctcctgactatgacagaagccagtggctgaatgaaaaattcaagctgggcctggactttcccaatctgccctacttgattgatggggctcacaagatcacccagagcaacgccatcctgtgctacattgcccgcaagcacaacctgtgtggggagacagaagaggagaagattcgtgtggacattttggagaaccaggctatggacgtctccaatcagctggccagagtctgctacagccctgactttgagaaactgaagccagaatacttggaggaacttcctacaatgatgcagcacttctcacagttcctggggaagaggccatggtttgttggagacaagatcacctttgtagatttcctcgcctatgatgtccttgacctccaccgtatatttgagcccaactgcttggacgccttcccaaatctgaaggacttcatctcccgctttgaggtttcctgtggcataatgtgatggtcaattttctgcatcaacttgactgggctaagggatgctcagatggcaggtaaaatcattgtgcttgtgagggtgtttccagaagagatttgcctttgaatcagaagacagcaaagatttccttcagcaatgaaggaggcatccaccaaactgtcagggcccagagagaagaaaaagacaggaagggtgaatttgacctctctgactgggacatccatctctgcctatcctgggacctccacactcctggttctctggccttcagacttgatcagggactaacaccatcgcctcccacccccacctttgttctgaggcctttagcctctgaatgataccactggctttcctgcttctctatcctgcagtcggcagatcatgggacttcttcactccaaaattgtgtgagccaattcccataacagatagataaatttataaataaacacacaaatttcctac

SEQ ID NO: 4639 - DNA, 1159 bp, Homo sapiens
cttgaagatcggcgggcgcagcggggccgagggggcgggtctggcgctaggtccagcccctgcgtgccgggaaccccagaggaggtcgcagttcagcccagctgaggcctgtctgcagaatcgacaccaaccagcatcatgtccatgacactggggtactgggacatccgcgggctggcccacgccatccgcctgctcctggaatacacagactcaagctacgaggaaaagaagtatacgatgggggacgctcctgactatgacagaagccagtggctgaatgaaaaattcaagctgggcctggactttcccaatgtggggagacagaagaggagaagattcgtgtggacattttggagaaccaggctatggacgtctccaatcagctggccagagtctgctacagccctgactttgagaaactgaagccagaatacttggaggaacttcctacaatgatgcagcacttctcacagttcctggggaagaggccatggtttgttggagacaagatcacctttgtagatttcctcgcctatgatgtccttgacctccaccgtatatttgagcccaactgcttggacgccttcccaaatctgaaggacttcatctcccgctttgagggcttggagaagatctctgcctacatgaagtccagccgcttcctcccaaaacctctgtacacaagggtggctgtctggggcaacaagtaatgccttgaaggccaggaggtgggagtgaggagcccatactcagcctgctgcccaggctgtgcagcgcagctggactctgcatcccagcacctgcctcctcgttcctttctcctgtttattcccatctttacccccaagactttattgggcctcttcacttcccctaaacccctgtcccatgcaggccctttgaagcctcagctacccactttccttcatgaacatccccctcccaacactacccttccctgcactaaagccagcctgaccttccttcctgttagtggttgtatctgctttgaagggcctacctggcccctcgcctgtggagctcagccctgagctgtccccgtgttgcatgacagcattgactggtttacaggccctgctcctgcagcatggcccctgccttaggcctacctgatcaaaataaagcctcagccaca

SEQ ID NO: 4640 - DNA, 1129 bp, Homo sapiens
gggtgctgggttttcacggagtatgcctgccctgccccgggaggactgtgtttgagcttggactcgctcgctgctgaattcctgtttgttattcttttttcttccaggctagctggaaggaccagctagcctggactttggcttctttgcccgggagccctggcatgatggggtgagggctcttggtgggttagtggagagctgggggctggcccttccccatcttcttttctacccaccccctccccgccccccgccaggcccagccaccatcagtcacgtcactcctgggactgaggaggcaggggagggataaggggcagagatggaggccccactccccgaggttgcctagacaacatgagaaatcgtggccagggcctcttccgcctgcggagccgctgcttcctgcatcagtcactcccgctgggggcggggcggaggaaggggttggatgtggcagagccaggccccagccggtgccgctcagactcccccgctgtcgccgccgtggtcccagccatggcatcctatccatctggctctggcaagcccaaggccaaatatccctttaagaagcgggccagcctgcaggcctccactgcagctccagaggctcggggtggtctgggggcccctccgctgcagtctgcccgatccctgccgggccccgccccctgcctcaagcacttcccgctcgacctgcgcacgtctatggatggcaaatgcaaggagatcgccgaggagctgttcacccgctcactggctgagagcgagctccgtagtgccccgtatgagttccccgaggagagccccattgaacagctggaggagcggcggcagcggctggagcggcagatcagccaggatgtcaagctggagccagacatcctgcttcgggccaagcaagatttcctgaagacggacagtgactcggacctacagctctacaaggaacagggtgaggggcagggtgaccggagcctgcgggagcgtgatgtgctggaacgggagtttcagcgggtcaccatctctggggaggagaagtgtggggtgccgttcacagacctgctggatgcagccaagagtgtggtgcgggcgctcttcatccgggagaagtacatggccc

SEQ ID NO: 4641 - DNA, 1679 bp, Homo sapiens
ccttatacaggatgctgtgttctttgctcctttgtgaatgtctgttgctggtagctggttatgctcatgatgatgactggattgaccccacagacatgcttaactatgatgctgcttcaggaacaatgagaaaatctcaggcaaaatatggtatttcaggggaaaaggatgtcagtcctgacttgtcatgtgctgatgaaatatcagaatgttatcacaaacttgattctttaacttataagattgatgagtgtgaaaagaaaaagagggaagactatgaaagtcaaagcaatcctgtttttaggagatacttaaataagattttaattgaagctggaaagcttggacttcctgatgaaaacaaaggcgatatgcattatgatgctgagattatccttaaaagagaaactttgttagaaatacagaagtttctcaatggagaagactggaaaccaggtgccttggatgatgcactaagtgatattttaattaattttaagtttcatgattttgaaacatggaagtggcgattcgaagattcctttggagtggatccatataatgtgttaatggtacttctttgtctgctctgcatcgtggttttagtggctactgagctgtggacatatgtacgttggtacactcagttgagacgtgttttaatcatcagctttctgttcagtttgggatggaattggatgtatttatataagctagcttttgcacagcatcaggctgaagtcgccaagatggagccattaaacaatgtgtgtgccaaaaagatggactggactggaagtatctgggaatggtttagaagttcatggacctataaggatgacccatgccaaaaatactatgagctcttactagtcaaccctatttggttggtcccaccaacaaaggcacttgcagttacattcaccacatttgtaacggagccattgaagcatattggaaaaggaactggggaatttattaaagcactcatgaaggaaattccagcgctgcttcatcttccagtgctgataattatggcattagccatcctgagtttctgctatggtgctggaaaatcagttcatgtgctgagacatataggcggtcctgagagcgaacctccccaggcacttcggccacgggatagaagacggcaggaggaaattgattatagacctgatggtggagcaggtgatgccgatttccattataggggccaaatgggccccactgagcaaggcccttatgccaaaacgtatgagggtagaagagagattttgagagagagagatgttgacttgagatttcagactggcaacaagagccctgaagtgctccgggcatttgatgtaccagacgcagaggcacgagagcatcccacggtggtacccagtcataaatcacctgttttggatacaaagcccaaggagacaggtggaatcctgggggaaggcacaccgaaagaaagcagtactgaaagcagccagtcggccaagcctgtctctggccaagacacatcagggaatacagaaggttcacccgcagcggaaaaggcccagctcaagtctgaagccgcaggcagcccagaccaaggcagcacatacagccccgcaagaggtgtggctggaccacgtggacaggatccggtcagcagcccctgtggctagaggaacaccagc

SEQ ID NO: 4642 - DNA, 1451 bp, Homo sapiens
aggcccgtggatctcatcgaagatggcggcgcgatctgtgtcgggcattaccagaagagtcttcatgtggacagtctcagggacaccatgtagagaattttggtctcgattcagaaaagagaaagagccagtggttgttgagacagtagaagagaaaaaggaacctatcctagtgtgtccacctttacgaagccgagcatacacaccacctgaagatctccagagtcgtttggaatcttacgttaaagaagtttttggttcatctcttcctagtaattggcaagacatctccctggaagatagtcgtctaaagttcaatcttctggctcatttagctgatgacttgggtcatgtagtccctaactccagactccaccagatgtgcagggttagagatgttcttgatttctataatgtccctattcaagatagatctaaatttgatgaactcagtgccagtaatctgccccccaatttgaaaatcacttggagttactaagcaattcggaagagaaacacattgaaatcactgtctttccctgagcaagggggctgctcattagatcttttgatactttaccatgtgaaatactaccagaactgttctctaaacccactttttctgtagaggaatgtatcatctttttttttctcatattacaaatggacaaataacggactttctattttcatatttgctgaaaccattttttaaatgaaattaggtcattatttatgaaaagttttgagagggcactgtcaacttgggtttaagacaggaggacattgcaagttcacacctttcataagcataaagtagttgcaagaaagtattttcatcctgttaggattcatatctaagatagagttatgcattgcacatacacaaataaacttttattagatagatacctataaaagaaacataaaagtatgttgtgtattactgacagttctagattaatttcttttagaattaaagtagatttgttaaagtgtattgtgtgttgtaaattttttaagtgaaatttgcttgcgctctgccttgccatttctttccagtaagtataattttgaaaaaattagaatatatgccaaatattgagtgctgtgactcttcctcataagagatgtgccagattctatgtctaattgcatattctcttcagaggagatgatgcttattttaaacctttttctctataacttttaaaaagtggtgctgagtattcactagagtggcaagtctttgtgctttaatgcactcaatttgtggaaattacttaaatagcaggttatcagatggttctgaatgacaaaggtgttaaatttgggatttttttttcaagctttagatatggctggagagtaatgagacagaaggaatgtcttatattgttctgactgctgacaattcctaaagaaaagtgatagaagggtttttaacaaaa

SEQ ID NO: 4643 - DNA, 1861 bp, Homo sapiens
gagaaagccttgctatggatgtgacatttgggctgagatgtggatgatgagaaggagtcaggcagccgtgccctggaggagatagcgatgcagacagcagaagccctgaggacagagccagctgacagcccatgtggtgccagaggggagaactggagaagttaaatcagtccacggatgatatcaacagacgggagactgaacttgaggtccagtaggtgtttgcagatcccttcttaagcctcaactgtgtttcctcggtttcccctggctgcaggatgctcgtcagaagttccgctctgttctggttgaagcaacggtgaaactggatgaactggtgaagaaaattggcaaagctgtggaagactccaagccctactgggaggcacggagggtggcgaggcaggctcagctggaagctcagaaagccacgcaggacttccagagggccacagaggtgctccgtgccgccaaggagaccatctccctggccgagcagcggctgctggaggatgacaagcggcagttcgactccgcctggcaggagatgctgaatcacgccactcagagggtcatggaggcggagcagaccaagaccaggagcgagctggtgcataaggagacggcagccaggtacaatgccgccatgggccgcatgcgacagctggagaagaaactcaagagagccatcaacaagtccaagccttattttgaactcaaggcaaagtactatgtgcagctcgagcaactgaaaaagactgtggatgacctgcaggccaaactgaccctggcaaaaggcgagtacaagatggccctgaagaacctggagatgatctcagatgagatccacgagcggcggcgctccagtgccatggggcctcggggatgcggtgttggtgctgagggcagcagcacatctgtggaggatctgccagggagcaaacctgagcctgatgccatttctgtggcctcggaggcctttgaagatgacagctgtagcaactttgtgtctgaagatgactcggaaacccagtccgtgtccagctttagttcaggaccaacaagcccgtctgagatgcctgaccagttccctgcggttgtgaggcctggcagcctggatctgcccagccctgtgtccctgtcagagtttgggatgatgttcccagtgttgggccctcgaagtgaatgcagcggggcctcctcccctgaatgtgaagtagaacgaggagacagggcagaaggggcagagaataaaacaagtgacaaagccaacaacaaccggggcctcagcagtagcagtggcagtggtggcagcagtaagagccaaagcagcacctcccctgagggccaggccttggagaaccggatgaagcagctctccctacagtgctcaaagggaagagatggaattattgctgacataaaaatggtgcagattggctgattcatcctgggccctggccgatgtgcatatcaacatttatacatggaactggagaacattgtgccaataatcatttaatatatgccaaatcttacacgtctactctaaactgctctaatgaagtttcagtgaccttgagggctaaagattgttcttctgggtaagagctcttgggctggtttttcagagcagagttcttgttgtgggtagactgtgactaggttcacagcctttgtggaacattccgtataacggcattgtggaagcaataactagttcctatgaaagaaccagagctgggaagatggctgggaagccaggccaaagtgggggcaacagcttgcttctctttctcttctcaccctcagtttgtatgggaaaatggagatgtcctctccactttatcccacgatatct

SEQ ID NO: 4644 - DNA, 5564 bp, Homo sapiens
aggcatgagcccttgggcccagccggctgtttaatgttcttaaatagcacaagggacttctatgaactttcctagatgaaatatttattaactactaggtaaaacacttgtttgatactgcaaagggttatttctgaaacttaaacctcatgattggccaaccaagaactttttctccacagcatgctttaataatgaaatgcggattaagagtccaatattataaaacatttccacaaaagaaagaatccatctgattctcaactctgaatgcacatttgaattccctcggggagcttttaaaagtctaatgccccagtgtaccccccccagttaattaattaaataattctctggggatgagaactgactgacagcaacacttaagcttcgagactgcagtgtgcagccgaggcccactcctccagcgtcaccacctcgtctttatctgccactgtgtctcctcattgcccacagctttagcaacagcaaaagtagaattcaaaccttggtaaacaaggcttaaattattactgttcatgaccttaattaattgaaaatgattactggtgaccacagcactccatgctcttccttatggaaaaagggttgcctagaagatttaggcaatactgggagttcttatttgaagtcacagaaaggagaaacttttctcaagccgtttttattacacttagtgtattaagacaagtacaaaataaccttgtaattaagatactgtatcagtcaaaaaagaagtcactattgtatgaagagatttacaaatgactaaaatatacaggctgtgacagaattaacagtttgaaagagggttgcttttttcttttagaaatgctaaattttcttaacaagacaaaaatacagtgctctaaatatgcattaccatgaaaacgttaaagaaaagcagtcttaacacttaactactattaacagcctttgccaacacatgcctgcctactccctttcctaactttaaagaactgtttcctctaaggaatactagtgcagcataacccttaaataatttcatttatttttaaagttacaacctacagagaaattaacatcttgtcaatctaataacagtggcaaccattcttcacatgcacttctcttagaataaatccccttggctggcaggataaggcttatgctgtagaaccttctcccccacagccacaaatccccttctataagtccctcctaccctcatccccccgcatccccactggcattcacctttcccaccccaaaaagtgcagctcatggtagccttctagaaaatggttttaatgggtatcccagcatacacgcttttttaaaagccccctctgaacaccagaggtggtgaaaatgaattgtgttcttggatttttttttttttaagcctccactgggtcaaaaatatgtgctcttaatacttgagtttttgctttgtgtgtgggttttctttctttttcatttagatatcgtgggataaagtggagaggacatctccattttcccatacaaactgagggtgagaagagaaagagaagcaagctgttgcccccactttggcctggcttcccagccatcttcccagctctggttctttcataggaactagttattgcttccacaatgccgttatacggaatgttccacaaaggctgtgaacctagtcacagtctacccacaacaagaactctgctctgaaaaaccagcccaagagctcttacccagaagaacaatctttagccctcaaggtcactgaaacttcattagagcagtttagagtagacgtgtaagatttggcatatattaaatgattattggcacaatgttctccagttccatgtataaatgttgatatgcacatcggccagggcccaggatgaatcagccaatctgcaccatttttatgtcagcaataattccatctcttccctttgagcactgtagggagagctgcttcatccggttctccaaggcctggccctcaggggaggtgctgctttggctcttactgctgccaccactgccactgctactgctgaggccccggttgttgttggctttgtcacttgttttattctctgccccttctgccctgtctcctatagaaatacaaggattatcaaaagtgagtattgacaattctgccctgtctcctatagaaatacaaagattatcaaaagtgagtattgacaattctaagtcacttgagctcaaaccagtcagctaactcagccctgtagaagtcccactgttacctaccgtgcctatcagagaggttctcagtacataatcatttactgcttttattccttgtgatgttttatatattccttagctatagagatgaaatttgccatattcactttattgctgagaaacaaacctctctactatgtgcttgccaaggagactgttctgatgtgagacataggacctaagctctactttatagaagctgagtggagccaggagcccccccagaacagcacttggaaacaacctcagtgatcaatactgacagcacaaccacagagacctggtaatgcagcatgggggccctgagacctggcagaggtatggaatggcacaacagtcaggctacagaggcagtgtggcatctgggacggggtgagaaggctgctactcacctcgttctacttcacattcaggggaggaggccccgctgcattcacttcgagggcccaacactgggaacatcatcccaaactctgacagggacacagggctgggcagatccaggctgccaggcctcacaaccgcagggaactggtcaggcatctcagacgggcttgttggtcctgaactaaagctggacacggactgggtttccgagtcatcttcagacacaaagttgctacagctgtcatcttcaaaggcctccgaggccactaagttgagagagaacaccagtcacatgggttctgtcacctcctcaaacaccacaagtgcttgctgctggcaggcagctagacacagcatgggggactaaagagtctctacctctgtgagtgcctaatgaaggaatgtgacttcccaagcctgaatgaccagcctctaaagcagctggaagggaagcagctggcagcaggatcccatggatattaagcgcccttccaataaccttataaccctgccaagaaatcagtgtcaccagacaccacctaaaaatggaagattaattcagccacaaattaggacctttactccacctcagtcccccaaatacatcctcatgtgcacaggaagaggttctagtcctctgtaacatatcccaaacaaagccagctggactcaggcttctttcttagggcaatagaagcaagagctgctagaagaaacaggccagcatggaacatctgttgggacctttgttatctccagaatcctgactttgaggaacacttagtaccttcttaatgaacacagtgttccataaaacatgggaacccaccagaaatagccctcaggcctgcccaactctgagacctttcactgatggccagagaaagtgaggaccttgggaaacaaatcacacagtctgatatctccccacatacccagtggagcccctgacttaccagaaatggcatcaggctcaggtttgctccctggcagatcctccacagatgtgctgctgccctcagcaccaacaccgcatccccgaggccccatggcactggagcgccgccgctcgtggatctcatctgagatcatctccaggttcttcagggccatcttgtactcgccttttgccagggtcagtttggcctgcaggtcatccacagtctttttcagttgctgatcaagagaacaggagactaagtgaagactaccctgctagccttaagatgctttctgaatgacaggttcaagtacattttctgcccatcattctacttcaaggaattttccaagacatgactgaagacctaattaccattgtaactgctattcattcaccagacaaaatcagccaccaccatccccagatcccatccaggtgacaacctctaatatccaaaaactctcactggtggaacaaaccccatcagggaagcaaaaatgggcatcagacacaccaaagtcccacagtctagacatctggttcccagtacagtggttctcaaagttgagcttgcatcaaaatccccttgggtgttaagactcagctcactagactccaacctcagagtttctaattcagtcggtctagagtgggacctggtctatcaggtctccaggtgatgctgatgctgctggtcctaagagcatgctgtgagaaccactggcctagtacaacagagaaggtgactgaatggcagttacagaggttcagagaccactgaagacccaaccgagacaattttgaggtctgaaaactcagtaaagcctgtctctccactttccccttatagcaagtggcccatgtgatactctgctaccccagaaaagtgaagctttgagtgcagaaaaatctcatcagtgacgaagcccaaagctacacatacctcgagctgcacatagtactttgccttgagttcaaaataaggcctgcagaagacaggaaggaaagccatcagagtaatataatacagtgaccacagtcaactccacaagatgaacaagaggcatcagctaccactggccaggtcgtccttccaatatttagtaaactcttaacaaggccgtgacatgtcagtgatgctcctagctctggagactgacagacaccagatggaacgactgggctcacccagggctatattaacaggaggcccatctcaagacacggggaacccacacacacatatcttggggactctgcaacttagctcatgttcctcctctgtgggaaggctgttcagagcctcacaggttatacccagcagtaagggtggcctggatctgctctcctaatgaagttggctccccagggatgaagagcagctgaggctggagaaggggctgcttaaacctcctcctctactgaagtcaactggggaagagagagaagcaccactcctccctcacagcacagcaaggccaccactaggagggggtctcaggttggtcctcccaaaccttgtccaaagactggagttattagttggctgactcagccacataatgggcccaagaaatgccagcgtcctagcagttcccttggttctgggtcagctgaaagagcttggctcttttttaggaactttggtgcctgaacattaagagtagatcactgctttattcttgagctgttcaccctccatgaagctctcaagtcctgcatcctgaggatccagatggatgacaaggacacaggactgccattgagaaatgaagatgaactgtgtcacagatgcagtggattactgactgcccttgtaatagtccattttgcatctgttggtaattcattgaggcactcttggttttctatgagtttgtattttttgaattcaagaattgtaacatcactgttagatccctccttatttaatgagagaaataaaatatttgacacg

SEQ ID NO: 4645 - DNA, 1604 bp, Homo sapiens
gtaaaggcgcgcgggaacatggggctgtatgctgcagctgcaggcgtgttggccggcgtggagagccgccagggctctatcaaggggttggtgtactccagcaacttccagaacgtgaagcagctgtacgcgctggtgtgcgaaacgcagcgctactccgccgtgctggatgctgtgatcgccagcgccggcctcctccgtgcggagaagaagctgcggccgcacctggccaaggtgctagtgtatgagttgttgttgggaaagggctttcgagggggtgggggccgatggaaggctctgttgggccggcaccaggcgaggctcaaggctgagttggctcggctcaaggttcatcggggtgtgagccggaatgaggacctgttggaagtgggatccaggcctggtccagcctcccagctgcctcgatttgtgcgtgtgaacactctcaagacctgctccgatgatgtagttgattatttcaagagacaaggtttctcctatcagggtcgggcttccagcctcgatgacttacgagccctcaaggggaagcattttctcctggaccccttgatgccggagctgctggtgtttcccgcccagacagatctgcatgaacacccactgtaccgggccggacacctcattctgcaggacagggccagctgtctcccagccatgctgctggaccccccgccaggctcccatgtcatcgatgcctgtgccgccccaggcaataagaccagtcacttggctgctcttctgaagaaccaagggaagatctttgcctttgacctggatgccaagcggctggcatccatggccacgctgctggcccgggctggcgtctcttgctgtgaactggctgaggaggacttcctggcggtctccccctcggatccacgctaccatgaggtccactacatcctgctggatccttcctgcagtggctcgggtatgccgagcagacagctggaggagcccggggcaggcacacctagcccggtgcgtctgcatgccctggcagggttccagcagcgagccctgtgccacgcgctcactttcccttccctgcagcggctcgtctactccacgtgctccctctgccaggaggagaatgaagacgtggtgcgagatgcgctgcagcagaacccgggcgccttcaggctagctcccgccctgcctgcctggccccaccgaggcctgagcacgttcccgggtgccgagcactgcctccgggcctcccctgagaccacactcagcagtggcttcttcgttgctgtaattgaacgggtcgaggtgccaagctcagcctcacaggccaaagcatcagcaccagaacgcacacccagcccagccccaaagagaaagaagagacagcaaagagccgcagccggtgcttgcacaccgccttgcacatagcagaggctccgggctgactccttcctggtgggaaaggaagatgcctgtcctctccgtggaggaccctgggccctcaccgcaggaagcagtttgggttttgaaaggttattgggtcccttccttgggctgtgttcttgctggtgagcaaagtgttgcctgcaaaaataaaatgcagaacgtactct

SEQ ID NO: 4646 - DNA, 1988 bp, Homo sapiens
gtccctccagctacaaggtgggcaccatggcggagaagtttgactgccactactgcagggatcccttgcaggggaagaagtatgtgcaaaaggatggccaccactgctgcctgaaatgctttgacaagttctgtgccaacacctgtgtggaatgccgcaagcccatcggtgcggactccaaggaggtgcactataagaaccgcttctggcatgacacctgcttccgctgtgccaagtgccttcaccccttggccaatgagacctttgtggccaaggacaacaagatcctgtgcaacaagtgcaccactcgggaggactcccccaagtgcaaggggtgcttcaaggccattgtggcaggagatcaaaacgtggagtacaaggggaccgtctggcacaaagactgcttcacctgtagtaactgcaagcaagtcatcgggactggaagcttcttccctaaaggggaggacttctactgcgtgacttgccatgagaccaagtttgccaagcattgcgtgaagtgcaacaaggccatcacatctggaggaatcacttaccaggatcagccctggcatgccgattgctttgtgtgtgttacctgctctaagaagctggctgggcagcgtttcaccgctgtggaggaccagtattactgcgtggattgctacaagaactttgtggccaagaagtgtgctggatgcaagaaccccatcactgggaaaaggactgtgtcaagagtgagccacccagtctctaaagctaggaagcccccagtgtgccacgggaaacgcttgcctctcaccctgtttcccagcgccaacctccggggcaggcatccgggtggagagaggacttgtccctcgtgggtggtggttctttatagaaaaaatcgaagcttagcagctcctcgaggcccgggtttggtaaaggctccagtgtggtggcctatgaaggacaatcctggcacgactactgcttccactgcaaaaaatgctccgtgaatctggccaacaagcgctttgttttccaccaggagcaagtgtattgtcccgactgtgccaaaaagctgtaaactgacaggggctcctgtcctgtaaaatggcatttgaatctcgttctttgtgtccttactttctgccctataccatcaataggggaagagtggtccttcccttctttaaagttctccttccgtcttttctcccattttacagtattactcaaataagggcacacagtgatcatattagcatttagcaaaaagcaaccctgcagcaaagtgaatttctgtccggctgcaatttaaaaatgaaaacttaggtagattgactcttctgcatgtttctcatagagcagaaaagtgctaatcatttagccacttagtgatgtaagcaagaagcataggagataaaacccccactgagatgcctctcatgcctcagctgggacccaccgtgtagacacacgacatgcaagagttgcagcggctgctccaactcactgctcaccctcttctgtgagcaggaaaagaaccctactgacatgcatggtttaacttcctcatcagaactctgcccttccttctgttcttttgtgctttcaaataactaacacgaacttccagaaaattaacatttgaacttagctgtaattctaaactgacctttccccgtactaacgtttggtttccccgtgtggcatgttttctgagcgttcctactttaaagcatggaacatgcaggtgatttgggaagtgtagaaagacctgagaaaacgagcctgtttcagaggaacatcgtcacaacgaatacttctggaagcttaacaaaactaaccctgctgtcctttttattgtttttaattaatatttttgttttaattgatagcaaaatagtttatgggtttggaaacttgcatgaaaatattttagccccctcagatgttcctgcagtgctgaaattcatcctacggaagtaaccgcaaaactctag

SEQ ID NO: 4647 - DNA, 585 bp, Homo sapiens
atggcggagaagtttgactgccactactgcagggatcccttgcaggggaagaagtatgtgcaaaaggatggccaccactgctgcctgaaatgctttgacaagttctgtgccaacacctgtgtggaatgccgcaagcccatcggtgcggactccaaggaggtgcactataagaaccgcttctggcatgacacctgcttccgctgtgccaagtgccttcaccccttggccaatgagacctttgtggccaaggacaacaagatcctgtgcaacaagtgcaccactcgggaggactcccccaagtgcaaggggtgcttcaaggccattgtggcaggagatcaaaacgtggagtacaaggggaccgtctggcacaaagactgcttcacctgtagtaactgcaagcaagtcatcgggactggaagcttcttccctaaaggggaggacttctactgcgtgacttgccatgagaccaagtttgccaagcattgcgtgaagtgcaacaagggtttggtaaaggctccagtgtggtggcctatgaaggacaatcctggcacgactactgcttccactgcaaaaaatgctccgtga

SEQ ID NO: 4648 - DNA, 1982 bp, Homo sapiens
actgcagctgcgagcctcggggaagcggaacccacaggcgcgcgcgccgctgcttctggccgggcgcgggtcgtggtgcaccacgggagcgccgcaccggccggcatggaggagcgcggcgattccgagccgacccccggctgcagcggcctgggtccgggcggtgttcgcggctttggcgacggcggtggagctccttcgtgggcccctgaggacgcctggatgggcactcaccctaagtatctagaaatgatggaattagatataggagatgccacccaagtttatgtagcgttcttggtttacctggacctcatggaaagcaaaagctggcatgaagtaaactgtgtaggattaccagaactccagctcatctgccttgttggtactgagatagaaggggaggggttacagactgtggtgcctacccccatcactgcttccctcagccataacaggataagggagatcttgaaggcatctcgaaagttgcaaggtgatccagatttgccgatgtcttttactttggccatagtggagtctgattctacaatagtctattataaacttactgatggatttatgctgccagaccctcagaatatttctcttagaagatgacatccatgtttcctgatgcttgttttattcatacaagattggatttgagacccatcagactgcttcatcttttatctcagaaatagggttgacgtacatagtgagggttgacttccccattccataaggttttcattctgaagagtaaaacttccccaggtagaagactttctccttcttaaaaaatatagggtgatttctttaaaactttgttatctagagacagtttaattacagttatatacaggtttatgcctaggatgtattcagatgggtgggacctgtgtgctgcttttgtcatcccacactcaaagttgtctctttgtttcttgctgccactgccagctcattgttgagactgccatttctttctcttactcagctctccccagtgccttttggccactgcagctaccgtagaatggcattttatatgtaccttgtcacccacttctgtttactttttcctctccagtaaaaagtaaaagatttctttcaattggtcttcccattgcagttactgttatttctcttttttggttaactttaaatcaaaactcaaaatatgttcatccagagtgtgtcttaagtaacttacgtgtcttaagtaacagggaccagagacatgttacctacaagagttctgggctatccttttcattcttatcacatatcatagcttgaatattacaacagtgtgggagagaatcaaccgtaaaaatgtcttcattaattagacccagttattccacttttgttaatgtctctcaaattgtacaaagtataaaaaattatatgcacaaagatgttccaagtgacattacttttagtagcccaaattataaaccactttaaagtttggggtaaagattggcaaactttttctataaagggccagaaagtaactattttaggtttttaaacctactgtctctgtcataacttgtcaacactgctgtatgaagcacaaaagcagccatagacaatacataaacaatacgggcgtggctttgttccagtaaaactttgtttacaaatgtggtgccatagtttgtcatccctgggtctaggaaatagtcaataaacagatatatacaaatgatacataatgtacttattaaaaattagtaatgaatattattaaaaacatgaaaatattaccttaagtaaaaattgcaagacggaaaagtgtataagtgggtgtaatcatggctgaaataacagaccaagcatatgataaaaagataacaaagtaaatcaaattactaactggttatagtgggataggaggcagaaaatggatgactttgtcttttctcaatgtttttatttgtattttataataaaaatgttttaaaatt

SEQ ID NO: 4649 - DNA, 5177 bp, Homo sapiens
cacaactcgcggctctagggaaggccacagacctcagctgtacgagcggaacctggactagaggaactttcctcaggactcagggcacacagcccctcggccactactgtctgcgagcccgaggcgcaggggagcgccagcggctgcaggtacgctgcgcacccgcactggggcctgggcggtgcagcggcggcgggagggtcctgggaaccgcagccgccgaggccagtgtgtgagccggccggccgcggcaagccgcatcccccggccgcccctcgcagccccttgctccccggcagccgccgccgccctcaggcagcccagccgggcgctcgcgccaggacttccccgccgcccgcctcggcccggaacatggctgcgcgccctgctgccaccctcgcctggtcgctactgctcctctcctcagccctgctccgcgaaggctgccgagcgcgcttcgtcgccgagcgggactcggaggacgacggagaggagccggtggttttcccggagtcgcccctgcagagccccacggtgctcgtggcggtcctcgcccgcaacgcggcgcacacgctgccgcacttcctcggctgcctggagcggctggactaccccaagagcaggatggccatctgggcagccactgatcacaatgtggataatacaacagaaatattcagggagtggttgaaaaatgtacagagactctatcactatgtggagtggaggcctatggatgaaccagagtcttaccctgatgaaattggaccaaagcactggccaacctcccggtttgcccatgtgatgaaactacgacaggcagcccttcgaactgcgagggaaaaatggtcagactacattctgttcatagatgttgacaatttcctgactaatccacagaccctcaatctactgattgcagaaaacaaaactattgtggcccccatgctggagtctcggggcctgtattctaatttctggtgcggaatcacccctaagggcttctataagaggaccccagactacgttcagattcgagaatggaagaggacaggctgcttccccgtccccatggtccactccaccttcctaattgacctcaggaaggaggcctcggacaagctgactttctaccccccacaccaggactacacctggacctttgatgacatcattgtctttgccttctccagcaggcaagcaggcatccagatgtacctctgcaacagagagcactatggctacctgcccatccccctgaagccccatcagacactgcaggaagacatcgagaacctcatccatgtgcagattgaagcaatgattgaccgtcctccaatggaaccctcccagtatgtctcagttgtccctaaatatccagacaagatgggatttgatgagattttcatgataaacctcaaacgcagaaaggacaggcgggaccggatgctgcgcacactgtatgaacaggagattgaggtcaagattgtcgaggctgtggatggaaaggcactcaacacaagccagctgaaggcactgaatattgaaatgctgcctggctatcgagatccctattcctccaggcctctaacaaggggtgaaatcggctgctttctcagccactactcagtctggaaagaggtaattgatcgagagctagagaagactcttgtaattgaagacgatgtgcgttttgagcatcagtttaagaagaagctgatgaagctgatggataacattgaccaggctcagctggactgggaactgatttatattggtaggaagaggatgcaagtaaaggagccagagaaagcagtgcccaatgtggcaaacctggtcgaagccgactattcctactggaccctgggctacgtcatctctctggaaggagcacagaagctggttggagccaatccttttgggaagatgctgccagtggatgagtttctgccagtcatgtacaacaagcatcccgtagccgagtacaaggagtattatgaatccagggacctgaaagccttctctgcagaacccttgctcatctaccctacgcactacacaggccagccggggtacctgagtgacacggagacctccaccatctgggacaatgagacagtggccaccgactgggataggacacatgcctggaagtcccggaagcaaagccgcatctacagcaatgccaagaacacagaggccctgccaccgccaacctccctggacactgtgccttcaagggatgagctatgaaggctccctgggagtgtggcccacatcagttcaacatcctctggtttttctaaagggctattcatctgtttgctccagttttctgttttgttttgttcttagtggtcacagtcatctaaccaaagtgatctagtgtgatagatcgaaattaacatatttttgaccatggaaggaaataaggaaattcaacccaaatttcccaagacggctgaaagacaggttttttggaaactgttaagataaactgtaatccagacacctaattcttcagttcactactcatgtgatactgattcccacattaaggttgaacaacatggctcagagtcttgttcaagagaaagtgatcaccgagctgtcacatcagcaaatatgtagtcaaggcagccaggccaactagaccacacttattggtctagtttgtccgttttatatgacattgaaaacttgtgtgtgcaacttttgggggacaggaatcacttaaaatcatatttatttggctttttatttaaaggattctgtcacaagtcttattgaaaagtagattttttaaaaaaaaaaaatcttagtccctgttatccagtaggggtgggtatttgggtccgactgagacttggcctgtgaccatcatggcagttggagttctcatatagaggtgaccagtttgccatgtggatataatttagtagatatttgacagtttgtgtaggtatttgagggaaaaaactcaatgtttggcttttttattatggccactcgagtcaggatgctctatttataaagataaatgtaatatataaagggtgaggactggctgtgcatcctgccctgtcccgggtttgcgcgctgctacagagcttcacgctctccgctccaccccttagcctgggaacccaccgcaggtgtgagttctgtgagtcactgctaagagacagagcacattttcaggccagcaactatccttgccagagttttttcattatattttgaattatttattttacaaaatgggcgaagatattgtctttaggataaggcagagaaacagatgttgcagacttccacggcacccgggggagtggtgggtgtggacacattggttcggcaatctgattctcctgaatttcccagccaggctcttgtggggaggcctgtggatggggggatttgaactatttggaaacaaatgattctctatctcaggtgagaaacctggtcagaaacaaagggctggtcacctgatttaggccagcaaccagggaagctcttagaatcccaggcggacaccctttctcaaaagatatcccctaagagtcctttctgctttcttcacagattgattttatgtaaaatgcagagttggactacacgatttcttcccactccacaatctgtcatcctagtatagatcatggtggtttccctcaagtttatgttctcatgccctcaatctgtaaatttttgtctccagaaaaaccctcccaggcatcccataccagcaccgttcctcatcactgtccatgcaccatgcagccatatggggggccgtgcacaccccaaaccctgagcttcacacttaaactcatggggagggcccttcagagcagagtccacaggcgggtggtgctacatacacaagcttagtgtacgagtgtaagatacactttaagccagacacctaattcttcagttcactgcccatgtgatactgattgccacattaaggttgaacagcatggctcagagtctagagaaagtgatcaccaagctgtctcatcaccaaataggtagtcaaggcagcctcatctccccaggtgaggggcgggtccccactttaggacaagaggcagcttgccttccaccagacgccagcctcggccttccttcccgactcactgtgggtacccttctacactgaccagcaagctaggccgctggaggaaagggaactcacccaactctaaattgtgccgcttagacttagctgtcagtgtgacttcctttcccacccacccccagaaaaacagaaagagcatctggggagcgagtgaaaattccttaggtgattcctaagatttccttgggtatctggtttttgttttcatatttgagtgtgtgcatgtgtgcatgactttaatgacttttttaatggggtgggaggtggctggggtgctggggttgaaggaagtttgggttgatttttgtggtgttttgtttaatagagaattttttttttcctgttcccctgtcagctggtctgacagatttaagaactctcattcttaaaagactttggacttaaattctagcattttagactaggactgttctactgtgaagaaagttctgtctcctttagcccggtttgtttctccctgctcaggtctagaatcccaagcagtgttcttttctggtgaacactgtgagccgcagatgtgactttttttttaaagtcatctcttcagcaatccagaggttccttgacctcattatttgtcctatctctcccttatagtcctaagccaagacatttgacctttgacatttgacctttgcagtgtcatgtgagggcgtcagtatagaggcctttgcatctgggcctggcacccgctctctgcctctggaggctaaaccctgtctggatttctcttgggatctaacgtgggatcttctggacagacaaccgtgacatcagcagtgctggtgctgctgtgtgtggactgaacacctgcactttgcagaggacacgctgcatgggccccgcttgcggttcattcaggcctgctgcaggagctctgagaacaagaaagagtggacacccgttcccctgcatcatctgtcttgcgtgctatttcagagtggggaagtgataaactatttgccttctggagctctttgtgaaaaattaaaaaaaaacttagctc

SEQ ID NO: 4650 - DNA, 1631 bp, Homo sapiens
catgaagaggagctcagacagctcttaccacatgatacaagagccggctggtggaagagtggggaccagaaagagaatttgctgaagaggagaaggaaaaaaaaaacaccaaaaaaaaaaataaaaaaatccacacacacaaaaaaacctgcgcgtgaggggggaggaaaagcagggccttttaaaaaggcaatcacaacaacttttgctgccaggatgcccttgctttggctgagaggatttctgttggcaagttgctggattatagtgaggagttcccccaccccaggatccgaggggcacagcgcggcccccgactgtccgtcctgtgcgctggccgccctcccaaaggatgtacccaactctcagccagagatggtggaggccgtcaagaagcacattttaaacatgctgcacttgaagaagagacccgatgtcacccagccggtacccaaggcggcgcttctgaacgcgatcagaaagcttcatgtgggcaaagtcggggagaacgggtatgtggagatagaggatgacattggaaggagggcagaaatgaatgaacttatggagcagacctcggagatcatcacgtttgccgagtcaggaacagccaggaagacgctgcacttcgagatttccaaggaaggcagtgacctgtcagtggtggagcgtgcagaagtctggctcttcctaaaagtccccaaggccaacaggaccaggaccaaagtcaccatccgcctcttccagcagcagaagcacccgcagggcagcttggacacaggggaagaggccgaggaagtgggcttaaagggggagaggagtgaactgttgctctctgaaaaagtagtagacgctcggaagagcacctggcatgtcttccctgtctccagcagcatccagcggttgctggaccagggcaagagctccctggacgttcggattgcctgtgagcagtgccaggagagtggcgccagcttggttctcctgggcaagaagaagaagaaagaagaggagggggaagggaaaaagaagggcggaggtgaaggtggggcaggagcagatgaggaaaaggagcagtcgcacagacctttcctcatgctgcaggcccggcagtctgaagaccaccctcatcgccggcgtcggcggggcttggagtgtgatggcaaggtcaacatctgctgtaagaaacagttctttgtcagtttcaaggacatcggctggaatgactggatcattgctccctctggctatcatgccaactactgcgagggtgagtgcccgagccatatagcaggcacgtccgggtcctcactgtccttccactcaacagtcatcaaccactaccgcatgcggggccatagcccctttgccaacctcaaatcgtgctgtgtgcccaccaagctgagacccatgtccatgttgtactatgatgatggtcaaaacatcatcaaaaaggacattcagaacatgatcgtggaggagtgtgggtgctcatagagttgcccagcccagggggaaagggagcaagagttgtccagagaagacagtggcaaaatgaagaaatttttaaggtttctgagttaaccagaaaaatagaaattaaaaacaaaacaaaaaaaaaaacaaaaaaa

SEQ ID NO: 4651 - DNA, 3659 bp, Homo sapiens
ccaagccgccattgttccgccgagggaggacagcggggcctggcgctggcgccgagacgccgcttagcggccgccactggagacactccctcccgcctcccgggtctcctggcggcggcggagtgaggctgacagcggggaacctgggagacccctccgccctccccgcggtggcagcggccgatccccttcctcgcttccctcgactattccactgcgtctccgcgccccggcgtcatcctgcgagtccctctgacgggagggaagatggctgcacggagctggcaggacgagctggcccagcaggccgaggagggctcggcccggctgcgggaaatgctctcggtcggcctaggctttctgcgcaccgagctgggcctcgacctggggctggagccgaaacggtaccccggctgggtgatcctggtgggcactggcgcgctcgggctgctgctgctgtttctgctgggctacggctgggccgcggcttgcgccggcgcccgcaaaaagcggaggagcccgccccgcaagcgggaggaggcggcggccgtgccggccgcggcccccgacgacctggccttgctgaagaatctccggagcgaggaacagaagaagaagaaccggaagaaactgtccgagaagcccaaaccaaatgggcggactgttgaagtggctgagggtgaagctgttcgaacacctcaaagtgtaacagcaaagcagccaccagagattgacaagaaaaatgaaaagtcaaagaaaaataagaagaaatcaaagtcagatgctaaagcagtgcaaaacagttcacgccatgatggaaaggaagttgatgaaggagcctgggaaactaaaattagtcacagagagaaacgacagcagcgtaaacgtgataaggtgctgactgattctggttcattggattcaactatccctgggatagaaaataccatcacagttaccaccgagcaacttacaaccgcatcatttcctgttggttccaagaagaataaaggtgattctcatctaaatgttcaagttagcaactttaaatctggaaaaggagattctacacttcaggtttcttcaggattgaatgaaaacctcactgtcaatggaggaggctggaatgaaaagtctgtaaaactctcctcacagatcagtgcaggtgaggagaagtggaactccgtttcacctgcttctgcaggaaagaggaaaactgagccatctgcctggagtcaagacactggagatgctaatacaaatggaaaagactggggaaggagttggagtgaccgttcaatattttctggcattgggtctactgctgagccagtttctcagtctaccacttctgattatcagtgggatgttagccgtaatcaaccctatatcgatgatgaatggtctgggttaaatggtctgtcttctgctgatcccaactctgattggaatgcaccagcagaagagtggggcaattgggtagacgaagaaagagcttcacttctaaagtcccaggaaccaattcctgatgatcaaaaggtctcagatgatgataaagaaaagggagagggagctcttccaactgggaaatccaaaaagaaaaaaaagaaaaagaagaagcaaggtgaagataactctactgcacaggacacagaagaattagaaaaagagattagagaagaccttccagtgaatacctctaaaacccgtccaaaacaggaaaaagctttttccttgaagaccataagcactagtgatccagccgaagtactcgtcaaaaatagccagcctatcaagactcttccacctgctacttctaccgagccatctgtaatcttatcaaaaagtgattctgacaagagctcttcccaagtgccgccaatactacaagagacagataaatccaagtcaaataccaagcaaaatagtgtgcctccttcacagaccaagtctgaaactagctgggaatctcccaaacaaataaaaaagaagaaaaaagccagacgagaaacgtgaaattttttttcctgaattggacatgtgtttgcaaacacttgtcttgaagattatgctgtttatgcaataatttgtgaacatgtacagagttttatataaatttaaaccaatttttaaaacaaaactgcggacaccaccataaaaatggaatcaaaagaaagttaatttatgaaattaagaggtcagcagaatatactcagtgatggaagacacttgggaaagtctttttaatagaacaagaacgatcttaatttaagaatattatcctggtttaacaacagtgccctgtttacaacagattgtgccctatctcatctgcagccgaggaataaaggattctgattagaaagagggttgcctacagattagtaagcaattccttggatcttatgcacagaacttgtaccatttgaatctgttttatgcttaaatcaaagtgctttgatcaaatgcataacctgccatatctttacatatttgttggtagcaatttgtattaaagaaatcacaagtgcaaataaaaagtcatttatcatttgtttaactaaactgtcatggtttagtttacaatttttaaaaagttcttaaaatactgaaaatgcagttgacacttgtgtatggcttatgaagttatttttgatagtcttacattacttgaattgttcaaagtacagtatattttaaattaagaaaagtgaactatatgtatttgttttatacatttaaggcttagactcataaataatgctattgtttatgatttgaaaactttcaggcaaaatccaatttacatttttcccttccctagcaattacttttttccagcttcaactcttcttagttactaatactttgttgactttaaaaatgaaatcattcacaaacttttggtatatgatggagaatgaaaaactagagtcagacagctttaattgacattgtcaacacctccagttatcaggaatacatttttttactgccttaacctgtagtgcgtagaatatgcatcaatttcttgaaggagattcatgtttttataagaattttcatgtaattattgcaattgtggtcaaataaggaacgtttcctgcttgaaattatattgatttaaatgatgtgtgagatgtttcaccattttcaggcactgtgtaattctattgtaataaactggcaggtatctttgtaactataaatagtgcatgctcagccatgtacactgtaaatagcctttaccaaacgtgtttgacaaggaccataattaacatcacttagtgaattgtgataaagaaaaaaaagccatgatttattcgatgtgattggcttgtttttatgtggcgccaagaacgaacctgtttaacagctgtaaccaatggtactgatctatccatccaatgttgtcattatatttgactgtggttcaacagtattgcgttgtcagactaggaaagctaaacgaacaaaatggttttagttttgctgaagactggccttattaatggacagctttcctaacaagagattattaacttttatcaggtgttaacatctgtttcaggaacatggcagtatgtttacatgtcagaagttttgtttaattctatggtatttctaaattgacttgtttaaataaattcagcaaatgg

SEQ ID NO: 4652 - DNA, 3215 bp, Homo sapiens
tgtgatcagaagtggggcagggctttaacaacacccctctgcctggctccccacctgggcctccccaccacgtccagccattccatgtatcacctgtgttctgcctgtcaagctctgttcccagaatctggatgcaggagctgggagtgtggctctgttttgagctgagtcgagaggaggggccctgtgtgtccttggaggccccgggctcatcctctgcctggctgtggtttgtgggatttctatggggtcgtgagcatgaggctcctgtagttactggtgcccagcgccgcgcagctcacggtcctccaggagccacacggcccccaccaggcgggctccaggcctggtgcccagccccttctctgagactctggggttatcttgcgtcatgttctgaggcccacctgggctctctcccgcctgtgaggttggcagcacctttcttggatcatgttctttgtctgggatggagggagggaagaattctccgttgcatggctcgcgtcttctgctttagaattcagccagctacaaatcctaactccctccccacctctcttttctcctgaaaacagaacatgaaaggctcccggagcagcgctgactcctccaggaaacactgaggcagacgtgtcggttccattccatttccatttctgcagcttagcttgtgtcctgccctccgcccgaggcaaaacgtatcctgaggacttcttccggagagggtggggtggagcagcgggggagccttggccgaagagaaccatgcttggcaccgtctgtgtcccctcggccgctggacaccagaaagccacgtgggtccctggcgccctgcctttagccgtggggcccccacctccactctctgggtttcctaggaatgtccagcctcggagaccttcacaaagccttgggagggtgatgagtgctggtcctgacaggaggccgctggggacactgtgctgttttgtttcgtttctgtgatctcccggcacgtttggagctgggaagaccacactggtggcagaatcctaaaattaaaggaggcaggctcctagttgctgaaagttaaggaatgtgtaaaacctccacgtgactgtttggtgcatcttgacctgggaagacgcctcatgggaacgaacttggacaggtgttgggttgaggcctcttctgcaggaagtccctgagctgagacgcaagttggctgggtggtccgcaccctggctctcctgcaggtccacacaccttccaggcctgtggcctgcctccaaagatgtgcaagggcaggctggctgcacggggagagggaagtattttgccgaaatatgagaactggggcctcctgctcccagggagctccagggcccctctctcctcccacctggacttggggggaactgagaaacactttcctggagctgctggcttttgcacttttttgatggcagaagtgtgacctgagagtcccaccttctcttcaggaacgtagatgttggggtgtcttgccctggggggcttggaacctctgaaggtggggagcggaacacctggcatccttccccagcacttgcattaccgtccctgctcttcccaggtggggacagtggcccaagcaaggcctcactcgcagccacttcttcaagagctgcctgcacactgtcttggagcatctgccttgtgcctggcactctgccggtgccttgggaaggtcggaagagtggactttgtcctggccttcccttcatggcgtctatgacacttttgtggtgatggaaagcatgggacctgtcgtctcagcctgttggtttctcctcattgcctcaaaccctggggtaggtgggacggggggtctcgtgcccagatgaaaccatttggaaactcggcagcagagtttgtccaaatgacccttttcaggatgtctcaaagcttgtgccaaaggtcacttttctttcctgccttctgctgtgagccctgagatcctcctcccagctcaagggacaggtcctgggtgagggtgggagatttagacacctgaaactgggcgtggagagaagagccgttgctgtttgttttttgggaagagcttttaaagaatgcatgtttttttcctggttggaattgagtaggaactgaggctgtgcttcaggtatggtacaatcaagtgggggattttcatgctgaaccattcaagccctccccgcccgttgcacccactttggctggcgtctgctggagaggatgtctctgtccgcattcccgtgcagctccaggctcgcgcagttttctctctctccctggatgttgagtctcatcagaatatgtgggtagggggtggacgtgcacgggtgcatgattgtgcttaacttggttgtatttttcgatttgacatggaaggcctgttgctttgctcttgagaatagtttctcgtgtccccctcgcaggcctcattctttgaacatcgactctgaagtttgatacagataggggcttgatagctgtggtcccctctcccctctgactacctaaaatcaatacctaaatacagaagccttggtctaacacgggacttttagtttgcgaagggcctagatagggagagaggtaacatgaatctggacagggagggagatactatagaaaggagaacactgcctactttgcaagccagtgacctgccttttgaggggacattggacgggggccgggggcgggggttgggtttgagctacagtcatgaacttttggcgtctactgattcctccaactctccaccccacaaaataacggggaccaatatttttaactttgcctatttgtttttgggtgagtttcccccctccttattctgtcctgagaccacgggcaaagctcttcattttgagagagaagaaaaactgtttggaaccacaccaatgatatttttctttgtaatacttgaaatttatttttttattattttgatagcagatgtgctatttatttatttaatatgtataaggagcctaaacaatagaaagctgtagagattgggtttcattgttaattggtttgggagcctcctatgtgtgacttatgacttctctgtgttctgtgtatttgtctgaattaatgacctgggatataaagctatgctagctttcaaacaggagatgcctttcagaaatttgtatattttgcagttgccagaccaataaaatacctggttgaaatac

SEQ ID NO: 4653 - DNA, 3878 bp, Homo sapiens
gcgcgcgctagcgcgcgtctccgggtgccgctgacgggcgtgcgcgcttgtgcggagccggaggtgggggccgaaccagccaaggttgcgggggccgcagagccggacgaagacggagggcggagccggcttcgggactgcggagactacacaccgagcgagcgcctgggcccgaagggagcgatgctgtggttccagggcgccattccggccgccatcgcgacggccaaaaggagcggcgcggtcttcgtggtgttcgtggcaggtgatgatgaacagtctacacagatggctgcaagttgggaagatgataaagttacagaagcatcttcaaacagttttgttgctattaaaatcgataccaaaagtgaagcctgcctacagttttcacaaatctatcctgtagtgtgtgttccatccagtttctttattggagacagtggaattcccttggaagtaatagcaggaagtgtttctgcagatgaacttgttacaagaattcacaaggtccgacagatgcatttgctaaaaagtgaaacatcagtagcaaatggcagtcagtcagaaagttcagtgtctactccatctgcgtcatttgaacctaacaacacttgtgaaaactctcagtccagaaatgcagagctttgtgagataccacccacttctgatacaaagtcagatactgcaacaggaggagaaagtgcaggccatgccacttcctctcaggagcctagtggatgctcagatcagagacctgcagaggacctcaacatccgagtggaaagactaacaaaaaaacttgaagaaaggagagaagagaaaagaaaagaggaagaacagagagaaattaagaaggaaattgagaggagaaaaactggaaaagaaatgttggattataaaagaaaacaagaagaagaattaacaaaaagaatgctggaggaaagaaacagagagaaagcagaagatagggcagctcgagaacgtataaaacagcagattgcattggaccgtgcagagagagctgctcgttttgcaaagacaaaggaagaagtagaggctgccaaagctgctgccttgctagcaaaacaggcagaaatggaagtcaagagggaatcttatgcaagagaaagaagcactgttgcaagaattcaattccgtcttcctgatggttcttcctttacaaatcagttcccttctgatgctcctctagaagaggcaaggcagtttgctgcacagactgttggcaacacttacggtaatttttcgttagcaaccatgtttcccaggagggaatttaccaaagaagattataaaaagaagttactggatttggaacttgccccaagcgcttcggtggtactgttgccagcaggaagaccaactgcatccattgtacactcttccagcggagacatttggaccttgttgggaacagtgctttatccattccttgccatctggagattaattagcaatttcttgtttagtaatccgcctcccacacagacttcagtgagagtaacatcgtcagaacccccaaaccctgcatcatctagcaaatcagaaaaaagggaaccagtgagaaaaagagtgctggaaaaacgtggagacgactttaaaaaggaggggaaaatttatagattaaggactcaagatgatggtgaagatgaaaacaacacttggaatggaaattccactcaacagatgtagtgtgacaagtataatatgtgcaataatcattgtttctcttatgatttaattcaactaaaattctactggagaagtgggactgctttatattttccaactggtctataaaatgtctctttattcctgcttagtgggtgtgggttgaaggtgtttaactcagaaaagtaaagacaggaaataactctctgctaggtccttgcttatatggcaaccactgctagaaccctaaaagaaccaaaaatctgccacagcctgcctccatcagcttcttatttagtatttcatatgcccattagccctatgcttcagatgacacgttttgtttagagctactttgctccaagactcttaagcccaaagtaactggtatgtcactgagtaacttgactcggtgtcagagcattttaactagccactcagatgagaatttatgtttaacttctctttttactcatcagctgcaagcaaaatcttgtagtttttaatcttaaacactgaataaaaaaactttcccctaaattggaatgatcttagttttgctttgagttttgttatctagcatctttttgttgcacagggctctattgaggtcctatgtctctgatttttttttttccccagtattgccctggagctgtctctggaaagtagctggcgaggttaccttaactatcactgaagaaagaaattttctgacacactgatggcatgtgacttgtctcctaagtcagtgaggcatcactttgtttgcataaagtatacggtttgttaaggcctttgttcttgtgagatgcaaaacagctgctagtctgcaacctagttttccctctcacctttaactgacgttttgtcctcaataattacacaaggacctagagtacctataggacaaaaagtatagaataaaaatatgcctttagtcatttggtttttcttaaaaagttgagattcttaatctgacttacatgttactttatccgtatgtctttgttagtggagaccgctaaactaatgatgtttgaaaacagttcctctgttttagattggaagatagcactctagagtggacatacggaaagactgtgactttattttgtaatgggaggaagaaattttctcagagcaaactttctattttttacctgtgaaataacagtgactttttaaaatggtgacagtgttggcaaggaaacagcaacacaggctgcgctgttggtaggagtgaaaaccagtataattcttctgaaaaacatttatcagaaacttaaaatatttcataccgtttgatccagtagcttcttctaaatcataaatgcagacaatgtttaggtaaagacatactcattaagtgttatttattttactcaagaactggaaaccaactaaatgccttctatagaagtaatttttgatgaggagaaatggtacaatactaattaacaacttggtttaacatgtttactgagcatctgttaagtgttgggggaaaaagcagcaggatccagagctataggtacagtgtgatctcagctttgcaaacacattttctacatagatagtactaggtattaatagatatgtaaagaaagaaatcacaccattaataatggtaagattggtttatgtgattttagtggtatttttggcacccttatatatgttttccaaactttcagcagtgatattatttccataacttaaaaagtgagtttgaaaaagaaaatctccagcaagcatctcatttaaataaaggtttgtcatctttaaaaatacagcaatatgtgactttttaaaaaagctgtcaaataggtgtgaccctactaataattattagaaatacatttaaaaacatcgagtacctcaagtcagtttgccttgaaaaatatcaaatataactcttagagaaatgtacataaaagaatgcttcgtaattttggagtaggaggttccctcctcaattttgtatttttaaaagtacatggtaaaaaaaaaaattcacaacagtatataaggctgtaaaatgagaattctgccccctcacctcttaccccagtactattctccagaggtaatctattaacaatttcttatgtaattttcagaaaatttgtatgcgtatataagcaaatatgtaatctttattttttaaataaatgggatcatattat

SEQ ID NO: 4654 - DNA, 1197 bp, Homo sapiens
  misc_feature (457)..(626): n is a, c, g, or t
aacaaagcagaggggtttattataggaacattctcaaactgcaacggaaaagatgtccgtacaggtggatggggatggagatccacctcggagaacacagacttcagggggcctcctgcctggcacgttctttctctcccgtatcacctaagaccctgagacctccaccctctgcaggagagacccacaaagaagcctcctccctgtggcctggctcccatcagggacagtcctgtttttagagcaagaacagtctgtacttcagacaggatcccaacccccacccaaattcaatgtcgaccgtctgagcagccagcttcattggctgcaaacgcctctctcaggtgagtcaaaggagacacgacggggaaccagggggccctaggtgaggatgtcatgggcctggtgctccaccagcatctccatgctcttcacatccgtgcaccagaactccagnnnnnnnnnnnnnnnnnnnnnnnnnnnnnnnnnnnnnnnnnnnnnnnnnnnnnnnnnnnnnnnnnnnnnnnnnnnnnnnnnnnnnnnnnnnnnnnnnnnnnnnnnnnnnnnnnnnnnnnnnnnnnnnnnnnnnnnnnnnnnnnnnnnnnnnnnnnnnnnnnnnnnnnnnnatccttgatgtcaacacagcccaaaaaccgcagagcatctttgtagtaggacgcgtggtttccgattgtttgatagtatttactggagagatcatagaaacgactgtgaaccgatgtcacaccaggaaggttgttgagcatttcttcaacatcttcaattgtttcctttgtaacctgtaggtccccgatgtttaattttagagctccaattgctgttttacacaggatcactgcctcatcactacttttcaccttctcacgagtcttttccagaaaagtaagagccacattaggatccagtcatctgtctaactacgtgaagaatgatttccacgagggacagaggattcaccctgtgttcaaattcactgataaagttttcataaagcttaatgagaccatctccttgggcaaagcacggatcctgcacaaaatcaagcacctgaagtgtcagctgatgccacaacttcttcgtgtagagctcctccagacggtgccacacagcgggctgcccgggcccggagctctggctctgctgtaggaagcccggtacgtccttcatgacagcagg

SEQ ID NO: 4655 - DNA, 886 bp, Homo sapiens
gcagcgccggaacctcagaggcgggtcgcagcggcgcagaggaggtcagctgcgggagcgtttccggggacggtgccgccatgagattgaccccgcgcgcgctgtgcagcgccgcccaggccgcctggcgggagaacttccccctgtgcggtcgcgacgtggcgcgctggttcccgggccacatggccaaggggctgaagaagatgcagagcagcctgaagctggtggactgtatcatcgaggtccacgatgcccggatcccactttcaggccgcaaccctctgtttcaggaaacccttgggcttaagcctcacttgctggtcctcaacaagatggacttggcggatcttacagagcagcagaaaattatgcaacacttagaaggagaaggcctaaaaaatgtcatttttaccaactgtgtaaaggatgaaaatgtcaagcagatcatcccgatggtcactgaactgattgggagaagccaccgctaccaccgaaaagagaacctggagtactgtatcatggtcattggggtccccaacgtgggcaagtcctccctcatcaactccctccggaggcagcacctcaggaaagggaaagccaccagggtgggtggcgagcctgggatcaccagagctgtgatgtccaaaattcaggtctctgagcggcccctgatgttcctgttggacactcctggcgtgctggctcctcggattgaaagtgtggagacaggcctgaagctggccctgtgtggaacggtgctggaccacctggtcggggaggagaccatggctgactacctgctgtacaccctcaacaaacaccagcgctttgggtgagtgcagtgaatgcagggcagctggggcccctcctcctagtcacctcattt

SEQ ID NO: 4656 - DNA, 1793 bp, Homo sapiens
gggcggcgcccaatgggctgcgcggagcgtcacttcccggcagcgggaggcgagtggcgagtggcgagtggcgagtgtcaggggggcggccggcgggggcggggcggccggaggaggcgttggcagcgggctcggacccacgcggcgccgcggcccgcctggcctgcagcgctcccacccccggcggcggcacgatgccctttgacttcaggaggtttgacatctacaggaaggtgcccaaggaccttacgcagccaacgtacaccggggccattatctccatctgctgctgcctcttcatcctcttcctcttcctctcggagctcaccggatttataacgacagaagttgtgaacgagctctatgtcgatgacccagacaaggacagcggtggcaagatcgacgtcagtctgaacatcagtttacccaatctgcactgcgagttggttgggcttgacattcaggatgagatgggcaggcacgaagtgggccacatcgacaactccatgaagatcccgctgaacaatggggcaggctgccgcttcgaggggcagttcagcatcaacaaggtccccggcaacttccacgtgtccacacacagtgccacagcccagccacagaacccagacatgacgcatgtcatccacaagctctcctttggggacacgctacaggtccagaacatccacggagctttcaatgctctcgggggagcagacagactcacctccaaccccctggcctcccacgactacatcctgaagattgtgcccacggtttatgaggacaagagtggcaagcagcggtactcctaccagtacacggtggccaacaaggaatacgtcgcctacagccacacgggccgcatcatccctgcaatctggttccgctacgacctcagccccatcacggtcaagtacacagagagacggcagccgctgtacagattcatcaccacgatctgtgccatcattggcgggaccttcaccgtcgccggcatcctggactcatgcatcttcacagcctctgaggcctggaagaagatccagctgggcaagatgcattgacgccacacccagcctaatggccgaggaccctgggcatcgccagccttgcctccagtgccctgtctcctttggccctcaatctggtcccaaatctggctgtgtcccaaagggtgtgtgggaagtggggggaaagtagaggatggctcgatgttttgcagctacctcttttccccgtgtttctttttagacaaattacactgcctgaagttgcagttcccctttccctggggagccccaagaacagagtcaggcaaggggtggggagtccaggggaacatcccagaatgcatatcgatcagctctcagccaggcttcgacaatctcgcagcccccactaggtggacacattaatgatttggtttctcccctgggcagccaacctgccccagaggcaccagacctgggctttcagctttgggaccaggctgcccaaaggtactcctttatacacccggcaccttccacgaaagatggtacttcccaagcaagcccctatgatttgtcactatagatggaaatgtgtggcatgcacatgagttgaaattcttttatgcatttttttgaagaaaaaaaaaaaaacaactctgaggacataggggatgtcagtttcctatggaagagacacctctgacccgttattcttataatcaaaatctgaagggaaaaaaatgttttagttctttccccactcgttgggttcaactagattaaaaggctgattttcag

SEQ ID NO: 4657 - DNA, 3947 bp, Homo sapiens
gaagcccaggctctccttagttgactgtgtgttaatcacccagcaatttcattactcaacagctctccagagttgcacattacagctggggtagaaattgggtgctgaaggccaggcagagcatttggctgtagggaggccgatcctcctcgggcctgttaccggcgggtctttgttcttagacctggggttcttggcctcacggattccaaggaatggaacgttgggccatgcggtgaacgagctctatgtcgatgacccagacaaggacagcggtggcaagatcgacgtcagtctgaacatcagtttacccaatctgcactgcgagttggttgggcttgacattcaggatgagatgggcaggcacgaagtgggccacatcgacaactccatgaagatcccgctgaacaatggggcaggctgccgcttcgaggggcagttcagcatcaacaaggtatggaagccctgcctcagccctttctacctgctcccctttcctgctgtctccccgctccctggaaactggttgtggaggcactcactcgacctgaccctgacacagcccccagcaagcgagggttcgtgtccagctgcctggccgttcctgctgagaatctggatgggggtccaggctccctggggttttaagcccctgatggctggttcaggaaggagctactcttctctccagtgagggggacaatgatgagaagacctgaggatttgcagcccccagccctgggttcaagtcccagctctaccccttcttggcccctacaagtcacttgacccatcttaggctgagggtgtgatggcgataatagtatcacgataccacccacttcacaaagtttgtgtggggattaaatgagctaatgcagattcattcattcagaaaaatttttgaatggcacgttctgtgttccagggtcggtgataggctctggggcagcgttcctgggctggtggggctcccattctggtagagggagacagtctacaaaccagaaagcatcagggatgctaagtgcagtgatgaggaataaagccaaggggagtgagatgaggtgggcttgaaagtaccttgtccgctcagaaggaccattcaaggttcactgttgttttgtcctcagaaccaggagcttcagatcctaagtcaagtgggtgaacgcagtgcccttgggagggccgaggcacccggtggcagctggcagggttttgctcagcacgtgccggccttcctcgaagctcggtactgtcacagtggagcctctcaacaacgctgtgaggcagcaccatttgacaggttaggatgctggggcccagagaggttaagtgtcttgcccgaggtcacacagctatctgcatgtcccacaactccccttcccagccccagccaaactgagccactggccactcctggcttctccttgtccctcctgcagcctctgctcagaacgcccttcctccagaccctgacacctgagctggggttgcaaagtcactggccacatccagcccaaagataaattttgtttgtccagtatagcatttaactgcatcagaaccagtatgaaaagaccaggaatccagatttctggcttttaaaagtcagaggctctcactacactgggtccgtgttcccgctatgacaatgacctggcaccaatgggcagtgttcccctttagagagggtgtgtgctgtcccttcccacagtccctggcaggcggctggaaggccaggcctggtcatctgtcaagcagggtggacttcttacgtgacagttcagggctcccttaagtgctaaagcagaagctgcaaggctttcttaaggtttcgagtgttgctgggagaaatctgctgcatgttgtgggttaaagggagtctctcaccagcccaggccctcaggaggaggagataccaggaggcagggatgctgggggtcgtggttcactgggggctctctctgcccatgagctgccacacagcacctttgccatgccccgtaatttggattttatggtggttgtgatggaaagccatttgagggttttgaacagggaggcaatgtaatcagatttatgccttagaactggactatccaataggttgccaccagccacataaggctatttaaattaattcaaattaaatgtacaattcagtcactcattctcatcaaccacatttcaagtgctcaaagccacgtgctggctaggggccacagcgttagacagtgcagagagaaagcacttccatcgctgaggaaagttctgctggaccgcacacccttagaaggatggctctggtggccgggcgcggtggctcaaacctgtaatcccagcactttgggaggccgaggtgggtggatcacgaggtcaggagatcgagaccatcccggctaacatggtgaaaccctgcctctactaaaaatacaaaaaaaaacaaaattagccgggcgtggttgcgggcacctgtagtcccagctactcaggaggctgaggcgggagaatggcatgaacccgggaggtggagcttgcagtgagccaagatcgtaccactgcactccagtctgggcgacagagtgagactccatctcaaaacaaacaaaaaaaggatggggctgggctggagagggtggcaggcagtggttgtggcagtggagctggggagatgtggtcggattagggaggtagaatcaataagactcagtgaagaatcggatgtgggggtaagggcacatgtggaagcaaagaaacctttgacgtctttgtcttgacaaccgggtggtcctgtttctagacatggaagcttagaaaagcctggagtctgtgggaagtaggtagggctgggcactggtcattccactctggtttcctttggggttcccattaggtgtctacagggagaggtgaaattggaagttggaggtgtggagagttcaggagagggttctggaccacagatgttgaggtgggagtcattagtgaatagatgatgttggaagtcatgggtcctcagagtgggggctccttaagcctccaggccagcagcatcagcatcacctgggagattgttaggaatgcagattctcaggcccccctaagacccaccgactctgtgctagaacaagcgcccctcagagattctgatgccactgaagtttgaggagcattggtttaagcaagattacctacggagaggctgtagatccgtgttctaaacctggggtccacagacacccccaagaagagcggattgaatgcaagagatctatgaagttggatgggggaaaaattgacatctttatttttgctaaactcgatctaaagtttagcatttccatctgcgatgaatgtaggccacaaaccacagtagtattagcagtgcctgggacctcctcaacaacagaaattgccggtatttatagcacgttacagttgttgcagataatttccagagactgtttatatgcaccactgttttaaaattacggtgattggccaggtgcagtggctcacacctgtaatcccagcactttgggaggccaaagtgggtggatcacttgaggagttcaagaccagcctggtcaacatgtcaaaaccctgtacctacaaaaaaatacaaaagttaaccaagcctatgcttgtagtcacagctactcgggaggccgaggtgggagggtcttctgagcccagggaggtagaggcttcagtgagctgagatcgcaccaccacactccagcctgggtgacagagtgaaacccttaatcaatcagtcaataaaaattacagtaattattagacccaccactaggtcatcttatttgatgcatcagtaaagcagcatattcaaatgtggatttttaaatattttaattactatttaaatatctctttactttgtaatcctatgcattttacgcattaaaacattttaagcattt

SEQ ID NO: 4658 - DNA, 5509 bp, Homo sapiens
ggtggactcggcgatggagctgttatttttagatacttttaaacacccgagcgctgagcaaagttctcatatagatgtggttcgttttccatgtgtggtttatatcaatgaagtccgagtcatacccccaggagtaagagcccatagcagtctgccagacaatagagcatatggagagacatctccccatacatttcaattagacttattcttcaacaatgtaagcaaaccaagtgcccctgttttcgataggttgggaagcctggaatatgatgagaatacttccatcatctttagacctaactcaaaggtgaatactgatggtctggtgctaagaggctggtataactgtctgacactggcaatatatggatcagtggatagagtgataagtcatgacagagactctccaccaccaccacctccaccgccaccacctccccagccacaaccaagtttgaaaaggaatccaaaacatgagctgatggggagaaagaagatcagtttaatggaagccctccaagaccacagccaaggggaccaagaactcctccaggaccccctccacctgatgatgatgaagatgatcctgtgcctctgccagtgtctggtgacaaggaagaggatgctcctcatagagaagattactttgagcccatttctcctgatcggaattctgttccccaggaagggcaatattctgatgaaggagaagtagaagaggaacaacaagaagaaggagaagaagatgaagatgatgtggatgtagaggaagaagaggatgaggatgaggatgatcgacgaacagtagacagtattcctgaggaggaagaggaagatgaagaggaagaaggtgaagaggatgaagaaggtgaaggggatgatggttatgaacaaatttccagtgatgaagatggaattgctgacttggaacgtgaaacatttaagtatccaaactttgatgttgaatacactgctgaagacttagcttcagttcctcctatgacatatgatccatatgacagggagcttgtaccactcttatacttcagttgtccatacaagactacttttgaaattgaaatcagtagaatgaaggatcaaggtccagataaagaaaattcaggggcaatcgaagcctcagtgaagttaacagaactcttagatttgtatagagaagatagaggtgcaaaatgggtaacagctttagaagaaattccaagtttaataataaaagggttaagctatttgcaattgaaaaacacaaaacaagactcccttggccagttggtagactggaccatgcaagctttaaatttacaagtagcgcttcgccaacctatcgccttaaatgttcgacagctcaaagctgggaccaaattagtgtcctcactagcagaatgtggggctcaaggagttacaggactgctacaagcaggagtgatcagtggattatttgaacttctgtttgctgatcacgtatcatcttctcttaagttaaatgcttttaaagctttggacagtgtcattagtatgacagaaggaatggaagcttttttaagaggtaggcagaatgaaaaaagtggttatcaaaagcttctggaactcatacttttagatcagactgtgagggttgttactgctggttcagctattctccaaaaatgccatttctatgaagtcttgtcagagattaaaagacttggtgaccatttagcagagaagacttcatctcttcctaaccacagtgaacctgatcacgacacagatgctggacttgagagaacaaacccagaatatgaaaatgaggtggaagcttctatggatatggatcttttggaatcctcaaatataagtgaaggggaaatagaaaggcttattaacctcctagaagaagtttttcatttaatggaaactgcccctcatacaatgatccaacaacctgttaagtctttcccaacgatggcacgaattactggacctccagagagggatgatccataccctgttctctttagatatcttcacagtcatcacttcttggagttggttaccttgcttctgtcaattccagtaacaagtgctcaccctggtgtgctgcaagccacaaaagatgttttgaagtttcttgcacagtcacagaagggtcttcttttttttatgtcggaatatgaagcaacaaatttattgatccgagctctgtgtcacttttatgatcaagatgaggaggaaggtctccaatctgatggtgttattgatgatgcatttgccttgtggctacaggactcaacacagacattgcaatgtattacagaactgttcagccattttcagcgttgtacagccagtgaagaaacagaccattcagatctcttgggaaccctgcacaatctttatttgattacttttaatcctgtgggaagatcagctgttggccatgtttttagtctggagaaaaatctccaaagtcttattactctaatggagtactattccaaagaagccttgggtgattccaaatctaagaagtcagtagcttataattacgcatgcatacttattttggtggtggttcagtcttccagtgatgttcaaatgctagaacaacatgcagcatctctcttgaagctttgtaaagcagatgaaaataatgctaaattgcaagaacttggcaagtggcttgaacctctgaaaaaccttagatttgaaattaactgcatcccaaacttaattgagtatgttaagcagaatatcgataacttgatgaccccagaaggagttggccttaccactgccttacgtgttctctgtaatgttgcatgcccaccacctcctgttgaaggtcaacagaaagatctgaaatggaatcttgccgttattcagcttttttctgctgaaggaatggacacgtttattcgagttctgcaaaaattgaacagtattctgactcagccttggaggctccatgtcaacatggggactacccttcacagagttactactatttcaatggctcgctgcacactcactcttcttaaaactatgttaacggaactcctgagaggtggatcctttgagtttaaggacatgcgtgttccttcagcgcttgttactttacatatgctcctgtgctctatccccctctcaggtcgtttggatagtgatgaacagaaaattcagaatgatatcattgatattttactgacttttacacaaggagttaatgaaaaactcacaatctcagaagagactctggccaataatacttggtctttaatgttaaaagaagttctttcttcaatcttgaaggttcctgaaggatttttttctggactcatactcctttcagagctgctgcctcttccattgcccatgcaaacaactcaggttattgagccacatgatatatcagtggcactcaacacccgaaaattgtggagcatgcaccttcatgttcaagcaaagttgctccaagaaatagttcgctctttctctggcacaacctgccagcccattcaacatatgttacggcgtatttgtgttcaattgtgtgaccttgcctcaccaactgcacttctgattatgagaactgtgttggatttgattgtagaagacttgcaaagcacttcagaagataaagaaaaacagtatactagccaaaccaccaggttgcttgctcttcttgatgctctggcttcacacaaagcttgtaaattagctattttgcatctaattaatggaactattaaaggtgatgaaagatatgcagagatattccaggatcttttagctttggtgcggtctcctggagacagtgttattcgccaacagtgtgttgaatatgtcacatccattttgcagtctctctgtgatcaggacattgcacttatcttaccaagctcttctgaaggttctatttctgaactggagcagctctccaattctctaccaaataaagaattgatgacctcaatctgtgactgtctgttggctacgctagctaactctgagagcagttacaactgtttactgacatgtgtcagaacaatgatgtttcttgcagagcatgattatggattatttcatttaaaaagttctttaaggaaaaacagtagtgctctgcatagtttactgaaacgagtggtcagcacatttagtaaggacacaggagagcttgcatcttcatttttagaatttatgagacaaattcttaactctgacacaattggatgctgtggagatgataatggtctcatggaagtagagggagctcatacatcacggacgatgagtattaatgctgcagagttaaaacagcttctacaaagcaaagaagaaagtccagaaaatttgttccttgaactagagaagcttgttttggaacattcaaaagatgatgacaatctggattctttgttggacagtgtagttggacttaagcagatgctggagtcatcaggtgaccctttacctctcagtgaccaggatgtagaaccagtactttcagctccagaatctcttcagaatctgtttaacaataggactgcctatgtgcttgctgatgtcatggatgatcagttgaaatctatgtggttcactccatttcaggctgaagagatagatacagatctggatttggtaaaggttgacttaattgaactctctgaaaaatgctgtagtgactttgatttgcactcagaattagagcgctcatttttgtcagaaccatcatctccaggaagaaccaagactactaaaggattcaaacttgggaagcacaagcatgagacctttataacgtcaagtggaaaatctgaatacattgaacctgccaaaagagctcatgttgtgccaccaccaagaggaaggggcaggggaggatttggacagggtatacgacctcatgatatttttcgtcagagaaaacagaacacaagtagaccaccatctatgcatgtggatgactttgttgctgctgaaagtaaagaagtggttcctcaagatggaatacctccaccaaaacggccactcaaagtatcacagaaggaacaagaggctccagttggagtgctcagaatactcctcgaggaaattacaatgaaagtcgtggaggccagagcaattttaacagaggccctcttccaccattacgaccccttagttctacaggttaccgcccaagtcctcgggaccgtgcttctagaggtcgtgggggacttggaccttcctgggctagtgcaaatagcggcagtggaggctcaagaggaaagtttgttagtggaggcagtggtagaggtcgtcatgtacgctcctttacacgataaaaatccttttgggaacatcttaactgtatatgaacatttcacgaggacaataaaaataagacattgaaggaccaatttagacttagcagttatctggagacatctgagagaatatttttatctgaagaaagcagaatttgtttgatacctaacaagatttcaataaaaatccaaactttgtatgt

SEQ ID NO: 4659 - DNA, 3504 bp, Homo sapiens
acttagcggcgagtggctccgtctccgcggacagagcgcgcgccccctggcccggcccgcgaggggctcccggcgcggtccccgagcatttcccgccgggtggagcgggccgagcccggcaggatgaccagccccgcggccgctcaaagccgggagatcgactgtttgagcccggaagcgcagaagctggcggaagcccggctcgctgcaaaacgggcggcccgcgcggaggctcgcgagatccgcatgaaggagctggagcggcagcagaaggaggtagaagagagaccagaaaaagattttactgagaaggggtctcgtaacatgccgggcctgtctgcagccacgctggcctctctgggtgggacttcctctcggagaggcagcggagacacctccatctccatcgacaccgaggcatccatcagggaaatcaaggactctctagcagaagttgaagagaaatataagaaggctatggtttccaatgctcagctagacaatgaaaagacaaacttcatgtaccaggttgataccctaaaagatatgttgctggagcttgaagaacagctggctgaatctaggcggcagtacgaagagaaaaacaaagaatttgaaagggaaaaacacgcccacagtatactgcaatttcagtttgctgaagtcaaggaggccctgaagcaaagagaggaaatgctcgagaaacatggaataatcctaaattcagaaatagctaccaatggagagacttccgacaccctcaataatgttggataccaaggtcctaccaagatgacaaaagaagagttaaatgccctcaagtcgacaggggatgggaccctaggaagagccagtgaagtggaggtgaaaaatgaaatcgtggcgaatgtggggaaaagagaaatcttgcacaatactgagaaagaacaacacacagaggacacagtgaaggactgtgtggacatagaggtattccctgctggtgagaataccgaggaccagaaatcctctgaagacactgccccattcctaggaaccttagcaggtgctacctatgaggaacaggttcaaagccaaattcttgagagcagttctctccctgaaaacacagtacaggttgagtcaaatgaggtcatgggtgcaccagatgacaggaccagaactccccttgagccatccaactgttggagtgacttagatggtgggaaccacacagagaatgtgggagaggcagcagtgactcaggttgaagagcaggcaggcacagtggcctcgtgtcctttagggcatagtgatgacacagtttatcatgatgacaaatgtatggtagaggtcccccaagagttagagacaagcacagggcatagtttagagaaagaattcaccaaccaggaagcagctgagcccaaggaggttccagcgcacagtacagaagtaggtagggatcacaacgaagaagagggtgaagaaacaggattaagggacgagaaaccaatcaagacagaagttcctggttctccagcaggaactgagggcaactgtcaggaagcgacaggtccaagtacagtagacactcaaaatgaacccttagatatgaaagagcccgatgaagaaaagagtgaccaacagggagaggcattggactcatcgcagaagaagacaaagaacaagaaaaagaaaaacaagaagaaaaaatccccagtacccgtagaaacccttaaagatgttaaaaaagagttaacgtatcagaacacagatttaagtgaaattaaggaagaagagcaggtaaagtctactgacagaaagtcagcagtggaagcccaaaacgaggtgactgaaaatccaaaacagaaaattgcagcagaaagcagtgaaaatgttgattgtccggagaatcctaaaattaagttggatggaaaacttgaccaagaaggtgatgatgtacaaacagcagctgaggaggtactagctgatggagacacattagattttgaggatgacaccgttcaatcatcaggcccgagggctggtggtgaagaattagatgaaggtgttgcaaaagataatgctaaaatagatggtgccactcaaagcagtcctgcagaaccaaagagcgaagacgcagatcgctgcaccctgcccgaacatgaaagtccctcacaggacattagtgatgcctgtgaagcagaaagtacagagaggtgtgagatgtcagaacatccaagtcagaccgtcaggaaagctttagacagcaatagcctagagaacgatgacttgtcggcaccaggaagagagccagggcacttcaatccagaaagcagagaagataccagaggagggaatgagaagggcaaaagcaaagaagactgtaccatgtcctaagctgaggcaggcggcaggcgcggtgcacaggaagtctcagtgtgaaggggtcttttctctccactgccaatgtaagtagaatgttctaaattcatagagaggcactgtatgacaattaccaggtgctctactgctttaagttatagactgttacttgtagatttccatgtaatcattgaggttatcacccagattagaaagacatatttgttatcagtgtacgttctaattgagagcattccagtagtatcaaacaataatgtctactgtttatagtccacttaataaaaatagaggcatttactatttgccttaggctgataggaatgtgggttttcttgaccaaatatatcagcatctaattgaaatgaccaaatagcattcttagacttctgtattatgaatataattgatatttaaattaatgtcttgttcacatatgtgtactttcatatttgattttaaaatgtacattataacctgtatggtattttatttaaaggagataaacagccaaatagcaaataggtcactgaatgataagatttgcaccttagaacaataatcattttaaggataacaagtaaatgtctgaaagcatgaggggctttatttgcctttacctcatatgagtctttgatcttgaaccgatacttttggatctcattgttgatatacctgaatttactttgtaagagattttaacttcacttcatgctgatgatgtatcaaattcattttatagaaagatttaaagtttttttctggaagtgatatatgtcaaattacatttcctactgcagtatttgagcagggacagtcattttttaaatgtttttggccgggcgtggtggctcatgcctgtaatctcagtacattgggaggccaaggcaggtggatcacctgaggtcaagagttcgaggccagcctggccaacatggtgaaaccctgtctctactaaaaatacaaaaaattggccgggcgtgatggtgggcgcctgtaatcccagccactccagaggctgaggcaggagaatcgcttgaacctgcgaggcagagattgcagtgagccaagatcaagccattgtactccagcctggacaacaagagcgaaactctgtct

SEQ ID NO: 4660 - DNA, 5833 bp, Homo sapiens
gggagtgagagtgtgtgggagtggggtgagggagaagctgacgggacgcgaggctgtgagaaactgggcgagtgtgcgaggacgcccggccagcctgcgggagcgcagtcggcggaggagaaaggaggcggctcccggtatcccgaccccctccccctcctctccttcccccacttccagccgcccggcggcccgcgcttcctcgaaggccccagcccggctcagtcggccgagagcgagggaggagccccccgacccaggtgctggagtctgcttgtcagggaggggggcagtctgtgattctgagaacagagccaagaaggggaacagcaaattcagtcacagacaatcctccactcggtcaagagccacttttctcttcctgccttgcccccccgcagggggtaaggaactgagcgtttaatctttagccggttggctaccagctaaaattctacttatcttagtttctagtggatagctttcttattttgcccatgttttcttagaatccctgtttaatatacttttgtcagtagtagtatctaggagtagcagggagagtgacaataaattagccccttcttttttcccttgtcattcaggccccttttcctctccagagggaaattaccagtaaactcttctaaatcttccaccccttctcagtcatactgtgaagaaacacactaaagtggacattatttgaccagtgaacacgaacccagcttcaggcattggtttgttgtggcacatggagaaacatctcttttaaaatatctcccaattacccttttcacaatttgtatccacctaggatttgctgctggggtaagtcactagatttatttctcaaagctcccctctctatgagctgaaagactgaccaaccatgaacactagtaggggatggggaaaggggacagagcagagccagttgttccacactttgggaagcaggagtagcttttatcatcttcctctggggagcaggcatagagacataaactgagtgaaaatgggtggaggaagaacttctatacccacgaacaacatgtgaagagagagaaccaaacataaagtaaggagggtagacgttacatccaagaggaaataatccaggcaaggaagcacaagctgatcaagatgtgtagttctgtggctgccaagttgtggtttttgacagatcgtcgcatcagggaagactatcctcaaaaagagattttacgagcattgaaggccaaatgttgtgaggaggaactggactttagggctgtggtgatggatgaggtggtgctgacaatcgagcaaggaaacctgggtaagtctgtatactaagtgatcttttggatttttacctagaatatgatgaatctgcatgttttaggaataattaggacagaggaattcttagccttgtcattactaagtatcttctaatgtctgcggatcaatggagagctaatcactgcctacccacaagtggtggtagtcagagtaccaaccccttgggtgcaaagtgatagtgacatcactgttttgcgccatctagagaagatgggatgtcggttaatgaaccgacctcaagccatcctgaactgcgttaataagttctggacatttcaagagttggctggccatggtgttcctctgccggatactttctcttatggtggccacgaaaattttgctaaaatgattgatgaggctgaagttctggagttcccaatggtagtaaagaatacgcggggtcacagaggtaaagctgttttcttggctcgagataagcaccatttggctgatctaagccatcttattcgccatgaagcgccatacctgttccagaagtatgttaaagagtctcatggacgggatgtacgtgtcattgtcgtgggaggccgtgtggttggcaccatgttacgttgttcaacagatgggagaatgcaaagcaactgctcattaggtggtgtggggatgatgtgctcattgagtgaacaagggaagcagctagctatccaggtgtctaatatcctggggatggatgtgtgtggcattgatctgctgatgaaagatgacggctccttctgcgtctgtgaggccaatgcaaatgtaggtttcatcgcctttgataaggcttgtaatctagatgtagctggtatcatagcagactatgccgcctcccttctaccctctggccggctcacccggcgtatgtccctgctctccgtggtgtccactgccagtgagactagtgagccggagctgggtcccccagccagcactgctgttgacaacatgagtgcaagttccagctctgttgacagcgaccctgaaagcacggagcgagagctgctcaccaagctcccagggggcctgttcaacatgaaccagctgctagccaatgaaatcaaactactggtggactgactccactggtaattaaccaacaaaacccttgtaaaactttctttcttcttttctatttttaaaaccaacttgcaatgctgttcatggaggatgctcaggaagatgagagaaaattagtaggattagttggagagagtgggagatagatgagacctctgctagtaagatgttactttcatttacaaatcctacaaatagagaggcagaataggtggggtatagaaaaatgtcaggctctcatagttacccttttaaattgctaaaaaatgtgtatgctcataggccatgaggaacaaatactttttttttttcatggtcccttgcttttgtttttgtacaaaaaaaaatggttttgctacaaatatccaagtagcataacttcacattgtgttggaagatttgtcatcagtgaggaaaacatctgcataaattacaggaatttttgtattatacagctctgaaaattctgccatttccttattaactagcagctttagtttgtagtttatgaaatcttgaggggctcttttactgggatttcttatttttttgttttttcccgcttaatttggtgggaggtcaaattgaatataacccaataaaggcttcttaatgacaaaattggcatgtttgcatgatgaaatggaaatgaacagtattgcaatgtccggtatacaaaataacattaattcaatgtagataaaattacactagtttaaaatatgtgcattcacttgtatttgttagtgttttagtcttttttgaaagatgtgctctgttaatgttgcttttttttttttttttaatacatgctagtctaacatttcctgctctatgcctgcatctttaacaatggccaaagtgaagaaaatgctaccttttttgttaacaagacactgacttgaaacatgtacatttaaagccttttattttttccctttttgttttggtagttgggcatttaaataaggacaaggaaaaatatttttgggggcaaatcaagagcctatgagttctaagtataaagctgaagtgatttcgaatgccagcgttatatatttgcatttttcacattttacgagggagtatatgtgtatgtgtgtgcacgcatgcatgtgtatgtgttttgctttttgtttccatcaactaatcaaaaaggataatttagaaaatggagcatgatgggaaacagagtttttgactttaaaaaacagatgagttgttttcataagtagactccactggggtagaggtattcaccttaaaacatagggtgagtagatgcttttttaggcctttttgtgtatatgtacgttgtttgtttttttccttttgtttctagcctgttcagtgtacagtttattcaaggctacatgcttttctttaatgcttctggctatgcattttctctttttacatataggatttgggattgggggtgggttggatgtttttgtttggggacttatttagtagtattgagtctcttatagccctactcttaagccttcaatactgtccactctttatattcctttacttgcagaatttataaaagcccccaaactgcatataatatgagcctttaaaacatgggtaaaactaatcccattgatgggtttggatggtatgttaagaaatggagatgctgcagagcccaacgtaattttttaaacagcaagttttccatctccctacgaatcctctgaagcttttacccaagccctttcttgcctctccagtgctattttccttcagatggaccttaaacataatttcttggacactactagagagacttcgaggcaataataaaagatcagtattaaccagctataacagaggtttgatcatgcttacttgtacagtttttcccccgttttaaaaaggaatgtaataaaatttgttttttccatagaattaaataatattaaaattgagtgaaaggttgattgttgatgaatagaatagtacctctcatctgtgcagtgtctcatttcacctcagagaaaaggatacataagaggagtttgtaatttatcttaggatattctaattgcatttaaaagaacttatcttgcgcagggtaaatgggggactcacatacatatattaatacctctgactcattaacagaaagaaatacttggtacttctttcgctgaatgaccatactgtggaggatgcatactatttggtatagagaaataaatgaggaagaaagaactgcttaattaaattatcattcatatgttcatatagagaccatctggttgccatgtgtattatgacacatacactttgaatagttacatatcacaagtatgtagttcatgtttgtgttggtggggtaaggcatcaggaaaaatgtagttagtcttttcttaacttataccaaattaaccaactatattataggaaatatgtgaaattagttcattagctttattcactattatgcattcacatgatattaaaacgtacactcacatgttagaatgaaaagagcagtagttatcttagattttaaaaacatggatatcttcttgaattccttcaagattgaggtagagaataagagcaaatcattctggaagtaccttaaggaaacaaacagcagcagatatttaggttaaacttattttcataattgtttaataacttttgtataatcttcattgctattatgagagagaatgtatatatcaaatatgtgtaatgataaaatctgaattgtaaaatttttgtatattgttaaaattgtaattctaaattgtatttcaaaaatgattatttctgatattgtttttatgtcacccatgatgaaaactggactttatatatctaaacatacaagtatgaactattctatttaaaatttttaatagtttttttcttttttggtgcctataattgattggtcatttctgctggcttttctccaatgaacattgaaatcttcctgtatatgttaccaataagaaaactaccctggaacagtagaaaaacccaacaagagacttggcattcatcaagcacattatcagactttgagaacatattgaaggcattgactttgaaaatcatctctttttctcaagaagaaagcaatggagaagcaaatttgtttcattcagtgaatccccagtttggggcttgtggggcttagagacattgtgaaatcaaatcttgtgttatacttttctcctggctcactttttttgagaaggtttatgggctatttggctggtgagacacgatcccctcctaagaaaatgtaggtgctcagacaggtaaccactgctgctactgtttttatttgtttgtttgttcaattttatttaagatttgtttttgttgtactaggattttaaaaaatgtaatatattgcaggatttataaccag

SEQ ID NO: 4661 - DNA, 779 bp, Homo sapiens
gctcgctcgctccccctcggaaagctgcgaaagtgctttggcggtttgtccatccgcagcttcggcttttccagtctggtggcccttccggccacccctttaaccccagctttccctcccccttctttcgatcagagatcggcggagaccctcgaagtgcgcaaacttgacactcaccctgaccggactggggttttaaggggtgtggcaggaggttttggactcgatgagtttccaccgaaatgtcggagaagtcaggccagagcacaaaagcaaaggatgggaaaaagtatgcaacactcagtttatttaatacttacaaggggaaatcattagaaacacagaaaaccacagttgcagctcgacatggattacagagtcttggaaaagtcggtatttcacggcgtatgcctccacctgctaacctcccaagtcttaaagcagaaaacaaaggcaatgatcctaatgtaaacattgtacctaaagatggcacagggtgggcatcaaaacaagagcaacatgaagaagaaaaaacaccagaagtgccaccagcacagccaaaacctggggttgcagctcccccagaagtagcacctgctcccaaatcatgggccagtaacaagcaaggaatccaagtgaatagtcagtttcagcaagaatttcccagcctgcaggcagctggggatcaggaaaaaaaagaaaaggaaacaaatgatgacaactatggacctggacccagtttacgtccaccaaactagatgttgcttgttggagagatg

SEQ ID NO: 4662 - DNA, 5564 bp, Homo sapiens
tagcagtgcccacaaatggcacagttaataatgtggctcaagaaccagttaatactcttggggatatttccgggaataagacaccagatttatctaatcagaactcttcagatcaggcaaatgaagaatgggaaacagcttctgaaagcagtgatttcaatgagaggcgagagagggatgaaaaaaaaaatgctgacttgaatgcacaaacagttgtaaaggttggagagaatgttctacctccaaagagggaaattgcaaagagaagtttttctagtcagagaccagtagatcgtcagaatcgacgtggcaacaatggtccacccaaatcaggaaggaatttctcaggtcctagaaatgaaaggagaagtggcccaccatcaaaaagtgggaagagagggccatttgatgaccagcctgcaggcacaactggggttgacctcatcaatggcagctctgcacaccatcaggaaggagtacctaatggtacaggacaaaagaactccaaagattctactgggaaaaaaagagaagaccccaaaccaggccctaaaaaaccaaaagagaaagtggatgctctatcacagtttgatctcaacaattatgcaagtgttgttataattgatgatcatcctgaagtaacagtaattgaagatccccagtcaaatttgaatgatgatggttttactgaagtggtatccaaaaaacaacaaaaacgtttacaggatgaagaacgccgaaagaaggaagaacaagtcatacaggtctggaacaaaaagaatgcaaatgaaaaaggaagaagccagacttctaagcttcctccaagatttgccaaaaaacaggctacagggatccagcaagcacagtcttcagcctcagttccacctctagcttcggctccacttccaccttcaacctcagcttcagttccagcctcaacctcagctccacttccggcaaccttaactccagttccagcctcaacctcagctccggttccagcctcaactttagctccagttctggcctcaacctcagctccagttccagcctcacccttagctccagtttcagcctcagcctcagtctcagcttcagttccagcctctacttcagctgcagctataacctcttcttcagctccagcctcagccccagctccaacccccatccttgcctcagtttcaaccccagcttctgtcaccattcttgcctcagcctcaattcccattcttgcttcagccctagcatcaacttcagctccaacgccagccccagcagcctcttccccagctgccccagtcatcacagcaccaactatcccagcctcagccccaactgcctcagtcccacttgcccctgcctcagcttcagccccagccccagcccctaccccagtctcagccccaaatcctgccccacctgccccagcccagactcaggcacagacccacaaaccagtccagaatccactacagactacatctcagtcttcaaaacaaccaccaccatcaattaggctgccttcagctcaaacacctaatggcacagattatgtagcctcaggaaaatccatccagaccccacagtcacatggcactctgacagctgaattatgggataacaaggtggccccaccagctgtgctgaatgatatctctaagaaattaggtcccattagtccaccacagccaccttcagtcagtgcatggaataagcccttaacatcgtttggatcagctccttcatcagagggagcgaagaatggtcaagaaagtggactcgaaattggaactgacacaattcagtttggtgctccagcctcaaatggaaatgaaaatgaagttgttcctgtgctttcggaaaaatctgctgacaaaatacctgaacctaaagaacagcggcagaagcagccacgagcaggacctatcaaagcccagaagcttccagatttgagtccagtagaaaacaaagaacacaaacctggtcccattggaaaggaacgttcattaaaaaatagaaaagtaaaagatgcccaacaggtggagccagaaggacaagagaaaccaagcccagctacagtcagaagcacagatcctgtcacgacaaaggagactaaagcagtctcagaaatgtctactgaaataggaacaatgatctcggtatcatctgcagaatatggtactaatgcaaagatggagtctgcacgcaaagcatgggagaattctccaaatgtaagggaaaaggggtctccagtaacttccacagcacctccaattgcaactggagtcagcagtagtgccagtggaccaagcactgctaattacaattcgttctcaagtgcatccatgccccagattcctgttgcttcagtcactcctacagcatcactatcaggagctggtacatacactacctcttctttgagcacaaaatctacaaccacatcggaccctccaaatatttgtaaagtgaaacctcagcagttacagacaagcagcctgccttctgcaagtcatttttcacagttaagctgtatgccttcccttattgcccagcagcaacagaatccgcaagtttatgtgtctcagtctgcagcagctcaaatcccagccttctatatggacacaagtcatttattcaatacccaacatgcacgattggctccgccatccttggctcaacaacagggtttccaaccaggtctctctcagccaacttcagttcagcagattccaatccctatttatgcaccactgcaagggcagcatcaagcccaactgagtttgggggctggccctgctgtttcccaggctcaggaattgttcagctcctcacttcaaccatatagatctcagccagcttttatgcaaagcagtttatcccagccatctgtggtcctttctggtactgctattcacaactttccaactgtccaacaccaagaacttgccaaggcacaatccggtcttgcctttcagcaaacatcaaatactcagcccattcctatattgtatgaacatcaactggggcaggcatcaggactaggaggttcccagctgattgacacacatcttctccaggccagagcaaatcttacccaggcctcaaatctttattctggacaagtacaacagcctggtcagacaaatttttataacactgcccagtcaccaagtgctctccagcaggttacagtacctttaccagcatcgcagctttccttgcctaattttggatctacagggcaacctctaattgctttgcctcagactcttcagcccccattacagcataccactccccaagcacaggctcagagtctgagtcgtcctgcacaagtaagccagcctttcagaggattaattcctgctggaacacagcatagcatgattgcaaccacaggaaaaatgtctgaaatggaactaaaagcctttggaagtggcattgatataaaaccaggcacacctccaatcgctggtagaagcaccacaccaacatctagtccttccgggctacttctacaagtccgaacagccagtccagcaaaatgaacagcattgtctaccagaagcagttccagtcagcccctgccactgtgagaatgacacaaccatttcctacacagtttgcaccccaggcaaagcagagagcagaggttcttcagtccacgcaacggttcttctctgaacagcaacagagcaaacagataggaggaggcaaagcccagaaagtggacagtgattcaagtaaacctcctgaaacactgaccgaccctcctggggtctgtcaggaaaaagtagaagaaaagccaccccctgcaccctccatagccaccaaacctgttagaactggaccaatcaaacctcaggcgatcaaaaccgaagaaacaaaatcttaaaggctatggtttattgcaggggattgggaggggggcgggaaaacatggagaattaagtcagataatgctggcagccaaaggggcaaaatggcctgtgacattatcctgttcagagcttggagatgtacaagggacataggagcaatttacactgacacacagctgctgtaccagtgaaaacgaggctttgcaagcttgtacctactatataacatgtgcttggttgatggccatgcatcttcagtcagaatttatatataaatgtatgcacccatttttttgagtgcatataatttagacctaaaaatccttatgattagatgaaacaccaaaaatataaggaaaataacacagcagaggaatagctcagcctgaacagtgtgatggtcccagctactacatcagatgcggtttttttgctcccttatgttcttcggatatggttatggcatttgtaggcttggaggtaaagaactgaagataactggtgctggatagaggagccttattttttattatggcagcttgctatttttataacatggtgattgagttgaacacaatcaaagtacagtagtaactgatgtccccttcttcctggatgaatgagcagataaatattgatgtcagcatccttgaaccatatcaaagtgagcagtgtttggctactgcttctatttgaaatggtgctgtgttttggttgtggtctgaagctttgaagcgctacttagcatctcctttcttccatggagctctcacgattcaaacatgacagatttggtaaaatgctggttaggttgagtcttccttgcccccactcagtcatctttgtatgaatcccatgatttgggggtttttttctttttttttttataccagtttttagctggtgtttatgaagaacagtgagtacctagaactgtgccactaattaaaggaaatcctaagaaggtgcatttctttacagagctgtgtcatgccatcctttgggccctctgctggaaaagtagaatcaagtctcaaataatgcctttttaattgtatcctctagtattatagatataggacagtactgtatcatacctctgtgaatgtaaaatatcttgtacctgctttatgatacgtagtagtgaccgtgctttatcagagctgtttttaatgatgttattctagaatgttttctttccagatgatgattcagaagctaattttaaaaaacggtgccaggtaccacaacagtaacagaactttgcaattttctggggttttgttttttacctttttccccccttttttttaaatggagtgtgctggatgtctctataattttattcagatgactgcagaacctggaaaagctgttgctgctattgatgcataacatactgctattggtctttttatataaatatatatatatatatacatatatatatataatttgaatttttggaaactttagctgtgctgtcaactttggaaaaagtatcccggtttactgtgttgagttggcattgtacagaaattaacagccatattggtctagaaacgttaaacttaatttttttccatttgtacaggggtaacgcactgtattaaatatgtaaggtcttatctacatgggtttgattacagaaactaataaagtattctctaaataatg

SEQ ID NO: 4663 - DNA, 2073 bp, Homo sapiens
atgccttgcgcgccgcgggcccagagacgtgaggctgtcggcgtcctggtggccccgcctcgtgtccccccccggaccccacgccgcgggagcttgggggttgcggtcttctcttcctccgacctcaccttcgatgcggaagcgcaggggcaggtgcgccgccctcggcccgcgcaggcggtgggcccgtctggggcaaggcgcccggaagcgcctggttggttcagaaaatcggaccgcagcgggagggcgggcaccggcgcgtggtctcagtggccccaggcgaaccctgatgagcagcagccgcaagtggcttactaaaggagccactttctacgtttgtctggaatttacgtgaattaagctggcgggcgggcggccaggcctgtagtctcagcactttgggaggctcagcacttcgggaggctgtggcgggcggatcacctgagcctgggagttggagaccagcctgcgcaacgtagcaagaccctatctctaaaacagattcattaatacttagccaggcgcggtggctgaggtcccagctactcggcaggcccaggctggcctgagccagaccgctctggactgttttaattttttcagccttaatacctgccagaattttttttttactatgtatctttgtccttacgtatataaattttatatacaattgagattatcctgtatttgcttttcccccctcacttttatatggtgacttttctcatgttaggctgaatactaacattttggaaactgtcggcctgaaaacgagcggagacacagtttctctaagtagagagtttatttgggccacacttgagcacaaattcaaggcgccctgaatgtgtactccgattagcagttaacagtggattttaaaggcaaaaaagggggccagggagtggactaataggaacttgtttgtgaggaattctcactggtttacagaaataacattgattagtgactgactatatgttgttcagctattgagtgtgggtatagtgtccattgtggcgtcattaggttaatttatagctgtttgtggcgctgttgccaccagtagcagtttaaagaggtgaacacaggtcaaggggtagtagggcgcgattgtcgcctcatttgaatgtctctctcggcctgataattaaaagaactcgcgttcctcagataaaaattctcttttctcaaaaccatttaaatgtggtaattagaatggcccagaaggggcacagtgccttttagccctcgccattacttgctcttaggagtgcattttttgtagctgtgggtttttgactatctctgctgctttctccagcccctaccctcgtgactacaagggaaaacgtgcggtgctcacgagagagcctttatgggatttttaaaaaatggggattgtgggaaaatggctccagcagtcacagtttttcagtttctcacaatcccataaaaacagagcaaccaggtaacaaaactaaagcatgggcaacatttacagaccactggatggtgaagaattcccatgaacccctggttcacactgtaaggacacactactcagcatgggcaacatttacagactactggatggtgaagaattcccatgaacccctggttcacactgtaaggacagactactcagcatgggcaacatttacagaccactggatgatgaagaattcccatgaactcctggttccaactgtaaggacacactactcagctgtagcctgaagccgcctccttacatactgtaagtttagcctataggtttctccatacgtagtgaacagtcatctaattggatgtgtggacactgtaacctactcttgaatcagtcacaggcagcagcacttcaaactctgtttcaataagccagacacgagctgtagccaccctgctgtttgcaggcctcacctctgccttctgtgcctcactcccttttctgtccgtaagtctttggccacacagtggcactggagtctctctgagcctattctggtttgaggggttcccctgattcctgaatcattctttgctcaattaaactctgtaaaattt

SEQ ID NO: 4664 - DNA, 1287 bp, Homo sapiens
ccgcggctgggaccggagtggggagcgcggcgtggaggtgccacccggcgcgggtggcggagagatcagaagcctcttccccaagccgagccaacctcagcggggacccgggctcagggacgcggcggcggcggcggcgactgcagtggctggacgatggcagcgtccgccggagccggggcggtgattgcagccccagacagccggcgctggctgtggtcggtgctggcggcggcgcttgggctcttgacagctggagtatcagccttggaagtatatacgccaaaagaaatcttcgtggcaaatggtacacaagggaagctgacctgcaagttcaagtctactagtacgactggcgggttgacctcagtctcctggagcttccagccagagggggccgacactactgtgtcgtttttccactactcccaagggcaagtgtaccttgggaattatccaccatttaaagacagaatcagctgggctggagaccttgacaagaaagatgcatcaatcaacatagaaaatatgcagtttatacacaatggcacctatatctgtgatgtcaaaaaccctcctgacatcgttgtccagcctggacacattaggctctatgtcgtagaaaaagagaatttgcctgtgtttccagtttgggtagtggtgggcatagttactgctgtggtcctaggtctcactctgctcatcagcatgattctggctgtcctctatagaaggaaaaactctaaacgggattacactgggtaagaaacactgtttttttagggcaggggtggagggagggaatcagggtttatagaaacttctgtatttaatgaaaaaaggattttaaagaattaactactattttctttcatgtcagaatcaggcagtctccttaggaggtgttctaacatgggcaagtggaaatcagtgggcctgctattaaatgtggaatatgattctaatctctgttccagtttccttcttaggtttggtgagatgagctgctcagcagtctgtgctctgtgtttcaataccatccactatgcaattagtattcttaagacatcacttacccaatttaagagtttaatttcaatttcttgctaataaactcacaaggtggttctttccagttaggaaatataaaaccctaattaagaagttgtgagctggaattagtggcatgtgcctgtaagtcccagctacttaggctgtggcaggaggattgcttgagccgaggcgtttgaatctagcctaggcaacatagcaagatcctgtctcttt

SEQ ID NO: 4665 - DNA, 1335 bp, Homo sapiens
atggtggagacgtcactattcacctttgtcaaaatccataagatctacaacactaacacaaatcctaatgtaaactatggactgtggttaacaatgatgtaaccatattggctcatcaattaaaacaaacgtataacactaatgccagatgttaataataggagaaacaggttggccatgggagagtgagggaatatgagaattctaccttctattcaatgtttctgtaaacctgaaactgctctttaaaaagtctattagtttaaaaaaaaaattcaatataaccagactaataaaaatatcttaactaaaaagcaatacaaacctaaactgtcagcaattattctgtttatagtgctattctgattgaacttagctgtagaatattctgccagaaatatgtaatggcagtgaattactgtatatatctagtaactttgctgtatcttttcttgtctggcaaaaatgcacagtggtattcatgttaagtcctactttcaactacccttattcctttctcttcagtgacagctggagtatcagccttggaagtatatacgccaaaagaaatcttcgtggcaaatggtacacaagggaagctgacctgcaagttcaagtctactagtacgactggcgggttgacctcagtctcctggagcttccagccagagggggccgacactactgtgtcgtttttccactactcccaagggcaagtgtaccttgggaattatccaccatttaaagacagaatcagctgggctggagaccttgacaagaaagatgcatcaatcaacatagaaaatatgcagtttatacacaatggcacctatatctgtgatgtcaaaaaccctcctgacatcgttgtccagcctggacacattaggctctatgtcgtagaaaaagagaatttgcctgtgtttccagtttgggtagtggtgggcatagttactgctgtggtcctaggtctcactctgctcatcagcatgattctggctgtcctctatagaaggaaaaactctaaacgggattacactggctgcagtacatcagagagtttgtcaccagttaagcaggctcctcggaagtccccctccgacactgagggtcttgtaaagagtctgccttctggatctcaccagggcccagtcatatatgcacagttagaccactccggcggacatcacagtgacaagattaacaagtcagagtctgtggtgtatgcggatatccgaaagaattaagagaatacctagaacatatcctcagcaagaaacaaaaccaaactggactctcgtgcagaaaatgtagcccattaccacatgtagccttgga

SEQ ID NO: 4666 - DNA, 1200 bp, Homo sapiens
gaattacactattgtactggagcttatcggatttcacctgtagatgtaaatagtagaccttcctcctgccttactaattttcttctaaatggtcgttctgttttattggaacaaccacgaaagtcaggttctaaagtcattagtcatatgcttagtagccatggaggagagatttttttgcacgtccttagcagttctcgatccattctagaagatccaccttcaattagtgaaggatgtggaggaagagttacagactaccggattacagtagttccattagccagtgttattgtgaaagaatctctgacagaagaagatgtgttaaactgtcaaaaaacaatatacaacttagttgatatggaaagaaaaaatgatcctctacctatttccacagttggtacaagaggaaagggccctaaaagagatgaacaataccgtatcatgtggaatgaattagaaacccttgtcagagcccatatcaacaactcagagaaacatcaaagagtcttggaatgtctgatggcatgcaggagcaaacccccagaagaggaagaacgaaagaaacgaggaagaaagagggaagacaaagaggacaagtcagagaaagcagtgaaagattatgaacaggaaaagtcttggcaagactcagagagattaaaaggaatcttagagcgtggaaaagaagaattggctgaagctgagattataaaagattcgcctgattccccagaacctccaaacaaaaaaccccttgttgaaatggatgaaactccacaagtggaaaaatcaaaagggccagtgtcgttattatccttgtggagtaatagaatcaatactgccaattccagaaaacatcaggaatttgctggacgtttgaactctgttaataacagagctgaactatatcaacatcttaaagaggaaaatgggatggagacaacagaaaatggaaaagccagccggcagtgaagagtgacttgaagaactaaatttagcatattgcaaaaatattttgtgcggaattcgatataagtacttttacagcaagatggtatagttatgttgcctggactggtttttacatttttaaaatatttcagctgtcatttttgtactaattataaaattggcacataattcaaaaatatacatttgagatgatttgtcctcccaaattatacaagtttattttatggt

SEQ ID NO: 4667 - DNA, 3019 bp, Homo sapiens
agggccccgccctgccttctggggcaaagcggagagtggtcggttctgccccacagtaacgcgaggaaagaaatctcgcgaggctggagttctccgggagcgccggtcggaggcggtcggcggaggtgtctaccccgccggtgatggcgttgaacgccactggcttcccggccttccgtccgctgcctccgtccgattctgcgtctgcttgctgaggaggcggattaggggggcgcggagtctcttcccttgagtgcataggtcccggttggtagagggtttgagtccgcatcgccacagctgaaggctgcgagggactaagagcagaatatatctttagaaatgagttgcacaattgagaaggcacttgccgacgctaaagctcttgttgaaagattaagagatcatgacgatgcagcagaatctctgattgagcaaaccacagctctcaacaagcgagtagaagccatgaaacagtatcaggaagaaattcaagaacttaatgaagtcgcgagacatcggccacggtccacgttagttatgggaatccagcaagaaaacagacaaatcagagagttgcaacaagaaaacaaagaattacgtacatctctggaagaacatcagtcggccttggaacttataatgagcaagtaccgagaacaaatgtttagattgctaatggctagcaaaaaagatgatccgggtataataatgaagttaaaagagcagcactccaagattgacatggtacatcgtaacaagtccgaaggattcttccttgatgcatctcgacacatccttgaagcacctcaacatggactggagagaaggcacttggaagcaaatcagaatgaactgcaagcacatgttgaccagataactgaaatggcagcagtaatgaggaaagccattgaaattgacgagcaacagggttgcaaggaacaagaacgaatatttcaacttgaacaagaaaacaaaggcttgagagagatccttcaaataactcgagaatcatttttgaacctaaggaaagatgatgcgtcggaaagtacttctttgtcagcattagtgaccaacagtgatttgagtctgaggaagagctgaagagtttctgagtctgtgagcttcttacatggctccaaatggtcaaataagtgaatgaatgaatggacagaaaattcaatcctttatttttttctctgtaaatatgtacagtgcacgggctatgagatagcaacaaaaaatgcatagttaatggtcatagactttattccaaaacataattggaaaatagaaactgagccattgccaaatggtaaagaaatgaaaagttttcacagtgactactgaatataccaagagcttttggcagtactgctggctttctgggtgattaattaggtaaacttgaatattcccagtaaatgtttgagaatgcataaaattataccaatttaaaaatataaatttttgccactgttttgtgaacggaggatttgtacgctaaatttcatccttatttggcgtcaaagttgatgcaaagtttatgtaccatgagacttctagtgattgcctactttcacatttatttaaatttttgtgaaagaaaatacagttttaaaggctataggaatgtgttatatgtaccttaaacagataatttaattttagcaatttatcataactgatacttagctaacaattgtccataacttgtttaagtgtaagaaataccatttcaggaatgaaaaagaaggaatactactttctaagaaagaagatcttataatagacatatttagtaggttaaactactcctttgaaagaataagttttggttcaaagtcaataatgaagacgagatttgtttttctcttctctggctgatttttaaggatattatgtagttcatttagttaacagaattgaaatgtttgatatggcaagataggtatggtaatttcaaagtgaattgggaattcctctggctcatagaacccttttttttttcctttaagtattcttgagatacaaaaaaaaaaagtaaatacaatttcaaaaaaaaagttccggatctgtttttaagctccatctggtcctcataacctgcaagatttttcttaaaacctttcagctgaaagtgggggtaaaggtggagtaatctgtggatttgtttctgttgtcttttaaaatgtcaaatatataatatgtaatttttttaaaaaccaccagatacagaaatgtgctttaacatcagttgaaacctaaattttcttatgttgtggtgattgtattaaaaagggataaaagaagagtgtcaaacatggttaaatatattgtactcatttatgttgaatacgtattaaaattaagacaaatggaaaattatactttgagtatataatttgttaaatattactttatatggtaattttatgtataatttcatatattggtaaaattcaaaactacacttgagaatttttttatcttaagtttggggtgaatggggtggatgagactgattgaatagaaaagggctaatggcccaaacattatatagatttctttttttcagtcagaggccttatttgatattttataaataaatgacagtttttatttttaaactttttattgtttttgggaaagtattccttaatttaatgacacattcattcagatacttcttatccctgctaataaaggaaatctatttcaagctacaccattgagattaagtctgaggcagttcattgaggcagctctactataaaagcttacttgataaataattatttttgtaaacaagttgggttaacttattcttcgtctttttgcttggatatgaatttaaggtcttcatgtttaaagacatttactttgttatttagtgacacatttccatcctattttttttttttttttggttgttgttaaacagaaccttaagtttatgtttgaggtatgtactgcataggaacctattttattattaaagatgaatgattaaaattgg

SEQ ID NO: 4668 - DNA, 3150 bp, Homo sapiens
gggggaggaggggcgcgcggcggccgaggaggggcgcgcggcggccgggcggggcgagcggaggcgagtggaggacgcgtagacgcgccgcggtccccgcctgccgctgctccgccgcagtcgccgctccagtctatccggcactaggaacagccccgagcggcgagacggtccccgccatgtctgcggccatgagggagaggttcgaccggttcctgcacgagaagaactgcatgactgaccttctggccaagctcgaggccaaaaccggcgtgaacaggagcttcatcgctcttggtgtcatcggactggtggccttgtacctggtgttcggttatggagcctctctcctctgcaacctgataggatttggctacccagcctacatctcaattaaagctatagagagtcccaacaaagaagatgatacccagtggctgacctactgggtagtgtatggtgtgttcagcattgctgaattcttctctgatatcttcctgtcatggttccccttctactacatgctgaagtgtggcttcctgttgtggtgcatggccccgagcccttctaatggggctgaactgctctacaagcgcatcatccgtcctttcttcctgaagcacgagtcccagatggacagtgtggtcaaggaccttaaagacaaggccaaagagactgcagatgccatcactaaagaagcgaagaaagctaccgtgaatttactgggtgaagaaaagaagagcacctaaaccagactggatggaaacttcctgccctctctgtaccttcctactggagcttgatgttatattagggactgtggtataattattttaataatgttgccttggaaacatttttgagatattaaagattggaatgtgttgtaagtttctttgcttacttttactgtctatatatatagggagcactttaaacttaatgcagtgggcagtgtccacgtttttggaaaatgtattttgcctctgggtaggaaaagatgtatgttgctatcctgcaggaaatataaacttaaaataaaattatataccccacaggctgtgtactttactgggctctccctgcacgcattttctctgtagttacatttaggataatctttatggttctacttcctgtaatgtacaattttatataattctgaaatgtttttaatgtatttgtgcacatgtacatatggaaatgttactgtctgactacaacatgcatcatgctcatggggagggagcaggggaaggttgtatgtgtcatttataacttctgtacagtaagaccacctgccaaaagctggaggaaccattgtgctggtgtggtctactaaataatactttaggaaatacgtgattaatatgcaagtgaacaaagtgagaaatgaaatcgaatggagattggcctggttgtttccgtagtatatggcatatgaataccaggatagctttataaagcagttagttagttagttactcactctagtgataaatcgggaaatttacacacacacacacacacacacacacacacacacacacacagagtaacctgtaactctcaattccctgaaaaactagtaatactgtcttatctgctataaactttacatatttgtctattgtcaagatgctacaatggaaaccatttctggttttatcttcaaagcggagaaacatgttgatttagtcttctttcccaatcttcttttttaaaccagtttaaggaacttctgaagatttgtccacctctgattacatgtatgttcttgtttgtatcattagcaacaacatgctaatgacgacacctagctctaagagcaattctgggagaatgaaaggaagtataaagtaacccataatctgcttggcaatagttaagtcaatctatcttcagtttttctctggcctttaaggtcaaacacaagaggcttccctagtttacaagtcagagtcacttgtagtccatttaaatgccctcatccgtattctttgtgttgataagctgcacatgactacatagtaagtacagaacagtaaagttaaaacggatgtctccattgatctgccaaatcgttatagagagcaatttgtctggactagaaaatctgagttttacaccatactgttaagagtccttttgaattaaactcgactaaaacaagtgtataactaaactaacaagattaaatatccagccagtacagtattttttaaggcaaataaagatgattagctcaccttgagataacaatcaggtaagatcataacaatgtctcatgatgtaaaaaatattaaagatatcaatactaagtgacagtatcactctaatataatatggatcagagcatttattttggggaggaaaacagtggtgattaccggcattttattaaacttaaaactttgtagaaagcaaacaaaattgttcttgggagaaaatcaacttttagattaaaaaaattttaagtatctaggagtatttaaatccttttcccataaataaaagtacagttttcttggtggcagaatgaaaatcagcaacttctagcatatagactatataatcagattgacagcatatagaatatattatcagacaagatgaggaggtacaaaagttactattgctcataatgacttacaggctaaaattagttttaaaatactatattaaattctgaatgcaatttttttttgttcccttgagaccaaaatttaagttaactgttgctggcagtctaagtgtaaatgttaacagcaggagaagttaagaattgagcagttctgttgcatgatttcccaaatgaaatactgccttggctagagtttgaaaaactaattgagcctgtgcctggctagaaaacaagcgtttatttgaatgtgaatagtgtttcaaaggtatgtagttacagaattcctaccaaacagcttaaattcttcaagaaagaattcctgcagcagttattcccttacctgaaggcttcaatcatttggatcaacaactgctactctcgggaagactcctctactcacagctgaagaaaatgagcacacccttcacactgttatcacctatcctgaagatgtgatacactgaatggaaataaatagatgtaaataaaattgagttctcatttaa

SEQ ID NO: 4669 - DNA, 2170 bp, Homo sapiens
gcagcggcggcagcagctgggctcggtgtaaacaagtccaggcgcctgcgaacccgggcccgggggggacggcgcccgccaggagcgccccccactcccagtgccagcccaccccggcggaccgggccccgcgcgcccaggcgaggtgaggcccgcgccgtcagggctgcgtgtcgccccgcgcccctgcccagcccgcgaggactgccccctcccccggcgcccgcccccacccccgcgccccaggtgagccccggagtccaggtaaggctccgcgttgcaggtaagagcccctgagcgtagaggaggccttggcgcccgcaggtgagagcccctcccctcctaggtgaccctcaaccttcacggcgaggcctcctacctcctccaggtgggggaccctctccccgatgaaccccctaaaccaccagtgaaccccactgctctccagatgaggtcgcaaggaccaaccagtgcctacccgcccatgctcccccgaaactgggaactgacagcccagcccctccaaagccccttcctccagcttcagctgccaggtcagcaagggtgaggccggaagcaggcgggtgactcaccctgggcacctccgagcctcagtttccccatggatgcaacctgaggcctcctcactgagtcaaaaccgagacgcctctggtccccggagaggctgctggctctggggaaaggagagagcagcccagtgtgacagagcgagtccccacggctctgggagtgcctcgcatgtgtgtggcccaggtcctgacagcccacctactccctccccggcaggcactgggctccctctgctccccgtgggccgctccccgcgtggggccactgcccccggcccccgccatggtgcggatttcaaagcccaagacgtttcaggcctacttggatgattgtcaccggaggtatagctgtgcccactgccgcgctcacctggccaaccacgacgacctcatctccaagtccttccagggcagtcaggggcgtgcctacctcttcaactcagtggtgaacgtgggctgcgggccagccgaggagcgggtgctgctgaccggcctccatgctgtcgccgacatccactgcgagaactgcaagaccactttgggctggaaatatgtgagtcacccacctctgaccccaggctagcctttgacctgaccttccaacacctcctcctgacaagctgtcaccctatagcctttcagattgcataggccgagctcacacaagtcagcatccctgaccacattctctttatcttgcaccttgcaaggggtgtagaacttttctcttaacccatcccttctctcccaggcacttggatccccattagagagttaggatataatcagagtcaccatttatggaatgtttatgtgccttgcactgttgtgtgcctggcgtctattatctcattcaatcattgcagtgatcctctaggtagaagctattattatctctacagaagaagacagggaggcccagagatgttaggtaacttgcccaagatcacccaactggtaagtaacagaatagggaccagaatctgagttggttggttggtttttttttttcactccaaacccttggtcaccagcttatattgtcatttagagtatcagaaaaattgccccagactctgcaacaacatggagcttgggttcaccagcctccctttccatagtcctcattgccactgctgctgtccagggtctgatttcactaccctgagtctcatttccttatctctcagtggaagataaagccactgcctagcacccaggattgttacagggatcagattagatgctcaggaagatgctcttgggacactgcaagggacaggattcttcaggcgtcgcttggaactgtggtgcctctgtgaggtggatgtcccaggcagagccagccagccagccctgacctgagctcgctgctgaccctgccacagattggctgtgtgtctctggacaggtggcttggccactctggacctctaccaaataaagagctggccggccaggcacagtggctcacacctgtaatcccagcactttgggaggccgaggcgggtggatcacaaggtcaggagattgagaccatcctggctaacacggtgaaaccccatctctaccaaaaatac

SEQ ID NO: 4670 - DNA, 1973 bp, Homo sapiens
gggaggtaggtttgtgagcgtgagagatcgatctgtaccgcggggatccgaagtatgcttatccagggtgtactacagacctccacatgttggacagtaggattcagcagagaatgagtcccacatcctcttttcatccataagccactcttcccaactactcttccgccttccattgtccctatgtctactttactgctcaatctggattttggggaacctcctcccaaaaaggcattagaaggaaatgccaagcaccgaaattttgtcaagaagcggaggctcttagaacggagaggctttctgagtaaaaagaaccaaccccctagcaaggcgcctaagttgcactctgaaccttcaaagaaaggggaaactcctacggtcgatggcacttggaagaccccttccttcccaaaaaagaagacagctgcttccagcaatgggtcaggacagcccctggacaagaaagctgcagtgtcttggttgacccctgccccttcaaaaaaggctgattctgttgctgctaaagtagatttgctgggggagttccagagtgcccttccaaagatcaatagccacccaacccgctctcagaagaagagctcccagaagaaatcctctaaaaagaaccatcctcagaagaatgccccacagaactccacccaagctcattcagagaataaatgctccggagcatcccagaagttgccacggaagatggtggcaattgactgtgagatggtgggcacaggaccaaaggggcatgttagttccttggctcgatgtagcattgtcaactacaacggagatgtgctttatgacgagtacattcttcccccctgccacattgtggactaccgaaccaggtggagtggtatccggaagcagcacatggtgaatgccacacccttcaagattgctcgaggccagatcttgaagatactcacagggaagatagtggtggggcatgccatccacaacgacttcaaagcccttcagtactttcaccccaagtccctcacccgtgacacctcccatatcccccccctcaaccggaaggctgactgcccggagaatgccaccatgtctctgaagcatctcaccaagaagctgctaaaccgggatatccaggttgggaagagcggacattcctctgtggaagatgcccaggccaccatggagctatataagttggttgaagtcgagtgggaagagcacctagcccggaatccccctacagactagtggcagtggggacgctggtgatatgaggaggcagaggcagcacccaggagaaacagggcagtggaccaatggacagctccaccagctccacatctttggaagctagatttggggagagagaagctctaccccagacttaatacccattgaaatttcacctcaggtgttgtgtcctgtgtctggttaagtgtcccatggaaggggaaagccttcacgtcagaacccaaccctataccttttacttcttaaatggtgctaaccacaggtgtcccagggtgctctgtgccagttaagatttttaactttcaaggggcagggcatactgggaaatgtagtttcccaaactgccttatcacttgggtggacatatgtctccttttatgccttttggtcttgagtaattaacagcatcctcttccacgctcagaagtgttctggttggggccaggcatggtggctcacacctgtagtcccaacacttagggaggccgaggcgggcggatcacctgagatcaggagttcaagaccagcctggccaacatggcgaattcccgttctctactaaaaatacaaaaaatgtgtggggtgtggtggcaggagcctgtaatcctagctactcaggaggctgaggcaggagaatcgcttgagcccaggaggcggagattgcagtgagccgagatcgtgtcactgcactccagcctgggtgacaagagtgagactccgtctcc

SEQ ID NO: 4671 - DNA, 848 bp, Homo sapiens
gcctaccgcaagctcttggagggcgaggaggagaggctacgcctgtcccccagccctacctcgcagcgcagccgtggccgtgcttcctctcactcatcccagacacagggtgggggcagcgtcaccaaaaagcgcaaactggagtccactgagagccgcagcagcttctcacagcacgcacgcactagcgggcgcgtggccgtggaggaggtggatgaggagggcaagtttgtccggctgcgcaacaagtccaatgaggaccagtccatgggcaattggcagatcaagcgccagaatggagatgatcccttgctgacttaccggttcccaccaaagttcaccctgaaggctgggcaggtggtgacgatctgggctgcaggagctggggccacccacagcccccctaccgacctggtgtggaaggcacagaacacctggggctgcgggaacagcctgcgtacggctctcatcaactccactggggaaggctcccactgcagcagctcgggggaccccgctgagtacaacctgcgctcgcgcaccgtgctgtgcgggacctgcgggcagcctgccgacaaggcatctgccagcggctcaggagcccaggtgggcggacccatctcctctggctcttctgcctccagtgtcacggtcactcgcagctaccgcagtgtggggggcagtgggggtggcagcttcggggacaatctggtcacccgctcctacctcctgggcaactccagcccccgaacccagagcccccagaactgcagcatcatgtaatctgggacctgccaggcaggggtgggggtggaggcttcctgcgtcctcctcacctcatgcccacc

SEQ ID NO: 4672 - DNA, 2522 bp, Homo sapiens
actgctctcagtgagaagcgcacgctggagggcgagctgcatgatctgcggggccaggtggccaagcttgaggcagccctaggtgaggccaagaagcaacttcaggatgagatgctgcggcgggtggatgctgagaacaggctgcagaccatgaaggaggaactggacttccagaagaacatctacagtgaggagctgcgtgagaccaagcgccgtcatgagacccgactggtggagattgacaatgggaagcagcgtgagtttgagagccggctggcggatgcgctgcaggaactgcgggcccagcatgaggaccaggtggagcagtataagaaggagctggagaagacttattctgccaagctggacaatgccaggcagtctgctgagaggaacagcaacctggtgggggctgcccacgaggagctgcagcagtcgcgcatccgcatcgacagcctctctgcccagctcagccagctccagaagcagctggcagccaaggaggcgaagcttcgagacctggaggactcactggcccgtgagcgggacaccagccggcggctgctggcggaaaaggagcgggagatggccgagatgcgggcaaggatgcagcagcagctggacgagtaccaggagcttctggacatcaagctggccctggacatggagatccacgcctaccgcaagctcttggagggcgaggaggagaggctacgcctgtcccccagccctacctcgcagcgcagccgtggccgtgcttcctctcactcatcccagacacagggtgggggcagcgtcaccaaaaagcgcaaactggagtccactgagagccgcagcagcttctcacagcacgcacgcactagcgggcgcgtggccgtggaggaggtggatgaggagggcaagtttgtccggctgcgcaacaagtccaatgaggaccagtccatgggcaattggcagatcaagcgccagaatggagatgatcccttgctgacttaccggttcccaccaaagttcaccctgaaggctgggcaggtggtgacgatctgggctgcaggagctggggccacccacagcccccctaccgacctggtgtggaaggcacagaacacctggggctgcgggaacagcctgcgtacggctctcatcaactccactggggaagaagtggccatgcgcaagctggtgcgctcagtgactgtggttgaggacgacgaggatgaggatggagatgacctgctccatcaccaccacggctcccactgcagcagctcgggggaccccgctgagtacaacctgcgctcgcgcaccgtgctgtgcgggacctgcgggcagcctgccgacaaggcatctgccagcggctcaggagcccaggtgggcggacccatctcctctggctcttctgcctccagtgtcacggtcactcgcagctaccgcagtgtggggggcagtgggggtggcagcttcggggacaatctggtcacccgctcctacctcctgggcaactccagcccccgaacccagagcccccagaactgcagcatcatgtaatctgggacctgccaggcaggggtgggggtggaggcttcctgcgtcctcctcacctcatgcccaccccctgccctgcacgtcatgggagggggcttgaagccaaagaaaaataaccctttggtttttttcttctgtatttttttttctaagagaagttattttctacagtggttttatactgaaggaaaaacacaagcaaaaaaaaaaaaaagcatctatctcatctatctcaatcctaatttctcctcccttccttttccctgcttccaggaaactccacatctgccttaaaaccaaagagggcttcctctagaagccaagggaaaggggtgcttttatagaggctagcttctgcttttctgccctggctgctgcccccaccccggggaccctgtgacatggtgcctgagaggcaggcatagaggcttctccgccagcctcctctggacggcaggctcactgccaggccagcctccgagagggagagagagagagagaggacagcttgagccgggcccctgggcttggcctgctgtgattccactacacctggctgaggttcctctgcctgccccgcccccagtccccacccctgcccccagccccggggtgagtccattctcccaggtaccagctgcgcttgcttttctgtattttatttagacaagagatgggaatgaggtgggaggtggaagaagggagaagaaaggtgagtttgagctgccttccctagctttagaccctgggtgggctctgtgcagtcactggaggttgaagccaagtggggtgctgggaggagggagagggaggtcactggaaaggggagagcctgctggcacccaccgtggaggaggaaggcaagagggggtggaggggtgtggcagtggttttggcaaacgctaaagagcccttgcctccccatttcccatctgcaccccttctctcctccccaaatcaatacactagttgtttct

SEQ ID NO: 4673 - DNA, 781 bp, Homo sapiens
ggtgttcaggcgcttcgtggaggttggccgggtggcctatgtctcctttggacctcatgccggaaaattggtcgcgattgtagatgttattgatcagaacagggctttggtcgatggaccttgcactcaagtgaggagacaggccatgcctttcaagtgcatgcagctcactgatttcatcctcaagtttccgcacagtgcccaccagaagtatgtccgacaagcctggcagaaggcagacatcaatacaaaatgggcagccacacgatgggccaagaagattgaagccagagaaaggaaagccaagatgacagattttgatcgttttaaagttatgaaggcaaagaaaatgaggaacagaataatcaagaatgaagttaagaagcttcaaaaggcagctctcctgaaagcttctcccaaaaaagcacctggtactaagggtactgctgctgctgctgctgctgctgctgctgctaaagttccagcaaaaaagatcaccgccgcgagtaaaaaggctccagcccagaaggttcctgcccagaaagccacaggccagaaagcagcgcctgctccaaaagctcagaagggtcaaaaagctccagcccagaaagcacctgctccaaaggcatctggcaagaaagcataagtggcaatcataaaaagtaataaaggttctttttgacctgttgacaaatgtatttaagcctttggatttaaagcctgttgaggctggagttaggaggcagattgatagtaggattataataaacattaaataatc

SEQ ID NO: 4674 - DNA, 2540 bp, Homo sapiens
aggtcgacgccggccaagacagcacagacagattgacctattggggtgtttcgcgagtgtgagagggaagcgccgcggcctgtatttctagacctgcccttcgcctggttcgtggcgccttgtgaccccgggcccctgccgcctgcaagtcggaaattgcgctgtgctcctgtgctacggcctgtggctggactgcctgctgctgcccaactggctggcaagatgaagctctccctggtggccgcgatgctgctgctgctcagcgcggcgcgggccgaggaggaggacaagaaggaggacgtgggcacggtggtcggcatcgacctggggaccacctactcctgcgtcggcgtgttcaagaacggccgcgtggagatcatcgccaacgatcagggcaaccgcatcacgccgtcctatgtcgccttcactcctgaaggggaacgtctgattggcgatgccgccaagaaccagctcacctccaaccccgagaacacggtctttgacgccaagcggctcatcggccgcacgtggaatgacccgtctgtgcagcaggacatcaagttcttgccgttcaaggtggttgaaaagaaaactaaaccatacattcaagttgatattggaggtgggcaaacaaagacatttgctcctgaagaaatttctgccatggttctcactaaaatgaaagaaaccgctgaggcttatttgggaaagaaggttacccatgcagttgttactgtaccagcctattttaatgatgcccaacgccaagcaaccaaagacgctggaactattgctggcctaaatgttatgaggatcatcaacgagcctacggcagctgctattgcttatggcctggataagagggagggggagaagaacatcctggtgtttgacctgggtggcggaaccttcgatgtgtctcttctcaccattgacaatggtgtcttcgaagttgtggccactaatggagatactcatctgggtggagaagactttgaccagcgtgtcatggaacacttcatcaaactgtacaaaaagaagacgggcaaagatgtcaggaaagacaatagagctgtgcagaaactccggcgcgaggtagaaaaggccaaacgggccctgtcttctcagcatcaagcaagaattgaaattgagtccttctatgaaggagaagacttttctgagaccctgactcgggccaaatttgaagagctcaacatggatctgttccggtctactatgaagcccgtccagaaagtgttggaagattctgatttgaagaagtctgatattgatgaaattgttcttgttggtggctcgactcgaattccaaagattcagcaactggttaaagagttcttcaatggcaaggaaccatcccgtggcataaacccagatgaagctgtagcgtatggtgctgctgtccaggctggtgtgctctctggtgatcaagatacaggtgacctggtactgcttgatgtatgtccccttacacttggtattgaaactgtgggaggtgtcatgaccaaactgattccaaggaacacagtggtgcctaccaagaagtctcagatcttttctacagcttctgataatcaaccaactgttacaatcaaggtctatgaaggtgaaagacccctgacaaaagacaatcatcttctgggtacatttgatctgactggaattcctcctgctcctcgtggggtcccacagattgaagtcacctttgagatagatgtgaatggtattcttcgagtgacagctgaagacaagggtacagggaacaaaaataagatcacaatcaccaatgaccagaatcgcctgacacctgaagaaatcgaaaggatggttaatgatgctgagaagtttgctgaggaagacaaaaagctcaaggagcgcattgatactagaaatgagttggaaagctatgcctattctctaaagaatcagattggagataaagaaaagctgggaggtaaactttcctctgaagataaggagaccatggaaaaagctgtagaagaaaagattgaatggctggaaagccaccaagatgctgacattgaagacttcaaagctaagaagaaggaactggaagaaattgttcaaccaattatcagcaaactctatggaagtgcaggccctcccccaactggtgaagaggatacagcagaaaaagatgagttgtagacactgatctgctagtgctgtaatattgtaaatactggactcaggaacttttgttaggaaaaaattgaaagaacttaagtctcgaatgtaattggaatcttcacctcagagtggagttgaaactgctatagcctaagcggctgtttactgcttttcattagcagttgctcacatgtctttgggtgggggggagaagaagaattggccatcttaaaaagcgggtaaaaaacctgggttagggtgtgtgttcaccttcaaaatgttctatttaacaactgggtcatgtgcatctggtgtaggaagttttttctaccataagtgacaccaataaatgtttgttatttacactggtc

SEQ ID NO: 4675 - DNA, 1021 bp, Homo sapiens
aggttcagcttgttggtttagatgaggagagttcagagtttatttgcagaaacacctttgaccacccataccccaccacaaagctcatgtggatccctgacacaaaaggcgtctatccagacctactggcaacaagcggtgactatctccgtgtgtggagggttggtgaaacagagaccaggctggagtgtttgctaaacaataataagaactctgatttctgtgctcccctgacctcctttgactggaatgaggtggatccttatcttttaggtacctcaagcattgatacgacatgcaccatctgggggctggagacagggcaggtgttagggcgagtgaatctcgtgtctggccacgtgaagacccagctgatcgcccatgacaaagaggtctatgatattgcatttagccgggccgggggtggcagggacatgtttgcctctgtgggtgctgatggctcggtgcggatgtttgacctccgccatctagaacacagcaccatcatttacgaagacccacagcatcacccactgcttcgcctctgctggaacaagcaggaccctaactacctggccaccatggccatggatggaatggaggtggtgattctagatgtccgggttccctgcacacctgtcgccaggttaaacaaccatcgagcatgtgtcaatggcattgcttgggccccacattcatcctgccacatctgcactgcagcggatgaccaccaggctctcatctgggacatccagcaaatgccccgagccattgaggaccctatcctggcctacacagctgaaggagagatcaacaatgtgcagtgggcatcaactcagcccgactggatcgccatctgctacaacaactgcctggagatactcagagtgtagtgttggtggcgctgtgcccacgaggcaggggcttttgtatttcctgcctctgccccacccccaaacctcctgtataagaagtaccgtattttctgcccatcatactttgtaataaaacttgaacatgt

SEQ ID NO: 4676 - DNA, 2576 bp, Homo sapiens
gcggccggggaaaaacccggatgagctgggcagcagtgttggcagtcgcggctgcgagatttgggcacttttgggggtgccggtggcccgggccgatggcgcaaggttgggcaggattctctgaggaggaactgaggagactaaagcagactaaagatccatttgaaccacagcgacgtctccccgcgaagaaaagtcgacaacaacttcagcgagaaaaagcccttgtagagcaaagccaaaaacttgggcttcaagatggatcaacctcattacttccagagcagctgctttcagcaccaaaacagagagttaacgttcaaaaaccacctttttcttcccctactcttccgagtcatttcactctcacctcccccgttggtgatggacaaccacagggcattgaaagtcagccaaaggaactgggacttgagaattcccatgatggtcacaacaatgttgagattctacctccaaagccagattgcaaattggagaaaaagaaagtggaattgcaagaaaaatctcgttgggaagtcctccaacaagaacaacggctaatggaagagaaaaataaacgtaaaaaagctcttttggctaaagctattgcagaaagatccaaaagaactcaggcagagaccatgaaactaaagcggatccagaaggagttgcaggctttagatgacatggtgtcagctgacattggaattctcaggaaccggattgatcaggccagcttagactattcatacgctcggaagcggtttgacagggctgaagcagagtacattgcagcaaagctagatatacagcgcaagactgagataaaagagcaactcactgaacacctttgtacgatcatacagcaaaatgagctccgaaaggccaagaagttggaggagttgatgcaacaactagatgtagaagccgatgaagagactttggagcttgaggtggaggtcgagagattgctacacgaacaagaagtagaatcaaggagaccagtggttcgtttagagaggccatttcagcctgcggaggagagtgtgacattagaatttgctaaagagaacagaaagtgtcaagaacaagctgtttccccaaaggtagatgaccagtgtggaaattccagtagcatcccctttcttagtccaaactgcccaaatcaagaaggtaatgacatttcagctgctttggccacatgaagttctggtattcttttgagctaatatggtattgagtaaagtatactttttgcagtagatcatgccctgacctccaataaaaacctctttaaaacaatgctgatttttgaattcatgattagttttagtaaattaataggtttggccattctaaaatccaaaattatgataactgtatttctaggggtatgtttcaccttgattttggcccggttctttcagtgttccgtttaccctttttactgaaagtaagtgacttaaaaggatggaagaaaaactacatggttggagtgtttttagatcagataaatatagaaaagtaaaatggaaaatgatactcaatacctagttaaactcatttcacttctcctgggagacgtattaagactggaagtcctattttatttaatcagtatcagtaaaaagacaaaaattacagtgtgaacaagagaaaaacaggaatagaagaaaaaagttgcaggttgaattatctatctggatattactagagttgtaaaacacaacttggaaactggaatttatgtgaagaaccaaacaacttaaaccagcatcacttttgtcttcaatttgccttccagtgattttagtttacaacctgcgttttgttatttgaaacacacacacttatatataaacacatgtaattttactattttattgtctttcctttaatcgatgaattgattaaatttagacaattaaaacatttctaaagtgagactgaaaataatatagaaaatctcattgctacttgtgattatcaaaaaaagtatgtattttctttctaaagttatctataaatatgtttttgatatgttggacatgaattaccctgtcatgaagcgtttaaattgttaaaatgctgattttcttattagtttgttaattgcctgttactagtacttgaccaatacattgtgctatatgtaaatgtgtaaataaatattgtaattttctcacaaagtctgtgaatatcacattatgatttatttatcagaaattccaaaaagtaaaaatattacctttgaggactttttttttttaaaaaaagaattattatcagagaacataagcacaagtataagattgtatccataaaagtttctgaaaaacttagggacatcctgtttttaaatgggtttgtttgagggtattatcttctggtaatatagatgagctttatatttttatattatgtaatttgagttgaaagtataacattttactactgacttctctaaacagaagcatttctatagatagttgtgcttttatttatgaaatacataaaagccaacagtttcattgtctaacacacttctttttctaaggaataaacaagtctgatgt

SEQ ID NO: 4677 - DNA, 4000 bp, Homo sapiens
gagcaccagcatgtttgacatgcggtgtgaggaggaggccgcggtgcagccgcacagcagggcccgccaggagcagctgcagctgataaataaccagctgagggaagaggacgacaaatggcaagatgacctggctcgttggaagagtcgtagaagaagtgtttctcaggacttaatcaagaaagaggaagaaaggaaaaaaatggagaagttactggctggagaagatgggacaagtgaacgaaggaaaagcatcaaaacctacagagaaattgttcaagaaaaagagcggagagagagagagctgcatgaagcatataagaacgctcggtcccaggaggaggcagaggggatccttcaacagtacattgagaggttcaccatcagtgaggctgttctcgaacgcttggagatgccaaaaattctggaaagaagccattcaacagagccaaatttatcctccttcctgaatgaccccaatcccatgaaatacctgcggcaacagtcactgcctccacccaaattcactgccactgttgaaaccaccattgctcgtgccagtgttctggataccagcatgtcagcaggcagtgggtctccaagcaaaactgtcactcccaaagcagtgcctatgctgacacccaagccttactcccagcccaaaaattctcaagatgttctgaagacctttaaggtagacgggaaagtcagtgtgaatggagagacggttcatagagaggaggagaaggaaagagagtgtcccacggtggcacctgcccactccttaaccaaatcccagatgtttgaaggtgtggccagagtgcacgggtctccactggagctgaaacaagacaacggtagcatcgagatcaacataaagaagccaaactctgttccccaagagctcgcagcaaccactgagaaaacggaaccgaatagtcaagaggacaagaatgatggtggaaaatcaagaaaagggaatatagaacttgcctcatcagaaccacagcattttacaacaactgtgactcgatgcagcccgaccgtggcctttgtggaatttccctccagcccccagctgaagaatgatgtgtcggaagaaaaagaccagaagaaaccagaaaatgaaatgagtggaaaggtggagttggtgctgtcacaaaaggtggtaaagccaaaatctccagaacccgaagcaacgctgacatttccatttctggacaaaatgcctgaagccaaccaactacatttgccaaatctcaattctcaagtggattctccaagcagtgagaagtcacctgttatgacaccttttaagttctgggcatgggacccagaagaggagcgcaggcgacaggaaaaatggcaacaggaacaggaacgtttgctccaggagagataccagaaggagcaggacaagctgaaagaagagtgggaaaaggcccaaaaggaggtggaagaggaagaacgcagatactatgaggaggagcgtaagataattgaagacactgtggttccatttactgtttcttcaagttccgctgaccagctgtctacctcttcctccatgactgaaggcagtgggacaatgaataagatagacctgggaaactgtcaagatgaaaaacaagacagaagatggaagaaatcattccagggagatgacagtgacttattgctgaagactagggaaagtgatcgactggaggagaagggcagcctaactgaaggggccttggctcattctgggaaccctgtatcaaaaggagtccatgaagaccatcagctggataccgaggctggggccccacactgtggaacaaacccacagcttgctcaggatccatcccagaatcagcagacatcaaatccaacgcacagttcagaagatgtgaagccaaaaaccctcccgctggataaaagcattaaccatcagatcgagtctcccagtgaaaggcggaagtctataagtggaaagaagctgtgctcttcctgtgggcttcctttgggtaaaggagctgcaatgatcatcgagaccctcaatctctattttcacatccagtgtttcaggtgtggaatttgtaaaggccagcttggagatgcagtgagtgggacggatgttaggattcgaaatggtctcctgaactgtaatgattgctacatgcgatccagaagtgccgggcagcctacaacattgtgacacggctttcaagcttccggatcactcaccatttctttactgagagtgtcccctggcaactgcttaacaaaatcccaagctcaggggcttctcagcatttacctaatttctgaaaggctcttctgaaaggtggtatctgttctttcgtagcacagtgtttatgtttttcctgtttattgttttggttttttttttttttttgcatttgcacagtatacacaaaagaatatggggttgtaatgatcctgaatagctcaaaaaaggttttagcatggtcaaacaggcttatggtttaaaatgtgttattctcttctttgggaattagctaaatgatgcaataaacctgttttgttttagaatgtctaggaattaaacactttatgtttacagaattgagctgcagaaagtgcaagacatgccaatttgagacacacggtcttctaagactgaaggataaatttaatgcatttcagaaactaaacatcacagcaagctctatctctgagctataatttgtttttaatgcaaagacactagtttgataatatatactgtaatcctgaaacatttgtgttacttacctttggaggtagaaattataccaataaattattgcaccgttagtattagattctgtgtaccttggaagttatgtcattaatataggctggttcatcaaataaagcaaaaccttgcaatatcagctagatttacactccgggacgttgcccaaaggtaggaagaaagcagagggaaatatttcagtcatcatttccaaagtcattatcaaaatctgtgaggaagtttaatcttccaaagagtcaatgtcagacatcaggcctctgttgcctgcttctctcgaggcactagattaggagtcttcaataagagacttaacatgaggtatatggaagatgaggcaccgagataagttcatcattaggtgtgagcactgctcacccttgctggcaagttctccttaagggcctgaagcacaggtgtccaaagaaaagcgttaagtccatcttaatagaatctatgtggtatatgatgtggtcagcccctggtctgtgatcagcaagaacctacagcacagattatgccctgcccacttcaatgaatacctactctcctccattctccatcactttttttgctatcaagaactccggaccttgcccatggagaagtttagagaggaactcttgtggagagctggtttattttctgccctgtgcgacgagtttcagctggccaagaaaggagtcaagttattaaaaagcatcacaatgtagatctccaggctggttttttgttttttgttgttaagactggggaaagggggactatttattctgccttaaatcaatggcaaataagtcaagatgacattttgtgaatgtagactatggatacactcctaatagattgatgtagtcataaaagggggtcaagtagatgtttttctgttatgtaagcaataatttttccgtgtcttattgagtatggctagcgattatttattacatgctagatgggttctttgcatgtgggttccatataggtgcagaaatttcctcagccactggagggatttcgaccatatttgtcatttggatgagctgttattagattgaaatctacacatcatttcattaaaaattgtgccttagaaaacgcaaagctgttgcacatggcgataaattatggatgcagtacattgaagagagatgaagtcacttccaagtttccaagacttctcatggaggtgtttgctgttttacaggaaaaaataaaaat

SEQ ID NO: 4678 - DNA, 1345 bp, Homo sapiens
  misc_feature (672)..(674): n is a, c, g, or t
cttttgatatggtgtactggacaggagacatccccgcacatgatgtctggcaccagactcgtcaggaccaactgcgggccctgaccaccgtcacagcacttgtgaggaagttcctggggccagtgccagtgtaccctgctgtgggtaaccatgaaagcacacctgtcaatagcttccctccccccttcattgagggcaaccactcctcccgctggctctatgaagcgatggccaaggcttgggagccctggctgcctgccgaagccctgcgcaccctcaggtacttatcgtccgtggaaacccaggaagggaaaagaaaggtgcatataattggccacattcccccagggcactgtctgaagagctggagctggaattattaccgaattgtagccaggtatgagaacaccctggctgctcagttctttggccacactcatgtggatgaatttgaggtcttctatgatgaagagactctgagccggccgctggctgtagccttcctggcacccagtgcaactacctacatcggccttaatcctggttaccgtgtgtaccaaatagatggaaactactccgggagctctcacgtggtcctggaccatgagacctacatcctgaatctgacccaggcaaacataccgggagccataccgcactggcagcttctcnnntacagggctcgagaaacctatgggctgcccaacacactgcctaccgcctggcacaacctggtatatcgcatgcggggcgacatgcaacttttccagaccttctggtttctctaccataagggccacccaccctcggagccctgtggcacgccctgccgtctggctactctttgtgcccagctctctgcccgtgctgacagccctgctctgtgccgccacctgatgccagatgggagcctcccagaggcccagagcctgtggccaaggccactgttttgctagggccccagggcccacatttgggaaagttcttgatgtaggaaagggtgaaaaagcccaaatgctgctgtggttcaaccaggcaagatcatccggtgaaagaaccagtccctgggccccaaggatgccggggaaacaggaccttctcctttcctggagctggtttagctggatatgggagggggtttggctgcctgtgcccaggagctagactgccttgaggctgctgtcctttcacagccatggagtagaggcctaagttgacactgccctgggcagacaagacaggagctgtcgccccaggcctgtgctgcccagccaggaaccctgtactgctgctgcgacctgatgctgccagtctgttaaaataaagataagagacttggactcca

SEQ ID NO: 4679 - DNA, 1415 bp, Homo sapiens
tgtgggttcgcgacccggggggtggcgggcccaggccctattggccgggagccggaccccgattccgactgggagccggaggaacgggagctgcaggaggtggagaggtaccggcttctccccgggccctcagcttgaagcagggcctcgtgccccggcgctccaggccgcgcccccttggcgccgggtgtcctgccgctgcttgcgcagcggcccttgtttcttcttacccgttgttaggggcgcagcgtcaggtgttcagctcccctgggaccactggtcccttcattagtgacgtatttcatcatcagtttagagagttcggcatgcttacaggcagttattgttctaggtgttagctttctgggtgtacggagcagctctaagccggcaacatggcccggttgcccttgcgatcaaagagaagagggctgggcgctccatgatttagcctgaggctcttcaaacatccattctgcttccacgcatggcttctgccattggttctcttcccccagcaccctgaaacgacagaaacaagcaatccgattccagaaaattcggaggcaaatggaggcgcctggtgccccgcccaggaccctgacgtgggaagccatggagcagatacggtatttacatgaggaatttccagagtcctggtcagttcccaggttggctgaaggctttgatgtcagcactgatgtgatccgaagagttttaaaaagcaagtttttacccacattggagcagaagctgaagcaggatcaaaaagtccttaagaaagctgggcttgcccactcgctgcagcacctccggggctctggaaatacctcaaagctgctccctgcaggccactctgtatcaggctctttgcttatgccagggcatgaagcctcatctaaagacccaaatcacagcacagctttgaaagtgatagagtcagacactcacaggacaaatacaccaaggagaaggaagggaagaaataaagaaatccaggacctggaggagagctttgtgcctgttgctgcacccctaggtcatccaagagagctgcagaagtactccagtgattctgagagccccagaggaactggcagtggtgcgttgccaagtggtcagaagctggaggagttgaaggcagaggagccagataacttcagcagcaaagtagtgcagaggggccgagagttctttgacagcaacgggaacttcctgtacagaatttgagtcggggcttggcttatggagatgcctcgtgaaacacagctgggcaagtattaatgtatatggaacagcctggataagtttgccttctgacctcatttccttcttgatcagtgaacactaacattttggggacaacttagtcaattggttttccttacaacaaaataaagtaaaatgtagcagtc

SEQ ID NO: 4680 - DNA, 3766 bp, Homo sapiens
gctctgcccaagccgaggctgcggggccggcgccggcgggaggactgcggtgccccgcggaggggctgagtttgccagggcccacttgaccctgtttcccacctcccgccccccaggtccggaggcgggggcccccggggcgactcgggggcggaccgcggggcggagctgccgcccgtgagtccggccgagccacctgagcccgagccgcgggacaccgtcgctcctgctctccgaatgctgcgcaccgcgatgggcctgaggagctggctcgccgccccatggggcgcgctgccgcctcggccaccgctgctgctgctcctgctgctgctgctcctgctgcagccgccgcctccgacctgggcgctcagcccccggatcagcctgcctctgggctctgaagagcggccattcctcagattcgaagctgaacacatctccaactacacagcccttctgctgagcagggatggcaggaccctgtacgtgggtgctcgagaggccctctttgcactcagtagcaacctcagcttcctgccaggcggggagtaccaggagctgctttggggtgcagacgcagagaagaaacagcagtgcagcttcaagggcaaggacccacagcgcgactgtcaaaactacatcaagatcctcctgccgctcagcggcagtcacctgttcacctgtggcacagcagccttcagccccatgtgtacctacatcaacatggagaacttcaccctggcaagggacgagaaggggaatgtcctcctggaagatggcaagggccgttgtcccttcgacccgaatttcaagtccactgccctggtggttgatggcgagctctacactggaacagtcagcagcttccaagggaatgacccggccatctcgcggagccaaagccttcgccccaccaagaccgagagctccctcaactggctgcaagacccagcttttgtggcctcagcctacattcctgagagcctgggcagcttgcaaggcgatgatgacaagatctactttttcttcagcgagactggccaggaatttgagttctttgagaacaccattgtgtcccgcattgcccgcatctgcaagggcgatgagggtggagagcgggtgctacagcagcgctggacctccttcctcaaggcccagctgctgtgctcacggcccgacgatggcttccccttcaacgtgctgcaggatgtcttcacgctgagccccagcccccaggactggcgtgacacccttttctatggggtcttcacttcccagtggcacaggggaactacagaaggctctgccgtctgtgtcttcacaatgaaggatgtgcagagagtcttcagcggcctctacaaggaggtgaaccgtgagacacagcagatggtacaccgtgacccacccgtgcccacaccccggcctggagcgtgcatcaccaacagtgcccgggaaaggaagatcaactcatccctgcagctcccagaccgcgtgctgaacttcctcaaggaccacttcctgatggacgggcaggtccgaagccgcatgctgctgctgcagccccaggctcgctaccagcgcgtggctgtacaccgcgtccctggcctgcaccacacctacgatgtcctcttcctgggcactggtgacggccggctccacaaggcagtgagcgtgggcccccgggtgcacatcattgaggagctgcagatcttctcatcgggacagcccgtgcagaatctgctcctggacacccacagggggctgctgtatgcggcctcacactcgggcgtagtccaggtgcccatggccaactgcagcctgtacaggagctgtggggactgcctcctcgcccgggacccctactgtgcttggagcggctccagctgcaagcacgtcagcctctaccagcctcagctggccaccaggccgtggatccaggacatcgagggagccagcgccaaggacctttgcagcgcgtcttcggttgtgtccccgtcttttgtaccaacaggggagaagccatgtgagcaagtccagttccagcccaacacagtgaacactttggcctgcccgctcctctccaacctggcgacccgactctggctacgcaacggggcccccgtcaatgcctcggcctcctgccacgtgctacccactggggacctgctgctggtgggcacccaacagctgggggagttccagtgctggtcactagaggagggcttccagcagctggtagccagctactgcccagaggtggtggaggacggggtggcagaccaaacagatgagggtggcagtgtacccgtcattatcagcacatcgcgtgtgagtgcaccagctggtggcaaggccagctggggtgcagacaggtcctactggaaggagttcctggtgatgtgcacgctctttgtgctggccgtgctgctcccagttttattcttgctctaccggcaccggaacagcatgaaagtcttcctgaagcagggggaatgtgccagcgtgcaccccaagacctgccctgtggtgctgccccctgagacccgcccactcaacggcctagggccccctagcaccccgctcgatcaccgagggtaccagtccctgtcagacagccccccggggtcccgagtcttcactgagtcagagaagaggccactcagcatccaagacagcttcgtggaggtatccccagtgtgcccccggccccgggtccgccttggctcggagatccgtgactctgtggtgtgagagctgacttccagaggacgctgccctggcttcaggggctgtgaatgctcggagagggtcaactggacctcccctccgctctgctcttcgtggaacacgaccgtggtgcccggcccttgggagccttggggccagctggcctgctgctctccagtcaagtagcgaagctcctaccacccagacacccaaacagccgtggccccagaggtcctggccaaatatgggggcctgcctaggttggtggaacagtgctccttatgtaaactgagccctttgtttaaaaaacaattccaaatgtgaaactagaatgagagggaagagatagcatggcatgcagcacacacggctgctccagttcatggcctcccaggggtgctggggatgcatccaaagtggttgtctgagacagagttggaaaccctcaccaactggcctcttcaccttccacattatcccgctgccaccggctgccctgtctcactgcagattcaggaccagcttgggctgcgtgcgttctgccttgccagtcagccgaggatgtagttgttgctgccgtcgtcccaccacctcagggaccagagggctaggttggcactgcggccctcaccaggtcctgggctcggacccaactcctggacctttccagcctgtatcaggctgtggccacacgagaggacagcgcgagctcaggagagatttcgtgacaatgtacgcctttccctcagaattcagggaagagactgtcgcctgccttcctccgttgttgcgtgagaacccgtgtgccccttcccaccatatccaccctcgctccatctttgaactcaaacacgaggaactaactgcaccctggtcctctccccagtccccagttcaccctccatccctcaccttcctccactctaagggatatcaacactgcccagcacaggggccctgaatttatgtggtttttatacattttttaataagatgcactttatgtcattttttaataaagtctgaagaattactgttt

SEQ ID NO: 4681 - DNA, 1681 bp, Homo sapiens
agggcgatgagggtggagagcgggtgctacagcagcgctggacctccttcctcaaggcccagctgctgtgctcacggcccgacgatggcttccccttcaacgtgctgcaggatgtcttcacgctgagccccagcccccaggactggcgtgacacccttttctatggggtcttcacttcccagtggcacaggggaactacagaaggctctgccgtctgtgtcttcacaatgaaggatgtgcagagagtcttcagcggcctctacaaggaggtgaaccgtgagacacagcagatggtacaccgtgacccacccgtgcccacaccccggcctggagcgtgcatcaccaacagtgcccgggaaaggaagatcaactcatccctgcagctcccagaccgcgtgctgaacttcctcaaggaccacttcctgatggacgggcaggtccgaagccgcatgctgctgctgcagccccaggctcgctaccagcgcgtggctgtacaccgcgtccctggcctgcaccacacctacgatgtcctcttcctgggcactggtgacggccggctccacaaggcagtgagcgtgggcccccgggtgcacatcattgaggagctgcagatcttctcatcgggacagcccgtgcagaatctgctcctggacacccacagggggctgctgtatgcggcctcacactcgggcgtagtccaggtgcccatggccaactgcagcctgtacaggagctgtggggactgcctcctcgcccgggacccctactgtgcttggagcggctccagctgcaagcacgtcagcctctaccagcctcagctggccaccaggccgtggatccaggacatcgagggagccagcgccaaggacctttgcagcgcgtcttcggttgtgtccccgtcttttgtaccaacaggggagaagccatgtgagcaagtccagttccagcccaacacagtgaacactttggcctgcccgctcctctccaacctggcgacccgactctggctacgcaacggggcccccgtcaatgcctcggcctcctgccacgtgctacccactggggacctgctgctggtgggcacccaacagctgggggagttccagtgctggtcactagaggagggcttccagcagctggtagccagctactgcccagaggtggtggaggacggggtggcagaccaaacagatgagggtggcagtgtacccgtcattatcagcacatcgcgtgtgagtgcaccagctggtggcaaggccagctggggtgcagacaggtcctgggctcggacccaactcctggacctttccagcctgtatcaggctgtggccacacgagaggacagcgcgagctcaggagagatttcgtgacaatgtacgcctttccctcagaattcagggaagagactgtcgcctgccttcctccgttgttgcgtgagaacccgtgtgccccttcccaccatatccaccctcgctccatctttgaactcaaacacgaggaactaactgcaccctggtcctctccccagtccccagttcaccctccatccctcaccttcctccactctaagggatatcaacactgcccagcacaggggccctgaatttatgtggtttttatacattttttaataagatgcactttatgtcattttttaataaagtctgaagaattactgttt

SEQ ID NO: 4682 - DNA, 1678 bp, Homo sapiens
aaacagcggacggaggggccggcggtggcggagccggagcaagcaggggttcggcggcattacctgtacccattcaccggcggctaccggcggcggcgcgcagcgtgtcaggcggagagacccgccgccaggaatgaatctgaagtctgctgcagtaaaacacagaaggctttaaaatgttttcttgcataaaattcaaaacttttaagtagctgcttatgagaatagggaaggcagaaagctaatgtctgtctcaagatacaggacagctgtttgctcatcaacctcaactgtgtgtgcaactgaggaacatggctcaagaaactaatcacagccaagtgcctatgctttgttccactggctgtggattttatggaaaccctcgtacaaatggcatgtgttcagtatgctataaagaacatcttcaaagacagaatagtagtaatggtagaataagcccacctgcaacctctgtcagtagtctgtctgaatctttaccagttcaatgcacagatggcagtgtgccagaagcccagtcagcattagactctacatcttcatctatgcagcccagccctgtatcaaatcagtcacttttatcagaatctgtagcatcttctcaattggacagtacatctgtggacaaagcagtacctgaaacagaagatgtgcaggcttcagtatcagacacagcacagcagccatctgaagagcaaagcaagtctcttgaaaaaccgaaacaaaaaaagaatcgctgtttcatgtgcaggaagaaagtgggacttactgggtttgaatgccggtgtggaaatgtttactgtggtgtacaccgttactcagatgtacacaattgctcttacaattacaaagccgatgctgctgagaaaatcagaaaagaaaatccagtagttgttggtgaaaagatccaaaagatttgaactcctgctggaatacaaaattcttgagcatctgcaaactaaaaattgacttgaggttttttttttcctagtcattgggaatgtagagcagtgtatcttgcatgtcatcggaagaatagatttttgttttggttttgttttgaaaatgactctgaacatttatttccattgcaatttctgtggctgaggagacttaaactttacaagtattatccttttaagatcattttaattttagttgagtgcagagggcttttataacaaacgtgcagaaattttggagggctgtgatttttccagtattaaacatgcatgcattaatcttgcagtttattttctcattgtgtatgtatatatcgcttttctctgcagcacgatttctcttttgataatgccctttagggcacaactagttatcagtaactgaatgtatcttaatcattatggctgcttctgttttttcattaacaaaggttattcatatgttagcatatagtttctttgcacccactatttatgtctgaatcatttgtcacaagagagtgtgtgctgatgagattgtaagtttgtgtgtttaaacttttttttgagcgagggaagaaaaagctgtatgcatttcattgctgtctacaggtttctttcagattatgttcatgggtttgtgtgtatacaatatgaagaatgatctgaagtaattgtgctgtatttatgtttattcaccagtctttgattaaataaaa

SEQ ID NO: 4683 - DNA, 2042 bp, Homo sapiens
gtcggggaggaggtggctccagagatggcagtgagcgagaggagggggctcggccgcgggagccccgcggagtgggggcagcggctacttctggtgctgctgctgggtggctgctccgggcgcatccaccagctggcgctgacgggggagaagcgagcggacatccagctgaacagcttcggtttctacaccaatggctctctggaggtggagttgagcgtcctgcggctgggcctccgggaggcagaagagaagtccctgctggtggggttcagtctcagccgggttcggtctggcagagttcgctcctattcaacccgggatttccaggactgccctctccagaaaaacagtagcagtttcctggtcctgttcctcatcaacaccaaggatctgcaggtccaggtgcggaagtatggagagcagaagacgttgtttatctttcccgggctcctcccggaagcaccctccaaaccagggctcccgaagccacaggccacagtcccccgcaaggtggatggcggagggacctctgcagccagcaagcccaagtcaacacccgcagtgattcagggtcctagtgggaaggacaaggacctggtgttgggcctgagccacctcaacaactcctacaacttcagtttccacgtggtgatcggctctcaggcggaagaaggccagtacagcctgaacttccacaactgcaacaattcagtgccaggaaaggagcatccattcgacatcacggtgatgatccgggagaagaaccccgatggcttcctgtcggcagcggagatgccccttttcaagctctacatggtcatgtccgcctgcttcctggccgctggcatcttctgggtgtccatcctctgcaggaacacgtacagcgtcttcaagatccactggctcatggcggccttggccttcaccaagagcatctctctcctcttccacagcatcaactactacttcatcaacagccagggccaccccatcgaaggccttgccgtcatgtactacatcgcacacctgctgaagggcgccctcctcttcatcaccatcgccctgattggctcaggctgggccttcatcaagtacgtcctgtcggataaggagaagaaggtctttgggatcgtgatccccatgcaggtcctggccaacgtggcctacatcatcatcgagtcccgcgaggaaggcgccagcgactacgtgctgtggaaggagattttgttcctggtggacctcatctgctgtggtgccatcctgttccccgtagtctgtggcagtgaacctggccaagctgaagctgttccggcattactatgtcatgtcctggccccacgcctgctcgcgcccctgcaggtcatctgctacgtctacttcacccgcatcatcgccatcctgctgcaggtggctgtgccctttcagtggcagtggctgtaccagctcttggtggagggctccaccctggccttcttcgtgctcacgggctacaagttccagcccacaggaaacaacccgtacctgcagctgccccaggaggacgaggaggatgttcagatggagcaagtaatgacggactctgggttccgggaaggcctctccaaagtcaacaaaacagccagcgggcgggaactgttatgatcacctccacatctcagaccaaagggtcgtcctcccccagcatttctcactcctgcccttcttccacagcgtatgtggggaggtggagggggtccatgtggaccaggcgcccagctccccgggaccccggttcccggacaagcccatttggaagaagagtcccttcctccccccaaatattgggcagccctgtccttaccccgggaccacccctcccttccagctatgtgtacaataatgaccaatctgtttggctacgccgttgtcttgcctttttgggggttggggtctacacggaggttgtgtttacaatgtagaaacctgttttcgctgtgtgtggcgggggcgcgggcacagggtccgtgtctttgtatattcaataaatattcattcagtaa

SEQ ID NO: 4684 - DNA, 2816 bp, Homo sapiens
cggcgctcacgcccatgacgatccccgatgtgtttccgcacctgccgctcatcgccatcacccgcaacccggtgttcccgcgctttatcaagattatcgaggttaaaaataagaagttggttgagctgctgagaaggaaagttcgtctcgcccagccttatgtcggcgtctttctaaagagagatgacagcaatgagtcggatgtggtcgagagcctggatgaaatctaccacacggggacgtttgcccagatccatgagatgcaggaccttggggacaagctgcgcatgatcgtcatgggacacagaaggccctgactgcagagatcgtgaagaccatccgggacatcattgccttgaaccctctctacagggagtcagtgctgcagatgatgcaggctggccagcgggtggtggacaaccccatctacctgagcgacatgggcgccgcgctcaccggggccgagtcccatgagctgcaggacgtcctggaagagaccaatattcctaagcggctgtacaaggccctctccctgctgaagaaggaatttgaactgagcaagctgcagcagcgcctggggcgggaggtggaggagaagatcaagcagacccaccgtaagtacctgctgcaggagcagctaaagatcatcaagaaggagctgggcctggagaaggacgacaaggatgccatcgaggagaagttccgggagcgcctgaaggagctcgtggtccccaagcacgtcatggatgttgtggacgaggagctgagcaagctgggcctgctggacaaccactcctcggagttcaatgtcacccgcaactacctagactggctcacgtccatcccttggggcaagtacagcaacgagaacctggacctggcgcgggcacaggcagtgctggaggaagaccactacggcatggaggacgtcaagaaacgcatcctggagttcattgccgttagccagctccgcggctccacccagggcaagatcctctgcttctatggcccccctggcgtgggtaagaccagcattgctcgctccatcgcccgcgccctgaaccgagagtacttccgcttcagcgtcgggggcatgactgacgtggctgagatcaagggccacaggcggacctacgtgggcgccatgcccgggaagatcatccagtgtttgaagaagaccaagacggagaaccccctgatcctcatcgacgaggtgcgtgcggagaggcccggagaccccctaacccggcaatgccgtgtgcaagatgaagccgagccttccgggtcctaggatccccgagccaactcaggggccatcgccgtgatgctggccctgatggcacggacgggtccctcccacccacagccacgcccagcaggctgcccgtccaaggcagggtgtgggtgccgctctcactcggggtctccccagccctgaccctggggtctccccactgggcgggctggccaggggcacggcgaggggcaccacctgctgtctgctgccccaggtggacaagatcggccgaggctaccagggggacccgtcgtcggcactgctggagctgctggacccagagcagaatgccaacttcctggaccactacctggacgtgcccgtggacttgtccaaggtgctgttcatctgcacggccaacgtcacggacaccatccccgagccgctgcgagaccgtatggagatgatcaacgtgtcgggctacgtggcccaggagaagctggccattgcggagcgctacctggtgccccaggctcgcgccctgtgtggcttggatgagagcaaggccaagctgtcatcggacgtgctgacgctgctcatcaagcagtactgccgcgagagcggtgtccgcaacctgcagaagcaagtggagaaggtgttacggaaatcggcctacaagattgtcagcggcgaggccgagtccgtggaggtgacgcccgagaacctgcaggacttcgtggggaagcccgtgttcaccgtggagcgcatgtatgacgtgacaccgcccggcgtggtcatggggctggcctggaccgcaatgggaggctccacgctgtttgtggagacatccctgagacggccacaggacaaggatgccaagggtgacaaggatggcagcctggaggtgacaggccagctgggggaggtgatgaaggagagcgcccgcatagcctacaccttcgccagagccttcctcatgcagcacgcccccgccaatgactacctggtgacctcacacatccacctgcatgtgcccgagggcgccacccccaaggacggcccaagcgcaggctgcaccatcgtcacggccctgctgtccctggccatgggcaggcctgtccggcagaatctggccatgactggcgaagtctccctcacgggcaagatcctgcctgttggtggcatcaaggagaagaccattgcggccaagcgcgcaggggtgacgtgcatcgtcctgccagccgagaacaagaaggacttctacgacctggcagccttcatcaccgagggcctggaggtgcacttcgtggaacactaccgggagatcttcgacatcgccttcccggacgagcaggcagaggcgctggccgtggaacggtgacggccaccccgggactgcaggcggcggatgtcaggccctgtctgggccagaactgagcgctgtggggagcgcgcccggacctggcagtggagccaccgagcgagcagctcggtccagtgacccagatcccagggacctcagtcggcttaatcagagtgtggcatagaagctatttaatgattaaagtcatttgcagta

SEQ ID NO: 4685 - DNA, 2083 bp, Homo sapiens
tatgtaaggcggccaaggctgacctggtatttatggtggatggatcctggagcattggagatgaaaatttcaataagatcatcagctttctatacagcactgttggagccctgaacaagattggcacagatggaacccaagttgcaatggttcagttcactgatgatcccagaacagaatttaaactaaatgcttacaaaaccaaagagactcttcttgatgcaattaaacacatttcatacaaaggaggaaatacaaaaacaggaaaagcaattaagtatgttcgagataccttgttcactgcagagtcaggtacaagaaggggcatcccaaaggttatcgtggttataactgatggaagatcacaagatgatgtgaacaaaatctccagggagatgcaattagatggctatagcatttttgcaattggtgtggccgatgcagattactcggagttggttagcattggcagtaagcccagcgcacgccatgtcttctttgtggatgactttgacgcctttaagaaaatcgaagatgagttaattacttttgtctgcgaaacagcatcagcaacctgtccagtggtacacaaggatggcattgatcttgcaggatttaagatgatggaaatgtttggtttggttgaaaaagatttttcatcagtggaaggggtttctatggagcctggtaccttcaatgtgtttccatgttaccaactccataaagatgccctggtttcccagccaaccaggtacttgcacccagaaggattgccctccgactacacaatcagttttctattccggattcttcctgacactccacaggagccatttgctctttgggagattttaaataaaaattctgacccattggttggggttattttagacaatggtgggaaaactctaacatatttcaactatgaccagagtggggattttcaaactgttactttcgaaggacctgaaattaggaaaattttttatggaagctttcacaagctacacattgttgtcagtgagactttggtcaaagtggttattgactgcaagcaagtgggtgagaaggcaatgaacgcatcagctaatatcacgtcagatggtgtagaagtgctagggaaaatggttcgatcaagaggaccaggtggaaactctgcaccgttccagttacagatgtttgatattgtttgctccacatcatgggccaatacagacaaatgctgtgaacttccaggcctgagagatgatgagtcttgcccagaccttccccattcctgctcctgttctgaaaccaatgaagtggctctgggaccagcgggcccaccaggtggtccaggactccgaggaccaaagggccagcaaggtgaaccgggtccaaagggaccagatggccctcggggtgaaattggtctgccaggacctcagggtccacctggacctcaaggaccaagtggtctgtccattcaaggaatgcccggaatgccaggagaaaaaggagagaaaggagatactggccttccaggtccacagggtatcccaggaggcgttggttcaccaggacgtgatggctcaccaggccagaggggccttccgggaaaggatggatcctcgggacctccaggaccaccagggccaataggcattcctggcacccctggagtcccagggatcacaggaagcatgggaccgcaaggcgccctgggaccacctggtgtccctggagcaaagggggaacgaggagagcggggtgacctgcagtctcaagccatggtgagatcagtggcgcgtcaagtatgcgaacagctcatccagagtcacatggccaggtacactgccatcctcaaccagattcccagccactcctcatccatccggactgtccaagggcctcctggggagcctgggaggccaggctcacctggagcccctggtgaacaaggacccccaggcacaccaggcttccccggaaatgcaggcgtgccagggaccccaggagaacgaggtctaactggtatcaaaggagaaaaaggaaatccaggcgttggaacccaaggtccaagaggcccccctggaccagcagg

SEQ ID NO: 4686 - DNA, 1385 bp, Homo sapiens
ggcggcaggcacggtccgtgcggagcaggcgagcgagcgggaagacgcagccaccttcctcaccagccagcccacagcggtttgttccccttctcgggagtgcgccaatgcctgggccgacccaaaccctgtccccaaatggcgagaacaacaacgacatcatccaggataataacgggaccatcattcctttccggaagcacacagtgcgcggggagcgttcctacagttggggaatggcggtcaatgtgtattctacctcgataacccaagagactatgagcagacatgacatcattgcatgggttaatgacatagtatctttaaactacacaaaagtggaacagctttgttcaggagcggcctattgccaattcatggacatgctcttccctggctgcattagtttgaagaaagtaaaatttcaagcaaagctggaacatgaatatattcacaattttaaacttctgcaagcatcatttaagcgaatgaacgttgataaggtaattccagtggagaagctagtgaaaggacgtttccaggacaacctggattttattcaatggtttaagaaattctatgatgctaactacgatgggaaggagtatgatcctgtagaggcacgacaagggcaagatgcaattcctcctcctgaccctggtgaacagatcttcaacctgccaaaaaagtctcaccatgcaaactcccccacagcaggtgcagctaaatcaagtccagcagctaaaccaggatccacaccttctcgaccctcatcagccaaaagggcttcttccagtggctcagcatccaaatccgataaagatttagaaacgcaggtcatacagcttaatgaacaggtaatgcatcagctctggccacgcctctaggagcagtgacgtgtgtaagaggtagggggcctaggatcccctaggactggggtaagggagggaagggtaaggaagaatccttggtttcaagtaagtgagaataaaaagaattgttcgaagacaaaatcagtagcccatgatgaataaaaagtgttagtcacaaatctcaaagctgtacattaagatggggcagatggctcagccttgctgcagacttcaggctaccttcccctcccctgctcctcagggctgtcaagagctccaggctagaccgttgcccatcctgcccacttctggccattctagatagtgctgcattagggtgagtctgcctccctctctttttaaaggctgggtcagggttagtctgtctccctcccactctcttcttttttcccttcttcctttctttcttcagctattagtagttgagcttattctatatgaaagatattacgcttaatgctggtaatataaaggtagtaaaatagatacctt

SEQ ID NO: 4687 - DNA, 1720 bp, Homo sapiens
gccttgggtccccgctgctggttctcctccctcctcctcgcattctcctcctcctctgctcctcccgatccctcctccgccgcctggtccctcctcctcccgccctgcctccccgcgcctcggcccgcgcgagctagacgtccgggcagcccccggcgcagcgcggccgcagcagcctccgccccccgcacggtgtgagcgcccgacgcggccgaggcggccggagtcccgagctagccccggcggccgccgccgcccagaccggacgacaggccacctcgtcggcgtccgcccgagtccccgcctcgccgccaacgccacaaccaccgcgcacggccccctgactccgtccagtattgatcgggagagccggagcgagctcttcggggagcagcgatgcgaccctccgggacggccggggcagcgctcctggcgctgctggctgcgctctgcccggcgagtcgggctctggaggaaaagaaagtttgccaaggcacgagtaacaagctcacgcagttgggcacttttgaagatcattttctcagcctccagaggatgttcaataactgtgaggtggtccttgggaatttggaaattacctatgtgcagaggaattatgatctttccttcttaaagaccatccaggaggtggctggttatgtcctcattgccctcaacacagtggagcgaattcctttggaaaacctgcagatcatcagaggaaatatgtactacgaaaattcctatgccttagcagtcttatctaactatgatgcaaataaaaccggactgaaggagctgcccatgagaaatttacaggaaatcctgcatggcgccgtgcggttcagcaacaaccctgccctgtgcaacgtggagagcatccagtggcgggacatagtcagcagtgactttctcagcaacatgtcgatggacttccagaaccacctgggcagctgccaaaagtgtgatccaagctgtcccaatgggagctgctggggtgcaggagaggagaactgccagaaactgaccaaaatcatctgtgcccagcagtgctccgggcgctgccgtggcaagtcccccagtgactgctgccacaaccagtgtgctgcaggctgcacaggcccccgggagagcgactgcctggtctgccgcaaattccgagacgaagccacgtgcaaggacacctgccccccactcatgctctacaaccccaccacgtaccagatggatgtgaaccccgagggcaaatacagctttggtgccacctgcgtgaagaagtgtccccgtaattatgtggtgacagatcacggctcgtgcgtccgagcctgtggggccgacagctatgagatggaggaagacggcgtccgcaagtgtaagaagtgcgaagggccttgccgcaaagtgtgtaacggaataggtattggtgaatttaaagactcactctccataaatgctacgaatattaaacacttcaaaaactgcacctccatcagtggcgatctccacatcctgccggtggcatttaggggtgactccttcacacatactcctcctctggatccacaggaactggatattctgaaaaccgtaaaggaaatcacaggtttgagctgaattatcacatgaatataaatgggaaatcagtgttttagagagagaacttttcgacatatttcctgttcccttggaataaaaacatttcttctgaaattttaccgtt

SEQ ID NO: 4688 - DNA, 2864 bp, Homo sapiens
cccggcgcagcgcggccgcagcagcctccgccccccgcacggtgtgagcgcccgacgcggccgaggcggccggagtcccgagctagccccggcggccgccgccgcccagaccggacgacaggccacctcgtcggcgtccgcccgagtccccgcctcgccgccaacgccacaaccaccgcgcacggccccctgactccgtccagtattgatcgggagagccggagcgagctcttcggggagcagcgatgcgaccctccgggacggccggggcagcgctcctggcgctgctggctgcgctctgcccggcgagtcgggctctggaggaaaagaaagtttgccaaggcacgagtaacaagctcacgcagttgggcacttttgaagatcattttctcagcctccagaggatgttcaataactgtgaggtggtccttgggaatttggaaattacctatgtgcagaggaattatgatctttccttcttaaagaccatccaggaggtggctggttatgtcctcattgccctcaacacagtggagcgaattcctttggaaaacctgcagatcatcagaggaaatatgtactacgaaaattcctatgccttagcagtcttatctaactatgatgcaaataaaaccggactgaaggagctgcccatgagaaatttacaggaaatcctgcatggcgccgtgcggttcagcaacaaccctgccctgtgcaacgtggagagcatccagtggcgggacatagtcagcagtgactttctcagcaacatgtcgatggacttccagaaccacctgggcagctgccaaaagtgtgatccaagctgtcccaatgggagctgctggggtgcaggagaggagaactgccagaaactgaccaaaatcatctgtgcccagcagtgctccgggcgctgccgtggcaagtcccccagtgactgctgccacaaccagtgtgctgcaggctgcacaggcccccgggagagcgactgcctggtctgccgcaaattccgagacgaagccacgtgcaaggacacctgccccccactcatgctctacaaccccaccacgtaccagatggatgtgaaccccgagggcaaatacagctttggtgccacctgcgtgaagaagtgtccccgtaattatgtggtgacagatcacggctcgtgcgtccgagcctgtggggccgacagctatgagatggaggaagacggcgtccgcaagtgtaagaagtgcgaagggccttgccgcaaagtgtgtaacggaataggtattggtgaatttaaagactcactctccataaatgctacgaatattaaacacttcaaaaactgcacctccatcagtggcgatctccacatcctgccggtggcatttaggggtgactccttcacacatactcctcctctggatccacaggaactggatattctgaaaaccgtaaaggaaatcacagggtttttgctgattcaggcttggcctgaaaacaggacggacctccatgcctttgagaacctagaaatcatacgcggcaggaccaagcaacatggtcagttttctcttgcagtcgtcagcctgaacataacatccttgggattacgctccctcaaggagataagtgatggagatgtgataatttcaggaaacaaaaatttgtgctatgcaaatacaataaactggaaaaaactgtttgggacctccggtcagaaaaccaaaattataagcaacagaggtgaaaacagctgcaaggccacaggccaggtctgccatgccttgtgctcccccgagggctgctggggcccggagcccagggactgcgtctcttgccggaatgtcagccgaggcagggaatgcgtggacaagtgcaaccttctggagggtgagccaagggagtttgtggagaactctgagtgcatacagtgccacccagagtgcctgcctcaggccatgaacatcacctgcacaggacggggaccagacaactgtatccagtgtgcccactacattgacggcccccactgcgtcaagacctgcccggcaggagtcatgggagaaaacaacaccctggtctggaagtacgcagacgccggccatgtgtgccacctgtgccatccaaactgcacctacgggccaggaaatgagagtctcaaagccatgttattctgcctttttaaactatcatcctgtaatcaaagtaatgatggcagcgtgtcccaccagagcgggagcccagctgctcaggagtcatgcttaggatggatcccttctcttctgccgtcagagtttcagctgggttggggtggatgcagccacctccatgcctggccttctgcatctgtgatcatcacggcctcctcctgccactgagcctcatgccttcacgtgtctgttccccccgcttttcctttctgccacccctgcacgtgggccgccaggttcccaagagtatcctacccatttccttccttccactccctttgccagtgcctctcaccccaactagtagctaaccatcacccccaggactgacctcttcctcctcgctgccagatgattgttcaaagcacagaatttgtcagaaacctgcagggactccatgctgccagccttctccgtaattagcatggccccagtccatgcttctagccttggttccttctgcccctctgtttgaaattctagagccagctgtgggacaattatctgtgtcaaaagccagatgtgaaaacatctcaataacaaactggctgctttgttcaatgctagaacaacgcctgtcacagagtagaaactcaaaaatatttgctgagtgaatgaacaaatgaataaatgcataataaataattaaccaccaatccaacatccaga

SEQ ID NO: 4689 - DNA, 2932 bp, Homo sapiens
ccggacgtaggaggtggaggttgtggaattcgccgttcgaaagcagggactaaaagccccacttcgtcttacgttccgaaaggaaggcgtctgttgagcctttctctcagtcgtgagggaggcgtcgacggcgtgcggtaagtcctgagttgaggcttgcgggatcctttccggagaaagcgcaggctaaagccgcaggtgaagatgtccaactacgtgaacgacatgtggccgggctcgccgcaggagaaggattcgccctcgacctcgcggtcgggcgggtccagccggctgtcgtcgcggtctaggagccgctctttttccagaagctctcggtcccattcccgcgtctcgagccggttttcgtccaggagtcggaggagcaagtccaggtcccgttcccgaaggcgccaccagcggaagtacaggcgctactcgcggtcatactcgcggagccggtcgcgatcccgcagccgccgttaccgagagaggcgctacgggttcaccaggagatactaccggtctccttcgcggtaccggtcccggtcccgtagcaggtcgcgctctcggggaaggtcgtactgcggaagggcgtacgcgatcgcgcggggacagcgctactacggctttggtcgcacagtgtacccggaggagcacagcagatggagggacagatccaggacgaggtcgcggagcagaaccccctttcgcttaagtgaaaaagatcgaatggagctgttagaaatagcaaaaaccaatgcagcgaaagctctaggaacaaccaacattgacttgccagctagtctcagaactgttccttcagccaaagaaacaagccgtggaataggtgtatcaagtaatggtgcaaagcctgaagtaagtattctaggtttgtcggaacaaaactttcagaaagccaactgtcaaatctgattagccacttatatcttagactatactttttgggaagtctagagatgtatataatgtgctaaattcaaagtagcaaatctgaagataggcaatgtcaaacccatgaaaatgggagattaatgagctttatttggccgtgcatggtgcctcatgcctgtaatgaggcagatggcttgagtccaggagttcaagactagcctgggcaatgtggcaaaaccgcgtgtttacaaaaaatacaaaaattagccaggcatggtggtgcatgcctgtagtcccagctgtttgggaggctgaggcaggaggatctttgagcctaggatgctaaggttgcagtgagccaagatggcaccattgcactctagcctgggcagcagagcgagaccctgtctcaaaaaatacatttatttttttcattttcagttaacagtgtactcttataacaccgttattagctggtactttggtgatttctattactagtttttctaagctatttacagagtgtttgtagctttcatttgcagcattatgttcccacaaattctgtactcagcatatacagtatagtttatctgctctatttctgtcttatagaaatcatgaatgtggtctgcagacattgatgaagaaaatctgttggtaattgatacatgggctaaagcatcagaggtttaatttgaagtttatgttcacacactgaaaacttagtttttttgttggtagatccatgtgcatgctagaatttgggacaggcactatttgcataaagtattaaagtcaatttttaaactaagcaaaggtacacgttgtaacggtggggcatctgtgaaaaagatgtccctttcataatatatgcaatatattccagatgttttgagagattacagaagaggaggcctgcttcacttgcagataagtttattataattctccagaaatgtgcaggatgtgcattagcaaattgcactgtacttttcactccagcctgggtgacagagcaagactcccgtctcgggggcttaaaaaaaaaaaatgctgtatctaaatgaatctgtgtaattgggcccagatgtgggtttgctcagtattagtagacaaggtctttgttcagacgattaggtgcctaactggcaaatgccttagtttcttaaaacgtattttctgatgtggctttacatttcaaaagtgaacttgattcaacctgagaaaactgattaaaaaattagtttaaatttgccagcagggaagtaaaataattatgggaagagtgtcttaagcctaatattaaatcagttttgttaaggggaaaactcaatagttctgttacttaggctgttagatccaagttgatttttgtgtctacagctaaattttgtttacaattaggctattttttaatataggatttagaaaccaagggtatgtgttttaaaattacactttttcttaacctgtctagctgtcggaaaaggtaacagaagatggaactcgaaatcccaatgaaaaacctacccagcaaagaagcatagcttttagctctaataattctgtagcaaagccaatacaaaaatcagctaaagctgccacagaagaggcatcttcaagatcaccaaaaatagatcagaaaaaaagtccatatggactgtggatacctatctaaaagaagaaaactgatggctaagtttgcatgaaaactgcactttattgcaagttagtgtttctagcattatcccatccctttgagccattcaggggtacttgtgcatttaaaaaccaacacaaaaagatgtaaatacttaacactcaaatattaacattttaggtttctcttgcagatatgagagatagcacagatggaccaaaggttatgcacaggtgggagtcttttgtatatagttgtaaatattgtcttggttatgtaaaaatgaaattttttagacacagtaattgaactgtattcctgttttgtatatttaataaatttcttgttttcattctt

SEQ ID NO: 4690 - DNA, 3153 bp, Homo sapiens
caggacgaagtttttggctgtgggctctctgggacagagtggagcgcctgtggatttagccggggacacaccatcctgctcgcaggtgcctggacaggacaggggacgagggaggaacactctctgaggaagcccaactcctatgagctcctctctggcagcactcaaaccagtgaagcttgggaaagtcattgacctccagtcgttctgctgagaaacatctggctctatttccatggagaccagggaatctgaagatttggaaaagacccggaggaaatcagcaagtgatcaatggaacactgataatgaaccagccaaggtgaaacctgagttactcccagaaaaagaggagacttctcaagctgaccaggatatccaagacaaagagcctcattgccacatcccaattaagagaaattccatcttcaatcgctccataagacgcaaaagcaaagccaaggccagagacaaccccgaacggaacgccagctgcctggcagattcacaggacaatggaaaatctgtaaatgagcccctgaccttgaatatcccctggagcagaatgcctccttgcagaacagcaatgcagacagacccaggagcccaggaaatgagtgagtcgtcctccaccccgggaaatggggccacgcccgaggagtggccggccctggccgacagccccaccacgctcaccgaggccctgcggatgatccaccccattcccgccgactcctggagaaacctcattgaacaaatagggctcctgtatcaggaataccgagataaatcgactctccaagaaatcgaaaccaggaggcaacaggatgcagaaatagaagacaataccaatgggtccccggccagtgaggacaccccggaggaggaagaagaagaggaggaggaggaggagccggccagcccaccagagaggaagactctgccccagatctgcctgctcagtaacccccactcaaggttcaacctctggcaggatcttcccgagatccggagcagcggggtgcttgagatcctacagcccgaggagattaagctgcaggaggccatgttcgagctggtcacttccgaggcgtcctactacaagagtctgaacctgctcgtgtcccacttcatggagaacgagcggataaggaagatcctgcacccgtccgaggcgcacatcctcttctccaacgtcctggacgtgctggctgtcagtgagcggttcctcctggagctggagcaccggatggaggagaacatcgtcatctctgacgtgtgtgacattgtgtaccgttatgcggccgaccacttctctgtctacatcacctacgtcagcaatcagacctaccaggagcggacctataagcagctgctccaggagaaggcagctttccgggagctgatcgcgcagctagagctcgaccccaagtgcagggggctgcccttctcctccttcctcatcctgcctttccagaggatcacacgcctcaagctgttggtccagaacatcctgaagagggtagaagagaggtctgagcgggagtgcactgctttggatgctcacaaggagctggaaatggtggtgaaggcatgcaacgagggcgtcaggaaaatgagccgcacggaacagatgatcagcattcagaagaagatggagttcaagatcaagtcggtgcccatcatctcccactcccgctggctgctgaagcagggtgagctgcagcagatgtcaggccccaagacctcccggaccctgaggaccaagaagctcttccacgaaatttacctcttcctgttcaacgacctgctggtgatctgccggcagattccaggagacaagtaccaggtatttgactcagctccgcggggactgctgcgtgtggaggagctggaggaccagggccagacgctggccaacgtgttcatcctgcggctgctggagaacgcagatgaccgggaggccacctacatgctaaaggcgtcctctcagagtgagatgaagcgttggatgacctcactggcccccaacaggaggaccaagtttgtttcgttcacatcccggctgctggactgcccccaggtccagtgcgtgcacccatacgtggctcagcagccagacgagctgacgctggagctcgccgacatcctcaacatcctggacaagactgacgacgggtggatctttggcgagcgtctgcacgaccaggagagaggctggttccccagctccatgactgaggagatcttgaatcccaagatccggtcccagaacctcaaggaatgtttccgtgtccacaagatggatgaccctcagcgcagccagaacaaggaccgcaggaagctgggcagccggaatcggcaatgacccccacccagggggccagcgggagcagggcctgcatgagaccccgacagaaggtgggggggggggggctctgggaagcacaggccagcacctccccaggtggcaggatctggcttggggtgcccggccctcatccctgcccacgcagtgagtgctcatgtgtcttggccccttgctcgcaaactggataaagggtgcccaagcctctcctgatgcatttgtaaacaagaaggtttcagcagtattacaccacctccctcatgcctccgagggggtggaagggggtgggcacactccagggccccccatgcccctggcccccagggactggaagaggctcccaacccagagtgtccctgtgggaggcaggcagaaggtgacaattgacacgatttcctgcacgcgtcctcctctaccttggaagcagttagaatctaccaggcacagatgaggccgcccttgcctgacggagcttgatgagcagcccttggtctccggttccaggactgagagcccagctgcctctgcccacccttccccaggcctctgccagcctctggctgcacggtcaggccctgccccatggcaggcctgccagagcttggctggggacccctcccgcctctggctccctgatgggctggatgtaacttgtgtcttctagccccttaaggagcccaggtgttttaaggaatgaattggtcactgcatcttgtatcgattatggttctgagaaaagcaaatatcacttttggctgcattaaaagaagcatcatatataaaat

SEQ ID NO: 4691 - DNA, 5068 bp, Homo sapiens
gagagttcagggaggccgccctgagattccggcgaggccgcgggtcccacctcccgggggcggggcgagggcggagcggggagaagggagctgacgggcgcccggccggctgcggtccgtgcggaggctgagccggccgcgggcgcgaccggaggcaggtgatttccgttactatggcaatgacggcagggactacaacaacctttcctatgagcaaccatacccgggaaagagtgactgtagccaagctcacattggagaatttttatagcaacctaattttacagcatgaagagagagaaaccaggcagaagaaattagaagtggccatggaagaagaaggattagcagatgaagagaaaaagttacgtcgatcacaacacgctcgcaaagaaacagagttcttacggctcaaaaggaccagacttggcttggatgactttgagtctctgaaagttataggaagaggagcttttggagaggtgcggttggtccagaagaaagatacaggccatatctatgcaatgaagatattgagaaagtctgatatgcttgaaaaagagcaggtggcccatatccgagcagaaagagatattttggtagaagcagatggtgcctgggtggtgaagatgttttacagttttcaggataagaggaatctttatctaatcatggaatttctccctggaggtgacatgatgacattgctaatgaagaaagacaccttgacagaagaggaaacacagttctacatttcagagactgttctggcaatagatgcgatccaccagttgggtttcatccatcgggatattaagccagacaaccttttattggatgccaagggtcatgtaaaattatctgattttggtttatgtacgggattaaagaaagctcacaggactgaattttatagaaatctcacacacaacccaccaagtgacttctcatttcagaacatgaactcaaagaggaaagcagaaacttggaagaagaacaggagacaactggcatattccacagttgggacaccagattacattgctccagaagtattcatgcagactggttacaacaaattgtgtgactggtggtctttgggagtgattatgtatgaaatgctaataggatatccacctttctgctctgaaacacctcaagaaacgtacagaaaagtgatgaactggaaagaaactctggtatttcctccagaggtacctatatctgagaaagccaaggacttaattctcagattttgtattgattctgaaaacagaattggaaatagtggagtagaagaaataaaaggtcatcccttttttgaaggtgtcgactgggagcacataagggaaaggccagcagcaatccctatagaaatcaaaagcattgatgatacttcaaattttgatgacttccctgaatctgatattttacaaccagtgccaaataccacagaaccggactacaaatccaaagactgggtttttctcaattatacctataaaaggtttgaagggttgactcaacgtggctctatccccacctacatgaaagctgggaagttatgaatgaagataacattcacccataaccaagagaactcaggtagctgcatcaccaggcttgcttggcgtagataacaatacactgaaatactcctgaagatggtggtgcttattgactacaagaggaaattctacaggattaggatttctaagactactataggaattggttggcagtgccagctggctcttttttttaatattttattatttttgttaactttattatatgaaggtactggaataaaaggaacagacatccctttctaactgcactgcctacatgcgtattaaggtccattctgcctgtgtgtgctgtggctttgaactgtaacacctctaatcaattcaggagaaacacatatcatttaaagcaacataggctaacctgtaggtaacactgcagtattgatgttttactgcaaatcttatgggtctagataatcagtaaaagccatcttccatagttggtgttagaacattgccctattggtttggacatctgtagaatatatatgaagacaatttctgtaatggttttaagagatttaaaaagaaattcactggttctttacaaaatagaatttatcatcaagttattacacaaacttcacagtaaggagtgacaagtttataataaggaagacaaagtttaacaccttcactcaagcactccactaatatatttacgttgcattcagaaatactgatgaccttcatatacgtagtctgtatactcatagggagatgtactgtattatataacatgtaaagttgattttcttgtgacaagagaacttctttttttaacaagaggacatggcattattttaatttgattatggtgagttgaatttaagacatgaccatgaaggctgcttgtagaattagtgtatttttattaaactatttttttaaatgtcaaacttctatcatgtaaatggacttatagagaacaaaaagctatttactttggttttctagaaagttgttacatatcatggctggttaacttttatttcttttgatgaaaatttttcctttgatagtacttgtattattgtgccattattttcttatgctccaaatgtaccaaagatcttgaacagagtggatgttcacaactgagtagaattttcctttcctgtgggcatgctgtattcagacctgacagatctttgatagaggtcagcttattaaagggcaatattgttcttgtttagctacatcactgtggtgaatatagatggaattaaggaagtaaatgcaggccagggggttgtgatgagaggataggggagataatatcagcatcaaattctttgggtatctctctaagaattaaataatcttttctagcttaatattttaattctaattcaaacaactctgaggttttggtttcattagtaatagttgaggaataatatactagcaaagaatggcctaatgtttgtcataactgttaatggatgaaattttttaaagatacaaccatgataaccattataaatgatctatgatcaaaatctaaagtgatgaattatttgtaggaatgtcttcctaatggggaagaattgcataggagcattatgcaaatctacacaagcttttataaatgttgctgctgggtagctccacagtgtttcataaggccatcctgtttcccccaactcccccatttttggtttgtttctttttaaatatttgttgagtacttacgtgtttatctaacagttcacttccatttttctagtctggattttttgagtatttaggaaagagagctattaaaaactggggatttctcaatgtgactaactctaatttttctaattataactgcctttaattaacataatattaacttttgctgaggtttatgagattttctcaccccacatcgctcccctttttttaaaaaggactgttttgctagtgtgataatgaataggtaagatatgagataattgcaacattgtctagttctagtatggtaactattcttgaaatggtattgaaaaataccgttaattcaaattgacagagattgataaaaagaaactgatttacctaagtttactttttaattgcataatagagcattttttgttttgagttccctcattcttattaccagaaagagcttgcaaatagttttactttcttggcactggaagggtagttctggaaagctactttgttgagagtctcattcttccctggagttaatagagtgattcacaatctttggggttttctcctcatcaaaagcatttcttaagtgcctatctaaaagcaattaaagactgtgtctgccctttagaagctaagaatttgattcatgatgcaaattaactagataatttgcaaagtacccttgagattgaattttctctattatatatttcccatatttcaggtgaataatttaatttaaatgacaaaaccctatctagtcaactgggcataatgacattttctttaaattagactctattttgaattaaaagagttttattataaaccgtgtgtttttggtttttctaagtatatagaaagcttgtataattcagatttatcaatttcctgatttaatgtagactttgacttttttattaaaaacctttgtattaaagcaagttatgttatttttcttttatgcatttattactaacatagctttaaatctttaaatgtattgaagcattgtgctgtctgaaaataaggaattgcttataaaccagccacttctgaatacaatatgtagctgatttaataagctagttagtgaatggaaaataagtgtggagtattaaaaatgttctttggttggtaaggcctaagatagggtttcatttatttctatactttttctgttttttaaacacctgcatatttttatgtaaatctctaaatttaaaatattttaagtacatttatttttggtgttttattgtataaaaccttagacaatcaatcagtcagtctttactgacaggagcagcagctatctgtcttttgctgatctacaaataaatgaattgagaatttagtccatagaggtccctggctaccaaacacattctcctttgaattgttaaaattcagaacattcaaaataactgttttgctacaacccatgattattttcctgttgtgtttatttaaatttactttctctttagaagtgcacttatttctgaaaaatcttaatgaaacaaacgcttagaacaaatataaatatgagacacttgggactactagagatattttagatttttatgaaaaaaatgtgaggggatattgctgctttaaaaaggaataaagtaataaaaatatatctcagctatttttttaaagcaatataattcagcaattgtctagaaaagtaatcatgaggctactgagtttggtgttcagttactgagtttcaaaaatgttttggtggcatgaggacaaaatttcattgaaggtaagataagaataaaaactatgtttac

SEQ ID NO: 4692 - DNA, 3868 bp, Homo sapiens
gtgctggacttcatcaacgccggcggggcccgcgaaggctggctcctgggcccgcgcggggaaaagggcggcggggtggacgaggacgaggagatggatgaggtgagcctgctgtccgagctggtggaggcggcctccttcctgcaggtcacgtccctgctgcagctgctgctgtcccaggtgcggctcaataactgcctggagatgtaccgcctggcgcaggtgtacgggctgcccgacctgcaggaggcctgcctgcgcttcatggtcgtccacttccacgaggtgctgtgcaagccccagttccacctcctggggtctcctccccaagctccaggggatgtcagcctgaagcagaggctgagggaggcccggatgactgggactcctgtcctcgtggccctcggggacttcctggggggacccctggcccctcacccctaccagggggagcccccgtccatgctcaggtacgaggagatgactgagcgttggttcccgctggccaacaaccttcctcccgacctggtcaatgtcaggggctatgggtctgccatcctggacaactacctcttcatagtgggcgggtacaggatcactagccaggagatctccgctgcgcattcctacaaccccagcaccaacgagtggctccaggtggcctccatgaaccagaagaggtctaacttcaaacttgtggctgttaattcaaaactctatgccatcggagggcaggccgtttctaacgttgagtgttacaaccccgagcaggatgcgtggaattttgtggcgcccttacccaatcctctggctgagttctctgcctgtgagtgtaagggaaaaatttatgtcattggaggatacactaccagagaccggaacatgaacattttgcagtactgcccctcttccgacatgtggacgctctttgaaacatgtgacgtccacattcgcaagcagcagatggtgtctgtggaagagaccatctacatcgtgggggggtgtctccacgagctggggcccaaccgcaggagcagccagagcgaggacatgctcaccgtgcagtcctacaacaccgtcacccgccagtggctctacctcaaggagaacacgtccaaatcgggtcttaacttgacttgtgcgctccataacgacggcatctacatcatgagcagagacgtcaccctgtcgaccagcttggaacaccgagtgttcctcaagtacaacatcttttcagatagttgggaagcatttcggcgttttccagcttttggacataacttgctggtttcttctctttatctgcccaataaagcagaaacatgactgaattgaattggtagatgaaaaaaacctggttcaagttttttttaaaatgtggtgtcccattccaagggagaccaattcctaaagggtaaagaagggttaaagtaggtcacatatatacagtagcagctgtaaataagcttacttgaactaattacttgaaaactggtggaaaaaagagaccaactttgttattttttaaattattgatttttaaattatgggagcaaatccatctccaaacatgatactcttgggccaatgacggatcatcaaaatgtagattcattgtgtctgtgtggtaaagggccaaagtcaataattgggacaaatggtaaagatgattttaaaatctgttgtatttaggtcccttgacatatcattagcaccttaagtgagaggttttctttttcttatcagtgtccttgacaagcattcatattaacatattcattctctcttctccatcacccatacccacacatacatctagtatgtttagggttctgtgttcagatattttgtttgcacactactttttaggaaacttataatgatggagccctacagtgaatccttaccagtgttcagtcctccccaaaacttgcataaaaatattcttagctatttttccagccttttttgcagttacaaatgctggataaatagactgataaaacctcttattttatttatgtggcaggttgcatatttatgtggacacataggttgcactgctaggcattctgtattgttttaaagaggatatattatttagaaaaatggacatatgaatattattaaaaattgagtcttaaatttaaatgggaagggaagaaaacaccaaataagaaaaaaatttgcctttaagagttacttttgttgaatgtatttgacttagttcttattttaaggctaaaaaaactttgtcatatttaagtcggcagctttctaatttaatcttagctttgtaattcatgttttgcttttgtggactaaggtaaggacagcatttaaatatttgtgctggagtgaggggaagaagctgttacagaagtggaatggtttctggtggtatttctgaagttaggtaaagtgctttacttgccttggttgttaattgaaatagaattcagctcaagcagttgttttcagtgagtgagttaacaataaaagcttctgccaatcatagatcaacattcctcaaaaatacatacactcatacttatggaaattttattttgattgaaaacactctgaaattatctgatattttgtaatggcatcagttaaactgtgagctggattccatctttctgcagtaacagcgggcagaaccatttcagttagcatgtgcctcactttaagaaagtcctgtaggggaaaaaaaaaactgtcagagcgaattcatgcattcaacaaacacttatgagtgcctggagtatgccgtccactgtgcagatgtaggacaggggctaatcacttagagttcttcagtttattagaggagtgactacaggttttctttacaaccatggcctctagtatacttaaaataagcgtccagttataaaaagcctatttgcacaactttttgggaatacttctattaactaaaatgaggtaagccattattttggacatagaaacagatctttgtatcttgtcaccaaataatcttacctctagtctacttacaactttgtaagggtttctaagctatgcccatttattcccaaatattaagcccttaaaaaaataaaacctctgaaccaaaatcttcccaggaatagtacttaatagattttaatgttaatttatattcattgtagaattgaatttccagtgacctgtaatttcattacatatattttaaaatctatttattttagatggtgttaacttttcgttgctgaagagcttaactttttaaaggctttgtcctatacatttagaagatgagtcagttgaattagtactggacaaacagttggagattagtttgcaaataagcatatcatatcaaatacaatattccagccaaccagttaattctcttcctggttacattcattgggtctatttgcctaatgttgacaattagattcttggaccaagtgagggtgtactctgatccacaaagctcttttataaaccaggtttgaggttgtgtgtgtgtgtgggggtgtgtgtgtgtgtgtgtgtgtatgtttgcatattatagctctctttaagacagacatctaaaaagattttggttattctgggctgccagcagtacgtgggaaaggtggaatgtgcaataggaacagatctgtgcattttgtgacatcgtccttcctgctgtgcacatcagctgtgatgacattttgagggtagttttaatttagctcggttctcttgttggtgccagtattacattgaagactacctatgatagaggcaatgttgctttgaaaatctcccttcaggcggaggttgcagtgagccgagattgtgccattgcactccagcctgggcgacagtgcaagactctgtctcc

SEQ ID NO: 4693 - DNA, 2161 bp, Homo sapiens
gcagtgcttctgcggcaggagcccgtggacaaggcccactgcctgagcctgaactaggagcacctcctagggactgcccaggcttgctctgctctgacccttctgctggccagtctgggcacctggcccctgagggagggagctgtcagccagggaaaaccgagaacaccatcaccatgacaaccagtcaccagcctcaggacagatacaaagctgtctggcttatcttcttcatgctgggtctgggaacgctgctcccgtggaattttttcatgacggccactcagtatttcacaaaccgcctggacatgtcccagaatgtgtccttggtcactgctgaactgagcaaggacgcccaggcgtcagccgcccctgcagcacccttgcctgagcggaactctctcagtgccatcttcaacaatgtcatgaccctatgtgccatgctgcccctgctgttattcacctacctcaactccttcctgcatcagaggatcccccagtccgtacggatcctgggcagcctggtggccatcctgctggtgtttctgatcactgccatcctggtgaaggtgcagctggatgctctgcccttctttgtcatcaccatgatcaagatcgtgctcattaattcatttggtgccatcctgcagggcagcctgtttggtctggctggccttctgcctgccagctacacggcccccatcatgagtggccagggcctagcaggcttctttgcctccgtggccatgatctgcgctattgccagtggctcggagctatcagaaagtgccttcggctactttatcacagcctgtgctgttatcattttgaccatcatctgttacctgggcctgccccgcctggaattctaccgctactaccagcagctcaagcttgaaggacccggggagcaggagaccaagttggacctcattagcaaaggagaggagccaagagcaggcaaagaggaatctggagtttcagtctccaactctcagcccaccaatgaaagccactctatcaaagccatcctgaaaaatatctcagtcctggctttctctgtctgcttcatcttcactatcaccattgggatgtttccagccgtgactgttgaggtcaagtccagcatcgcaggcagcagcacctgggaacgttacttcattcctgtgtcctgtttcttgactttcaatatctttgactggttgggccggagcctcacagctgtattcatgtggcctgggaaggacagccgctggctgccaagcctggtgctggcccggctggtgtttgtgccactgctgctgctgtgcaacattaagccccgccgctacctgactgtggtcttcgagcacgatgcctggttcatcttcttcatggctgcctttgccttctccaacggctacctcgccagcctctgcatgtgcttcgggcccaagaaagtgaagccagctgaggcagagaccgcaggagccatcatggccttcttcctgtgtctgggtctggcactgggggctgttttctccttcctgttccgggcaattgtgtgacaaaggatggacagaaggactgcctgcctccctccctgtctgcctcctgccccttccttctgccaggggtgatcctgagtggtctggcggttttttcttctaactgacttctgctttccacggcgtgtgctgggcccggatctccaggccctggggagggagcctctggacggacagtggggacattgtgggtttggggctcagagtcgagggacggggtgtagcctcggcatttgcttgagtttctccactcttggctctgactgatccctgcttgtgcaggccagtggaggctcttgggcttggagaacacgtgtgtctctgtgtatgtgtctgtgtgtctgcgtccgtgtctgtcagactgtctgcctgtcctggggtggctaggagctgggtctgaccgttgtatggtttgacctgatatactccattctcccctgcgcctcctcctctgtgttctctccatgtccccctcccaactccccatgcccagttcttacccatcatgcaccctgtacagttgccacgttactgccttttttaaaaatatatttgacagaaaccaggtgccttcagaggctctctgatttaaataaacctttcttgtttttttc

SEQ ID NO: 4694 - DNA, 1279 bp, Homo sapiens
catggcggcattgagcggagtccgctggctgacccgagcgctggtctccgccgggaaccctggggcatggagaggtctgagtacctcggccgcggcgcacgctgcatcgcggagccaggccgaggacgtgagggtggagggctcctttcccgtgaccatgcttccgggagacggtgtggggcctgagctgatgcacgccgtcaaggaggtgttcaaggctgccgctgtcccagtggagttccaggagcaccacctgagtgaggtgcagaatatggcatctgaggagaagctggagcaggtgctgagttccatgaaggagaacaaagtggccatcattggaaagattcataccccgatggagtataagggggagctagcctcctatgatatgcggctgaggcgtaagttggacttatttgccaacgtagtccatgtgaagtcacttcctgggtatatgactcggcacaacaatctagacctggtgatcattcgagagcagacagaaggggagtacagctctctggaacatgagagtgcaaggggtgtgattgagtgtttgaagattgtcacacgagccaagtctcagcggattgcaaagttcgcctttgactatgccaccaagaaggggcggggcaaggtcactgctgtccacaaggccaacatcatgaaacttggggatgggttgttcctgcagtgctgtgaggaagttgctgaactgtaccccaaaatcaaatttgagacaatgatcatagacaactgctgcatgcagctggtgcagaatccttaccagtttgatgtgcttgtgatgcccaatctctatgggaacattattgacaatctggctgctggcctggttgggggagctggtgtggtccctggtgagagctatagtgcagaatacgcagtctttgagacgggtgcccggcacccatttgcccaggcagtgggcaggaatatagccaatcccacggccatgctgctgtcggcttccaacatgctgcggcatcttaatcttgagtatcactccagcatgatcgcagatgcggtgaagaaggtgatcaaagttggcaaggtgcggactcgagacatgggcggctacagcaccacaaccgacttcatcaagtctgtcatcggtcacctgcagactaaaggttcgaacctctgacatgggtggctatgctacttgccatgacttcactgaggctgtcattgctgccttgccccacccataggccctgtccatacccatgtaaggtgttcaataaagaacatgaaccaa

SEQ ID NO: 4695 - DNA, 1200 bp, Homo sapiens
catggcggcattgagcggagtccgctggctgacccgagcgctggtctccgccgggaaccctggggcatggagaggtctgagtacctcggccgcggcgcacgctgcatcgcggagccaggccgaggacgtgagggtggagggctcctttcccgtgaccatgcttccgggagacggtgtggggcctgagctgatgcacgccgtcaaggaggtgttcaaggctgccgctgtcccagtggagttccaggagcaccacctgagtgaggtgcagaatatggcatctgaggagaagctggagcaggtgctgagttccatgaaggagaacaaagtggccatcattggaaagattcataccccgatggagtataagggggagctagcctcctatgatatgcggctgaggcgtaagttggacttatttgccaacgtagtccatgtgaagtcacttcctgggtatatgactcggcacaacaatctagacctggtgatcattcgagagcagacagaaggggagtacagctctctggaacatgagagtgcaaggggtgtgattgagtgtttgaagattgtcacacgagccaagtctcagcggattgcaaagttcgcctttgactatgccaccaagaaggggcggggcaaggtcactgctgtccacaaggccaacatcatgaaacttggggatgggttgttcctgcagtgctgtgaggaagttgctgaactgtaccccaaaatcaaatttgagacaatgatcatagacaactgctgcatgcagctggtgcagaatccttaccagtttgatgtgcttgtgatgcccaatctctatgggaacattattgacaatctggctgctggcctggttgggggagctggtgtggtccctggtgagagctatagtgcagaatacgcagtctttgagacgggtgcccggcacccatttgcccaggcagtgggcaggaatatagccaatcccacggccatgctgctgtcggcttccaacatgctgcggcatcttaatcttgagtatcactccagcatgatcgcagatgcggtgaagaaggtgatcaaagttggcaaggttcgaacctctgacatgggtggctatgctacttgccatgacttcactgaggctgtcattgctgccttgccccacccataggccctgtccatacccatgtaaggtgttcaataaagaacatgaaccaa

SEQ ID NO: 4696 - DNA, 1134 bp, Homo sapiens
tggctggggacacccaacgtaagtgcacattgtgactgcagagctactatggggtgggggcaaaaataggaagttttgttaacattgtgcccaggctatgtctcttatgaaattgtgacactttcttcagagattgcccatctttatcagatggatcccaaattatttccaccacaaaaggcgcttggctacttgtcctgtccatgagatttgtgtaaagggcctacacacaggtcatttcttctcaaatctccaccaataaaacctatgcatcacatgtcctcagggtctttagaggatttagaaataagtatgctaaaataatttccccatacagcacttccctttattatgttgacttatgtcagacaaaaggaggtttttactgaaaattttgtgggagtcaagggaattcaaagggtctctcctagacgatccagtgttatgtcctccacaggacctttggtgttggcccctcttcctcatatgtgaggatggatccagtggcctccccattatctcctttcttttctttctgaactccaatgtttataaagcctgtacccctgttgcctatgtaggttctctgacaaaagttatacttagtgctctttctttcttatggggaaaaatccgtggaactgaagctgagatctttagtacgtggagtcaccttacagatatagagcatttatgcggtattcattggtgcctaaagaactttaggcatcctctggaaaaccggcccagcacgtttcttggagcaggctaagtgtgagtgtcatttcctcaatgggacggagcgagtgtggaacctgatcagatacatctataaccaagaggagtacgcgcgctacaacagtgacctgggggagtaccaggcggtgacggagctggggcggcctgacgctgagtactggaacagccagaaggacctcctggagcggaggcgggccgaggtggacacctactgcagatacaactacggggttgtggagagcttcacagtgcagcggcgagtccaacctaaggtgactgtgtatccttcaaagacccagcccctgcagcaccacaacctcctggtctgctctgtgaatggtttctatccaggcagcattgaagtcaggtggttcc

SEQ ID NO: 4697 - DNA, 2379 bp, Homo sapiens
aaaaactgatgaaggaaattgaagaagacacaaataaatggaaaggtatcctatgttcatggattggaaggattaatattattaaaatgttcatgctgcccaaagcactatatagattcagtgcattccctccaaaatttttaaatttaatgacatttttcacgaaagcagaaaaaataatttttaaatatacatatttcagaatacattgttcacaataaagatatatgattttttgtcagttaaaagttaatttttttaaaaagatacctatagcctcttattgaggtggaatctgttgctcttggagctacgtactgttgactttggttttctggaaacatcagtgctatttagaacattaggatatttttctttttgaatatcaacaaaaacataaataaaaatactagtaatgacatttacagtatgtttcacagattaatcacatctctgagtgggagtctttatctgttgtaggatctactcttgccattctattctgggttttggttgattagtctttcttgaacacttccagaaattggagatgtatgcctgccttaggtagcctagcttattttattaatgaacatatccatttaaaaatttcttcctggtaatgagtctaaacttgccttcctgtaatttgtatccactggtcctttttctttgttctccctcttgcatatgccagtacttcaatagctggtcccagctccattgacgccctctctcaggatcacacatcacaggtccttcagaatctcctaatggtctctctgatctccaggcaacacactactctaacctttctatgcttttctggcctgcagttcatttctgttcctgtgaagtcatagagcccgcaattcatgctgtcttgttcccctattaaaatatatttttgtaaatctctttaggattcgtgaagttttttggaaacctggctgtcatggatagtcctcaacagatctgtgagcgttatcctatctttgtggaaaaagtctttgaaatgatagaaagtcaggaccccactatgattggtgtagctgtagacacagttggaatcttgggatccaatgttgaaggaaaacaggttttacagaaaacaggttggtatgacttggccctgttcagggatatcttaatctttgacaggggttcaatatgtaagttcatttgctggtgggttaactacattgtagaaactattttatgggtggcagtcttgttaaccatgaccttgtactcatgtctgaaaatctaataattattacggaaaacctttttttttttttttttgacttttcactggtttaggttttcattggtttaggtttctaccaatcgatttcaaccaaacattgtttcctgtttcccctctatgatgtcttctttgactagatttcatggtacaaagaccacgggctagagtcagaaaggtctggattcatgtccttgggttttctattctttttttttttttttttttttttaagagattgagagtgtctctctgttacccaggctggccccgaactcccgggctcaagcaatcctcctgcctcatcctcttgattggctgggtctacaggtccacaccattgtatccagccctgactttgctttttgaacttcatttactcacttcacttttctaggcctcattttcttcatttataaaaatggcataacaactgcttctcagggttgttgtgaatatttatgaaattttgagaaaggaaaataaaagtttgttataagatttcatgttaagagatacttttggcatgttaagagatacaatggttcatgcctgtaatccagcactttgggaggctaaggtgggtgggttgcctgagctcaggagttcaagaccaggctgggcaacatggcaaaatcctatctctactcaagaatacaaaaattaaccaggcatggtactgcacaactgtagtcccagctacttgagaagctgaggaaggagaatctcttgaacctggcaggtggaggttgcagtgagctgagatcatgccactacactccagcctgggtgacagagtgaaattctatctcaaaaaaaaaaaaaaaaaaagaggccaggtatggtggctcatgcctgtaatcccagcattttgggaggccaaagcaggtggatcacttgaggtcaggagctcgagaccagcctggccaacatggtgaaaccctgtctctactaaaagtacaaaaatcagccaagcgtggtggtgcatgcctgcagtcccagctactcgggaggctgaggcaggagaatggcatgaacacaggaggtaaaggttgcagtgagccgagatcacaccactgcactccagcctgggcgacagtgcgagactctgt

SEQ ID NO: 4698 - DNA, 3375 bp, Homo sapiens
atggtacctgcggatgctgcaatgttaccggtgcaggcagtggttccacgaggcctgcacccagtgcctcaatgagcccatgatgtttggagaccggttttacctgttcttctgctccgtgtgtaaccagggcccagagtacatcgagaggctgcccctgcgatgggtggatgtggttcacctggccctctataatctgggggtacagagcaagaagaagtactttgactttgaggagattctggcctttgtcaaccaccactgggagctcctgcagcttggcaagctcaccagcaccccagtgacagatcgaggaccacatctcctcaacgctctgaacagttataaaagccggttcctctgcggcaaggagatcaagaagaagaagtgcatcttccgcctgcgcatccgcgtcccacccaacccgccagggaagctgctgcctgacaaaggactgctgccaaatgagaacagcgcctcctctgagctgcgtaagagaggaaagagcaagcctggtttgttgcctcacgaattccagcagcagaaaaggcgagtttatagaagaaaaagatcaaagtttttgctggaagatgctattcccagtagtgacttcacctcagcctggagcaccaaccaccacctggctagcatatttgacttcacgctggatgaaattcaaagtttaaaaagtgccagctcaggccagaccttcttctcagatgtcgactccaccgacgctgccagcacctctggctctgcctccaccagcctctcctatgactccagatggacagtgggcagccgaaagaggaagctggcagccaaggcatacatgcccctgcgggcaaagcggtgggcagctgagctggatggacgctgcccctcggacagcagtgcagagggggcttcagtccccgagcggccagacgaaggcattgacagccacacatttgagagcatcagtgaagatgactcatccctgtcccacctcaagtcatctatcaccaactactttggtgcagctgggcggttggcctgtggggagaagtaccaggtgttggctcggagggtcacacctgagggcaaggttcagtacctggtggagtgggaagggaccaccccttactgactagcccccgggggtgccaggggtcctgaaaaccaaaggaggagcagcagaagccataggctccccagctttctccaggctggggtgggagaaggaagcaggacagagctgcaagtgcctggcagaatgccctgcctgcctgcctgccaggccaaggcctgcgtctctctgctgtaccagctctgttccagggcctcctcaggctcgttacccctgtgcctgtgtctctacacactccacaccccctcaaactctgtttatctgttctctgaccttgtgtcccctgcgctgggacccttcctcctgaggcccaggtctttgtccccagttgtgtgccttgacctctctcgcccctttctgggtgtgttcgcacatcctgtgtgtgcacagctgtccctccactggatccccttcacacgtgacccgtggggcagccagtcctcccagggactacataacaggcacctttgagagagcatgggagaaggtggataagaggatgctgctcagtgcttttctcttccactttcctgccactccccactaccctcggagagaggtggtgggatgggagagagcccctgtgaaagcctgtgaggatctgaagagtaaagggctgggtctgcctcagaaggcaccagcaccagggcccaggtattaaggctgagagtgaaggctgccaatgtcagctttggaggtcccagaagtcttctgttctctggcctcaccccctcagtcgccatagagctgggcctggccttgctggaatggaggcatccttccaaacctgggggacgggggtggggggtggtagtggtgggagggaaaccatgtcttgctaaacctgtttctggtgcctcccatccccagacccaccagacaccacacagcagacaatacacacccactcgcacaagcttccatccacatgtgttgtactttcagctctaggcatgcagacaaccccacacggccacaccaccacatgcccaagtgtacacacacagagccacaccgtccctctgggcctgctggctcctcccttggctttcccttggcccacttccagggcccaggtgctgcaactaaatgtgaaagctcagtggccgctccttctttcagcccatcaaccagcattggtcccatagggaagcacaggggactcaccctctttcatatcccttgccctgccctgaaatggacaatcactttttgggataggttgaaatttttaaagagcctgcatcatttggttccctcaaagggaagcccttgccagtgggggtttgaaagagaatttttggaaccaacattcaaattctgcctcatctggagggaaaccaaaattgggagggggaagaggacccctgatgttttgctgcttccagagatattagaaactgactcacttgattggaaaatggacaaaagtgccttgacgtggagggtgggcaccagatggggaccagccttgccaactgctgctgtggcctccagcttggctggttttgcaggccgccagcaggaaggcgaaggtggtagtacagcaagaggcactggcggggcagcaggcctgcaggagctgtttttccattgctaggcctgacccctctctacctgtgagcgttcagggggtccctgagatagtttagatgcccccccatcttagacctcagctcccacagtgccttttaagggggacctcacctcctgtgcacagcccacccactttcctctgcttccctggcacagcccaggcatagacgagctggcgttggacccagttcttcccccttttcagccccacagctgctgccacaggggccaactagggccaggtggaaggggagctgagaagccaacccctagcccaggggtgctgtgggaactgggatccaatttgtagcttcctgcctggcttcagagagcccagcaaccttctaggcctgctttccagacttctgagatagcctgggatgagcaatcctgttatagtacatctggaccttccctacctgggctctggggaggctgtgggcctggagagggaaaaggagggagggggtgtctgcaccacctgggaagatagcacaaggcctaatgaggtcaccctgactccccaccccagcatttcattcataccagataatagctgcattactgccaactgaccttataaccctctgcaccttcaaaaagattcatggtttttaattgctgcttttaataacatttgttaaagttat

SEQ ID NO: 4699 - DNA, 1665 bp, Homo sapiens
cccctgggtggctgcggctggaccttcaccacctcttacaagctcaagaggcacctgcagtcgcacgacaaactgcggccctttggctgcccggcagagggctgtggcaagagcttcaccacagtgtacaacctcaaggcgcacatgaagggccatgagcaggagaactcattcaaatgcgaggtgtgcgaggagagcttccccacgcaggccaaactcagcgcccaccagcgcagccacttcgaaccggagaggccttaccagtgcgcgttttctggctgcaagaagacatttatcacagtgagtgctctgttttcccataaccgcgcccatttcagggaacaggaactgttttcctgctcttttcctggctgcagcaaacaatatgacaaggcttgtaggctgaaaattcacctgcggagtcacaccggcgagagacctttcctttgtgactttgatggctgtggctggaacttcactagcatgtccaaactcttaaggcacaaaagaaagcacgacgatgaccggaggttcatgtgccctgtggaaggctgtgggaaatctttcacgagggcggaacatctgaaaggccacagcataacccacctgggcacaaagcctttcgtgtgtcctgtggcaggctgctgtgccaggttctctgctcgcagtagcctctacattcactccaagaaacacctgcaggatgtggacacttggaaaagccgttgcccgatctcctcttgtaataaactcttcacatccaagcacagcatgaagacgcacatggttaaaaggcataaggtgggccaggatctcttagctcagctagaagcagcaaattctctcacacccagcagtgaacttaccagccagagacagaatgatctcagtgatgcagagatagtgtctctcttctctgatgtacctgacagtacttctgctgcattgctggacacagcattggtgaactctggaatcttgactattgatgtggcttctgtgagctcgactctggcagggcacctccctgctaataataataattccgtagggcaggctgtggaccctccgtccttgatggccaccagcgaccctcctcaaagtctggatacctctctcttttttggaacggcggccactggttttcagcagagctccttaaatatggatgaggtctcaagtgtaagtgtggggccattgggatctctggactctttggccatgaaaaactccagtccagagcctcaggctttgacacccagcagtaagctaacagtggacacagatgctctgactccttcgagcaccctttgtgaaaacagtgtctcagaactactgacaccaaccaaagcggagtggaacgtacatcctgactctgacttctttggacaggagggagaaacccagtttggattccccaatgcagcaggaaaccatggttctcagaaagaaacagatcttatcactgtgactggcagctcatttttggtatgaaccaactctattcattcctcatcatgtggcttacttttattacagtcaattttgaggatattctggactaaatatttaagtgcagtcatttctttttggtttgcaaaaagagcacagccctggactacaagtttggagatttaaattctgatcttgagtttggaactgaca

SEQ ID NO: 4700 - DNA, 2269 bp, Homo sapiens
gtaacactctgctgcagaacctctgtttccatgtcaacaccctagtccctgcatgcacacaaagagggcaccatggctgattgtctccatggctgcttctcccctgcatcgtgtccttaaagggcaagtttcctgctgcacttgttgacgactcacccctttcagccccagtgtctagcacaatttccctgtacacagtatcaacagaattgtatttgttgaatgggaggcacgagtcatgttagaaggccgattatggcagcacaagaggatgtgggggcacagagagtccaggaatatcatagagacagacctgtaacacttggtagccaggagttggagcatcagggaggtgaatacagattttggttaaacatccccattttcttgtttagatgtaataattgatccccagcaaatgatgggatgccctgaaggttgtaaggctagttttgatggcttaggcctttgaaatccaatttggagctacagaagttagggccatgaaaagggagagttgatttggggtggaaggatgagttggtgagtttggtcacagcagattgatttgaggttctttggaaatacagagtagatttgcagtcattggtacccagcagagagattaaaactgagggcacagtggcagctgtgagggagacagaacgatgctcatgctttggattggcaggaaagaggggctatggcggaaacaaaaggagatgagggcaggggcacttttaggaaggactgaggctgctggcagtgtcacatgactgttgagaagaagggaatttgttagcaagtggttacatttagtaggaaaagtgttgagggcatgggtttggattaaaggagggagtgagcaattgaggaggaagtggaaattgggcaaaacattccttttggaagtttggatggtaaaaggaagttgttggggaagggaataacaggatctttatgtttggcttatttactggtctatggggaggaggtgggcgaggaaaaagctagatacaagacctgggcaaacaaagaaggctctggagggaagtgtaggttagaacaaaggtaagtctgagaggtaagagagaaggaacacactttgggcttggcctgaaatgagagggaatgaggaaaactgggtagagggcaaggatgctccagcctggtggctctgctctccaagaggaaggaatagagctttagaagtgtggatggccagagttcagggcagcctggctcccaagcctacctaaaacaaccatcccattcctagacccgtggattgaggactgggcagagatgaatcatccattccagggaagccataggcagaccccagacttcggggagcacctggccttgctcccacccccaccttcttctttgcctcctcccatgccttttccctacccgcttcctcagccctcgccacctcccctcttcccacccctgccccaggataccccttttttcccaggccagcccttcccaccccatgaattcttcaactataatccagtggaggacttctcgatgccaccccacttaggtaggtgcttctgcagctcccccaccctcttgtacctccccttacccagcctcctatgcctaggtgagctgagaggagttgggtagctccttgtgcccctagcactgggtttggtcacagcagtccctgagtctgaaacatcatctgtaggttcattaatcagctcactggttgtcactgtttcaccgtctgaaggtaggggaaggactatcccttttttgtagatagggaaacagagaagctcacctggaggacaagagttgcttcaaggcagagctgcactcactctggccagaagcctgctcttataatgactggttcttttgtaggatgtggccctggagtgaactttgtgcctggccctctgccacctccaatccctggccctaatccccatggtcagcactggggcccagtggtccaccgggggatgccacgctatgttcctaacagcccctaccatgtgcggagaatgggggggccctgcaggcagcggctcagacactcagagagactgatccacacatacaaactggacagacggcctcctgcccattcggggacatggcctgggtagactggatcttgggctgggactggatgtgccaatggcccttcagggcctgcctggcacctcaggtactgggctagggtgtctgctatgcctggtattgttcttgtccattgctgtcaccaataaaggcatggaagaac

SEQ ID NO: 4701 - DNA, 2526 bp, Homo sapiens
gacacatgttcaaagagcataattaactttttaaaagaagctagacttcttcagaagcttgccagtttttcaagctgatttctctcactggcaactcttcagagtgctgttcctactccaccctcccctggtgataagcatggattcctggttcattcttgttctgctcggcagtggtctgatatgtgtcagtgccaacaatgctaccacagttgcaccttctgtaggaattacaagattaattaactcatcaacggcagaaccagttaaagaagaggccaaaacttcaaatccaacttcttcactaacttctctttctgtggcaccaacattcagcccaaatataactctgggacccacctatttaaccactgtcaattcttcagactctgacaatgggaccacaagaacagcaagcaccaattctataggcattacaatttcaccaaatggaacgtggcttccagataaccagttcacggatgccagaacagaaccctgggaggggaattccagcaccgcagcaaccactccagaaactttccctccttcagatgagacaccaattattgcggtgatggtggccctgtcctctctgctagtgatcgtgtttattatcatagttttgtacatgttaaggtttaagaaatacaagcaagctgggagccattccaattctttccgcttatccaacggccgcactgaggatgtggagccccagagtgtgccacttctggccagatccccaagcaccaacaggaaatacccacccctgcccgtggacaagctggaagaggaaattaaccggagaatggcagacgacaataagctcttcagggaggaattcaacgctctccctgcatgtcctatccaggccacctgtgaggctgcttccaaggaggaaaacaaggaaaaaaatcgatatgtaaacatcttgccttatgaccactctagagtccacctgacaccggttgaaggggttccagattctgattacatcaatgcttcattcatcaacggctaccaagaaaagaacaaattcattgctgcacaaggaccaaaagaagaaacggtgaatgatttctggcggatgatctgggaacaaaacacagccaccatcgtcatggttaccaacctgaaggagagaaaggagtgcaagtgcgcccagtactggccagaccaaggctgctggacctatgggaatattcgggtgtctgtagaggatgtgactgtcctggtggactacacagtacggaagttctgcatccagcaggtgggcgacatgaccaacagaaagccacagcgcctcatcactcagttccactttaccagctggccagactttggggtgccttttaccccgatcggcatgctcaagttcctcaagaaggtgaaggcctgtaaccctcagtatgcaggggccatcgtggtccactgcagtgcaggtgtagggcgtacaggtacctttgtcgtcattgatgccatgctggacatgatgcatacagaacggaaggtggacgtgtatggctttgtgagccggatccgggcacagcgctgccagatggtgcaaaccgatatgcagtatgtcttcatataccaagcccttctggagcattatctctatggagatacagaactggaagtgacctctctagaaacccacctgcagaaaatttacaacaaaatcccagggaccagcaacaatggattagaggaggagtttaagaagttaacatcaatcaaaatccagaatgacaagatgcggactggaaaccttccagccaacatgaagaagaaccgtgttttacagatcattccatatgaattcaacagagtgatcattccagttaagcggggcgaagagaatacagactatgtgaacgcatcctttattgatggctaccggcagaaggactcctatatcgccagccagggccctcttctccacacaattgaggacttctggcgaatgatctgggagtggaaatcctgctctatcgtgatgctaacagaactggaggagagaggccaggagaagtgtgcccagtactggccatctgatggactggtgtcctatggagatattacagtggaactgaagaaggaggaggaatgtgagagctacaccgtccgagacctcctggtcaccaacaccagggagaataagagccggcagatccggcagttccacttccatggctggcctgaagtgggcatccccagtgacggaaagggcatgatcagcatcatcgccgccgtgcagaagcagcagcagcagtcagggaaccaccccatcaccgtgcactgcagcgccggggcaggaaggacggggaccttctgtgccctgagcaccgtcctggagcgtgtgaaagcagaggggattttggatgtcttccagactgtcaagagcctgcggctacagaggccacacatggtccagacactggaacagtatgagttctgctacaaggtggtgcaggagtatattgatgcattctcagattatgccaacttcaagtaagcggc

SEQ ID NO: 4702 - DNA, 530 bp, Homo sapiens
tttccagccccagccccggaccctgcagccgcagagatgttgacgcctaagaagaaccggattgccatttatgaactcctttttaaggaggatggtcatggtggccaagaaggatgtccacatgcctaagcacccagagctggcagacaagaatgtgcccaaccttcatgtcatgaaggccatgcagtctctcaagtcccgaggctacgtgaaggaacactttgcctggagacatttctactggtaccttaccaatgagggtatccagtatctccgtgattaccttcatctgcccccggagattgtgcctgccaccctaccccgtagccgtccagagactggcagaccttggcctaaaggtctgtatgtgaggagtgctgtgctacctggtgccgacaagaaagccgaggctggggctgggtcagcaaccgaattctagtttagaggcggatttggtcgtggacgtggtcagccacctcagtaaaactggagaggattcttttgcattgaataaacttacagccaaaaaa

SEQ ID NO: 4703 - DNA, 8690 bp, Homo sapiens
gatggcgcccgcggcggccgtggcggcctgagcgtgatgctccgggttctcggcggcggctgtggccttggccggggccttgggtctctcccggtcgtgagcgatcagcgcctctccgccggccgggctagccgggacagagaggagacggccacgaagagaggaggcagtgagcaacaggacgagaccgcggcgtctccagcctcggtaccatggccgggatcatcaagaaacaaatcttgaagcacctctccagatttaccaaaaatttatctcctgacaagataaatctaagtacccttaaaggagaaggtgaactgaagaatttggagttggatgaagaagtactccagaatatgttggatttgccaacatggcttgctatcaacaaagttttttgtaataaagcgtccattaggatcccatggacaaaactgaaaacacatcccatctgtttgtccctggataaagtaataatggaaatgagtacatgtgaagaaccaagaagccctaatggcccatcaccaattgcaactgcttcaggacaaagtgaatacggctttgctgaaaaagtagttgagggaatttctgtttctgtaaattctatagtcatcagaattggagcaaaagccttcaatgcatcatttgaactttctcagcttcggatctatagtgtaaatgcacactgggaacatggagatttgagatttactcgtattcaggatccacagagaggagaggttttgacttttaaagaaataaattggcagatgataagaatagaggcagatgccacccaaagttcacatcttgaaattatgtgtgctcctgttcgattaataaccaaccaatcaaaaatcagagtcacacttaaaagaaggttaaaggactgcaatgtcatagcaacaaagttagttctaatattggatgacttattatgggttttgactgattcccagttgaaagctatggtacaatatgcaaagtctcttagtgaagcaatagaaaaatcaacagaacaaaggaagagtatggctcctgaacctacacagagctctacagtagtcgcatctgcccagcaagtgaagacaacgcaaacttcaaatgctcctgatgtaaatgatgcaattgtgaaactattcaatgattttgatgttaaggaaacctcccatcatttagtgatttctcatctagatctacacatatgtgatgacattcatgctaaagaaaaagagtcaaacagacgtattactggaggggcaatgcaactctcttttacacagctaactatagattattatccttatcataaagcaggagatagttgtaatcattggatgtattttagtgatgcaaccaaaacaaaaaatggatgggccaatgagttattgcatgaatttgagtgcaacgttgaaatgcttaaacaggctgtgaaggatcataatgtaggttcacctcctaaatccccaacacatgcctctccccagcacacacaaacagagaaggactaccctctgaaagggacatgcagaacaccttcagtattatctcaacaatcaaaagctaagctaatgtctagttctgttgtggttagacttgcagatttcaatatataccaggtctctacagcggaacaatgtcgttcttcccccaaaagcatgatttgctgcaataaaaaatccctatatcttccacaagaaatgtcagctgtctatatagaattcacagaatattactatccagatggaaaggattttccaattccatctcccaacctctatagccagctgaatgcactacagtttactgtggatgaaagaagcattctatggttaaatcaatttctgttggatttaaaacagagtcttaatcagttcatggctgtgtacaagttgaatgacaattcaaaatctgacgagcatgttgatgttcgagttgatggcttaatgctaaagtttgtcattccttctgaagtgaaatctgaatgtcatcaagatcagccacgtgcaatttctattcagagttctgaaatgattgccacaaatacaaggcactgtccaaactgtcgacattctgacctagaagctttgtttcaagactttaaagattgtgatttttttagtaaaacatataccagcttccccaaatcttgtgacaattttaatcttctacatccaattttccagagacatgctcatgaacaagataccaaaatgcatgaaatttataaaggaaatattactccccaattgaataaaaacactcttaaaacttctgctgccacggatgtttgggctgtgtacttttctcaattttggatagattatgaagggatgaaaagtggaaaaggacggccaataagttttgtagactcattccctctttccatttggatttgtcaaccaacaagatatgcagagtcacaaaaagagccgcagacttgtaatcaggtatctctaaatacatcacaaagtgaatctagtgatctggctggccgattgaagcggaagaagctcttgaaggagtattatagtacagagtctgagcctttgacaaatggtggtcagaagccttcttcatcagatacatttttcagattttccccttcctcgtcagaggcagatattcatctcctagttcatgttcataaacatgtcagtatgcagattaatcactaccagtatctgcttctacttttcctgcatgagtcacttatcctgctttcagagaacttaaggaaagatgtagaagctgtaactggcagtcctgctagtcagacatccatttgtattggaattttacttagaagtgcagaactggctcttttgctccatccagtggatcaagcaaatactcttaagtctcctgtttctgaaagtgtgagcccagtggtacctgattatttgcctacagaaaatggggattttttgtcttcaaaaagaaaacaaattagtagggatataaatagaattagaagtgtaactgttaatcatatgtcagacaacagatctatgagtgttgaccttagccatatccctttaaaggatcctttgctttttaaatcagctagtgatacaaatctgcaaaaaggcatttcttttatggactatttatcagataaacatttagggaaaataagtgaagatgaaagtagtggacttgtttacaaaagtggctcaggagaaattggatcagaaacaagtgacaaaaaggattcattttatacagattcaagtagtatcttaaactacagagaagattcgaatatactttcatttgatagtgatggtaatcaaaacatactttcaagtactttaactagtaaaggaaatgaaaccatagagtccatctttaaagctgaagatttgcttccagaagcagcttcactctctgaaaacctggatatcagtaaagaagagacccccccagttagaacacttaaatcacagtcatctttaagtggaaagcctaaggaacgttgcccacccaacctggctcctctctgtgtttcttataagaatatgaaaagaagctcttcacaaatgtcattggataccatttcacttgacagcatgatattggaagaacagttattagaaagtgatggaagtgatagccatatgtttttggaaaaaggaaataaaaagaactcaactacaaattacaggggcacagcagaaagtgtgaatgctggtgcaaacctacagaattatggtgaaacttctccagatgccatcagtacaaattcagagggtgctcaggaaaatcatgatgacctgatgtccgttgtggtatttaaaattactggtgttaatggggaaattgacatccgaggggaagatacagaaatctgtcttcaagtgaaccaggtgacaccagaccaattaggcaatatcagccttcggcattacctttgtaatcgtccagttggttccgatcagaaagctgtaattcattccaaatcctctcctgagatttctctgagatttgaaagtgggcctggtgctgtaatacactctttacttgcagaaaaaaatggatttctgcagtgccacatagaaaacttcagcactgagtttcttacatcttctcttatgaatattcaacattttttggaagatgaaactgttgcaacagtaatgccaatgaagatacaagtttctaacacgaaaataaatttaaaagatgatagtccccggagtagtacagtatcccttgaaccagctcctgtaactgtacatattgatcatcttgtggtagagagaagtgacgatggctcttttcatatcagagattctcacatgcttaacactggaaatgatttgaaagaaaatgtcaaaagcgattcagtgctgctgaccagtggaaagtatgatctgaagaaacaacgcagtgtcacgcaagccactcagacaagcccaggggttccttggccttctcagtcagctaactttcctgagttctcctttgacttcactagggaacagctcatggaagagaatgaatctcttaaacaggaactggctaaagctaaaatggctcttgcagaggctcacttggaaaaagatgctcttcttcatcatataaagaagatgacagttgaatagcaggagtggcagtcaaaactgaaattatagctctggagtaggaaggttatatttataatgtggatgttaccagttaggggaagacttttattttcatgaaaagacaataaaacaaaatggaatgtgatgaagtggtgactatttcaaagccagtttagaaagtattagtacgggcattacaatcttttggttgttttgtgttttggggcttaaccctcttttaagctgttgtgatctagggaagtcaacacatagtgtaaaataattacatgcctaatgaaaagaagatgtcatttcctaattttgatatctcattttcggcattttttaaaatgtaaaaggaaaacctcttgtgttcacacagattgctgaattgatttctccatatttgttaataatttactattatttacaaagattcaaatgcttttatgactaatgtaaaatgaaaagaggcttacattttaaatgttattaaaattatgtacttaaatctataattatttaattattgtaaaaagtccaagcagatcaataaactatataattaatgggtttggaaaatcatcaccctactgaacttacaaaatatcttgaaaatgtgaaaaatatcattttaaataatgggtacattgtataagtggaagctataattttcaacaaaaagatggtacaaatgtaaaagtaaaaagcacaaactatacaaaagcaaaatctatggccaagtgatttaaaagcattacttgtacattcctttaaacatttgttgttagaagcaaaagagtaatttatcctgctaaatttggcaccatttgtaattataaaaattttgattaatactatttatattaatttctttaccttcattttttctccttaaggagttgattgtttttggaaatgtttttttccttgcacataagacagtttcataccattcttatagaatcatattaggtgggtgtttgcacatactaaatttataaagctagttttgattaaagctctatgtgagatatatatacatacacaagtcttctataataagagtcgttggtgaattttgaattctattttgttaggaattaaggttgaaatcaacatgaaagaatctcaatcatgcattataaaataaaagtacatgggtgttaagaaacaagagacttttaaagatttaaaatatatttctgatagaatttaactaagtggtgtgtattttaaaattcacattcttaaacataaatctatccaagatagaaaatgaaatagctggactactctttctttaagatacttgaaaattttaaaccacattgcaacactttatggtgctttgcgtgtttggcatgacatacacagtggtcctggtatataagtgcttgggggaaaatacatattttgtttacattaaattttgaagtgatttaggctttattgaaaacaatactggccttccctccccttctctaacatccattttcatttacgttatttaaaatatacaggcactgttttgggtacagaggatatagccaagagcaaattgatagtagtttacctcagagtattaaaaaaatcataataagtcatgttaatctaaaactatataatagccttagattaaatgtgcagatgtctaattaaagatttaaaatgtatagcgtatgtccttagaacatttgatttttaggtatacattcggcaaaaacagtctgttatggaaaagaaggattgatgggacattaacttcttccgagctaacattgtttctgaagattgacctattctatataaatttaaatttttctatgtttttctttttttttttgcgatgaggtttcgctcttgttgcccaggctggagtacaatggtgtgatcttagctcaccgcaacctccgcctcgtgggttcaaatgattctcctgtctcagcctcctgagtaactggggttacaagcgcccaccactacgcccagctaatttttggtatttttagtagacacagggtttcaccatgttggccaggctggtcttcaactcctaaccccaggtgatccgcccacctcggcctcccaaagtgctgggattacaggcgtgagccaccgtacccggcctctatcgtatattataattgcttattgttatagaagctgaatgttttacttactacttttaaatttatttggtcttcccaaggaaatcatacaaacggtagagattatgataatctgagcattctgtgtgcttagtttgatttttttatttataagcagtactatttttatagatgtttaaaattcataaaacactgtattctgagaggtaggtattattcaaatgttagaaattttttttaaaaaaatgccctgaggcttagaaaggacaaatgactgaaatcacaattagtaatctggtctttagacttaaagcctagttatatgcttttattatagcttagtcattaattcacacattttcccttatcttttttatcttttaaaggtgaccataaaactttaaattgtgtgtgtacgtctatgtatgaggtatatgttaccctgtttgtgttattcaaactacctaaaagataggatgatttttgtttaagtgaatcccaaactagcagtctgagaaatacaggaaagcctgataattgacttaccagagttggctttttttttttaagttaccataatttagatataaagttgtcatgtcctggaatttaaaaaagaaatctctagctgagagatgttaatggtcaggagttgaaaatgacaattgtgctttgctttttatttttattttttgtttacttttgagttttttggagtttttttcctatatttttaattgagaagtaaaaattatatatttatggtgtacaacacgatgtgatacatgtataccttgtggaatggctaaatcaagctgtctaacatgttacctcacaaactttttttgtagcgagaacacttaaaattttgtaacaattttcaagtatacagcatattgttattaactgtaatcacgtgatatacagtagatctcttgaacttatatttactaactgcaatttcgtgtccttttacaaacatctccccatttccccatcccccagcctctgataaccagaattttactctccatcccatgaagttgactttttttgcactccgtaagtgagatcatctagaattttggcatgtctttctgtgcctggcttatttcacttaacacagtggtcccctgtgtagctgggaccacaggcgtgtgccactacacccaggtttatccatgttgtcagaaatgacaggatttcctttttttaaaagttgaatggtattctcttatgtatattttccacatttgctttttccattcatccattgatggacagttaaattgattccatatcttggctattgagtaatgctgcagtgaacatgggattgcagatatctcttccacatactgatttcgtttcctttgaacatataccaaatagtgggattggtggataatatggtagttctattttttaatgttttgaggaccctccatactgttttccataatggctataataatttacattgccaccaacagtgtacaaagcttttctttccttttctctgcatcctctccaacacttcccttttgtcttcttgataatagtcattctaacgggtatgattacagtagctttgtagtgggttttctgtgctgtgctttttaatttcatgtatgtaaaaaacattgggtattttgaatgtttttcttttctcaccttatcctagaacttgaggctgggcgcggtggctcatccctgtaatctcagcactttgggaggccaaattgggcagatcacttgaggtcaggagttcgagaccagcctggccaacatggtgaaaccccatttctactaaaaatacaaaaattagccaggcgtggtggtgcacgcctgtagtcccagccaatcagtaggctgaggcacgagaatcgcttgaacccaggaggccaaggctgcagtgagccacgattgcaccactgcactctaacctgagcaacacagactccatctc

SEQ ID NO: 4704 - DNA, 1639 bp, Homo sapiens
aggtctataacttgacccaggagttcttccggcacgataaaccagtcaatgctgaaagtcaaaatagcgtgggggtgttcacccgagaggaggtgcgtaaccgcatcaggaatgaccctgacgacccagaggctaccaagcgcctgaagctcgccatgatccagcagtacctgaaggtggagagctgtgagagcagctcacacagcatggacgaggtgtccctgagcgccttcggggagtggaccgagatccccggcgctcaccacatcatcccctcgggcttcatgcgggttgtggagctgctggcggagggcatccctgcccacgtcatccagctagggaaacctgtccgctgcattcactgggaccaggcctcagcccgccccagaggccctgagattgagccccggggtgagggcgaccacaatcacgacactggggagggtggccagggtggagaggagccccgggggggcaggtgggatgaggatgagcagtggtcggtggtggtggagtgcgaggactgtgagctgatcccggcggaccatgtgattgtgaccgtgtcgctaggtgtgctaaagaggcagtacaccagtttcttccggccaggcctgcccacagagaaggtggctgccatccaccgcctgggcattggcaccaccgacaagatctttctggaattcgaggagcccttctggggccctgagtgcaacagcctacagtttgtgtgggaggacgaagcagagagccacaccctcacctacccacctgagctctggtaccgcaagatctgcggctttgatgtcctctacccgcctgagcgctacggccatgtgctgagcggctggatctgcggggaggaggccctcgtcatggagaagtgtgatgacgaggcagtggccgagatctgcacggagatgctgcgtcagttcacagggaaccccaacattccaaaacctcggcgaatcttgcgctcggcctggggcagcaacccttacttccgcggctcctattcatacacgcaggtgggctccagcggggcggatgtggagaagctggccaagcccctgccgtacacagagagctcaaagacagcgcatggaagctccacaaagcagcagcctggtcaccttttctcttccaagtgcccagaacagcccctggatgctaacaggggcgccgtaaagcccatgcaggtgctgttttccggtgaggccacccaccgcaagtactattccaccacccacggtgctctgctgtccggccagcgtgaggctgcccgcctcattgagatgtaccgagacctcttccagcaggggacctgagggctgtcctcgctgctgagaagagccactaactcgtgacctccagcctgccccttgctgccgtgtgctcctgccttcctgatcctctgtagaaaggatttttatcttctgtagagctagccgccctgactgccttcagacctggccctgtagcttttctttttctccaggctgggccgtgagcaggtgggccgttgagttacctctgtgctggatcccgtgcccccacttgcctaccctctgtcctgccttgttattgtaagtgccttcaatactttgcattttgggataataaaaaaggctccctcccctgc

SEQ ID NO: 4705 - DNA, 1350 bp, Homo sapiens
gccctgcgcggggacactcagagcccggtgggcgggaggaaggcggcatgccccagacggtgatcctcccgggccctgcgccctggggcttcaggctctcagggggcatagacttcaaccagcctttggtcatcaccaggattacaccaggaagcaaggcggcagctgccaacctgtgtcctggagatgtcatcctggctattgacggctttgggacagagtccatgactcatgctgatgcgcaggacaggattaaagcagcagctcaccagctgtgtctcaaaattgacaggggagaaactcacttatggtctccacaagtatctgaagatgggaaagcccatcctttcaaaatcaacttagaatcagaaccacaggaattcaaacccattggtaccgcgcacaacagaagggcccagccttttgttgcagctgcaaacattgatgacaaaagacaggtagtgagcgcttcctataactcgccaattgggctctattcaactagcaatatacaagatgcgcttcacggacagctgcggggtctcattcctagctcacctcaaaacgagcccacagcctcggtgccccccgagtcggacgtgtaccggatgctccacgacaatcggaatgagcccacacagcctcgccagtcgggctccttcagagtgctccagggaatggtggacgatggctctgatgaccgtccggctggaacgcggagtgtgagagctccggtgacgaaagtccatggcggttcaggcggggcacagaggatgccgctctgtgacaaatgtgggagtggcatagttggtgctgtggtgaaggcgcgggataagtaccggcaccctgagtgcttcgtgtgtgccgactgcaacctcaacctcaagcaaaagggctacttcttcatagaaggggagctgtactgcgaaacccacgcaagagcccgcacaaagcccccagagggctatgacacggtcactctgtatcccaaagcttaagtctctgcaggcgtggcacgcacgcacgcacccacccacgcgcacttacacgagaagacattcatggctttgggcagaaggattgtgcagattgtcaactccaaatctaaagtcaaggctttagacctttatcctattgtttattgaggaaaaggaatgggaggcaaatgcctgctatgtgaaaaaaacatacacttagctatgttttgcaactctttttggggctagcaataatgatatttaaagcaataattttttgtatgtcatactccacaatttacatgtatattacagccatcaaacacataaacatcaagatatttgaaggactctaattgtctttccttgacaa

SEQ ID NO: 4706 - DNA, 2819 bp, Homo sapiens
cggagtggctgccctgcgcggggacactcagagcccggtgggcgggaggaaggcggcatgccccagacggtgatcctcccgggccctgcgccctggggcttcaggctctcagggggcatagacttcaaccagcctttggtcatcaccaggattacaccaggaagcaaggcggcagctgccaacctgtgtcctggagatgtcatcctggctattgacggctttgggacagagtccatgactcatgctgatgcgcaggacaggattaaagcagcagctcaccagctgtgtctcaaaattgacaggggagaaactcacttatggtctccacaagtatctgaagatgggaaagcccatcctttcaaaatcaacttagaatcagaaccacaggaattcaaacccattggtaccgcgcacaacagaagggcccagccttttgttgcagctgcaaacattgatgacaaaagacaggtagtgagcgcttcctataactcgccaattgggctctattcaactagcaatatacaagatgcgcttcacggacagctgcggggtctcattcctagctcacctcaaaagacgggaactactttgaacacaagcataatattcggcccaaacctttcgtgatcccgggccgaagcaggtcataagcgctgagactgtggagtttgcagtgcatgcttcttaaatcagttcttactaatcatcaagaaaagtaactggtagatgtttggagtggcttttctcattgcgaagcttatttcaaaagcaaaaagaaacaaactcacttggcagagaacagaagccaaataacttgcatttccaagagtaaatattgacaagatgacagagctgtgaaattgtatgcaatcaccacgtgtatttatagcgaacacccctgaggctctggggatcccatccagaacactgtgacctttgagtcgggcagtcagtatgtctatcccaggtcaggaaagccctgccagcaggagcgagcatggaaaccagccccggttaggaggaaggaatcaggtgaacaagccagaatgataaggagcaagctcttccttctcgtctctcagtagagaaactgatcatcttcagatcatccttttcaaatatcttctctagaaattgaactccaacctaaggggaaagaaaataatgccctgtattgccaaatcaggaaacagtgacttcaggaaacctctgttccatccttctgacctcagctaagccagtcagcccacaggaaggaagctggtggttagaccggattgattccgacaggaacattgaatatgatttaccgcagctgttgcaaactgatggcccataggtggatttatttcacaggcatgttttatttaattcttttgtttaaaaaaaaaaaaagaatttaagtgcctttagacagaacatttaaactcaccatcttgtcaaaatgcacatcactcttaagtgtgtgagacacggcccattttcatacatgtgtgacctcctggcccctctagacacccgagcttatgactcctgtcataagctgcggatagcaggtcatcccttatgtatgatttccatgtccagacctttcaggaagctacaggcagagccaggtgattgtctcaaaatatgccagacaattcttgtgatatcagatccagaaaggagccctggaccagaggagcaggagaaaggcgttaagaaggcaaccatgagcaaacacatcttcccccccctagaacgtgagctcagtgtctgcaggggcctggtctgactggctcaacattatacccccagcacctagaaatgagacagaataaatgctcaataagcgaccatctacaaacagacaaaataaatgcccaataaatgctcactggataaaggaatcaaatcctgagggtgcacaacatttcccaagcaagtggcaagaagagtccagagccgtctcgctcccgatgctggcaggtctgtgtcctctcctgcttctctctatgtgttccctcgttcatactctgttctcatctgcatcttttccgtttctccactttcaacagcttccccaccccaacccaaccccaataacaaaacactggatttaaagttaaaaggatatgatattttactgttgaatatatacaacttcccaaagaagcatagtaaaattaatcacttgcattcttttcaggttagtgtgactgagtccacccacacaagctctggggcttcagaaggcttgaataaagtgatacgttagagtaacacatatcctgcctttactaaaaacctataacatttaattttataaaaagtcaggaaagtcagagaatcctaggtatataatcaccttttaaaaaaatttttcattttaacttaaacatagggataatggcaagccactcataatgttgtcatttgaagatcacaccttttaatgtagctgaatttggaagagagaaggagagaaacagaaatgagaaggtttgcttaaaaaacagatgccagtgcacaaatcttaaagaattataaggcctggtgcgatggctcacacctgtaatcccagcactttgggagacagaggtgggcgaatcacaaggtcaggagttcgagaccatcctggccaacatggtgtaaccccatgtctaccaaaaatacaaaaaattagctgggcatggtggcgggcacctgtaatcccagctactggggaggctgaggcaggagaatcgcctgagcctgggaggcggaggttgtagtgagctgagatcatgccactgcaacaagcgtgagactccatctcaaaaaaaaaaaaaaaaaaa

SEQ ID NO: 4707 - DNA, 1794 bp, Homo sapiens
gtagatggaacgcagctgagaggtctgacaagatgtaccaggtcccactaccactggatcgggatgggaccctggtacggctccgcttcaccatggtggccctggtcacggtctgctgtccacttgtcgccttcctcttctgcatcctctggtccctgctcttccacttcaaggagacaacggccacacactgtggggactgaagcttcaataggagttccaggcattaagatggatggtggagatgcacaagaacatggtcatttccttagactaccccaggtgcccaattacctgccctcggtgagctcagccatcggcggggaggtgccccagcgctacgtgtggcgtttctgcatcggcctgcactcggcgcctcgcttcttggtggccttcgcctactggaaccactacctcagctgcacctccccgtgttcctgctatcgcccgctctgccgcctcaacttcggcctcaatgtcgtggagaacctcgcgttgctagtgctcacttatgtctcctcctccgaggacttcaccatccacgaaaatgctttcattgtgttcattgcctcatccctcgggcacatgctcctcacctgcattctctggcggttgaccaagaagcacacagtaagtcaggaggatcgcaagtcctacagctggaaacagcggctcttcatcatcaacttcatctccttcttctcggcgctggctgtctactttcggcacaacatgtattgtgaggctggagtgtacaccatctttgccatcctggagtacactgttgtcttaaccaacatggcgttccacatgacggcctggtgggacttcgggaacaaggagctgctcataacctctcagcctgaggaaaagcgattctgaacccttcagtcctgcttgggaggacgcagcccactgcccagaaacaagaaacacgataccattctggccttccccaccccacatcctctcttggccttactgaagatgggggaagggtaagaaggaagggtgtaggccaaggctcaccccagtgctgctggcttctcctctccacccctcatatgggcgtggggtcctcaaacatcacctttacctgagaggccccaagaagctgagctggcagagagctccaccatttggtgctaaaaaaaaaaacgtcctgaggttcatgaccaccatccagtttctggcctttacacagtcacctttcactgaggtcaggagcccctgagcagtggctgctccctgacaaccacagccatttctctgcacgggggtcattcataggactaatgtatttcatgatctactgtgcacatccaggcctgtggccacagtcccctgctaaagttgctcaggtgttctagtcctgacttcacctttttgatttggtgtgtgccctagggtatgtacccttccccatctgagcctcggtgtgtccatgtgtctggcgggggatgggtggactgtatgatttccaaggactctaccagtcagtggttctgatgtcatcgggtggaggtggtgttctatacctaaaggatgacctgctccagaaacagcaccagcacagcatgtattttcttctcttctgaaagttctggcttgtagacccctcccctcctttgcaaaggtatgggatagaggggtcagatgcagatctctactgtaaaatgggctccctggtatctcctgtcttccctactgctccaaaccctaaattttggttgtacattttatttgaaaggaaaataaattttttttttgggccaacagttgcctaggcttgct

SEQ ID NO: 4708 - DNA, 384 bp, Homo sapiens
gctttctgaaacaaagactcattttgaagatgtttaacaaatcatttggaacaccctttgggggtggcacaggtggctttggcacaacttcaacatttggacagaatactggctttggcactactagtggaggggcatttggaacatctgcatttggttctagcaacaatactggaggcctctttggaaattcacagactaaaccaggaggattgtttggaaccagttcatttagccagccagctacctccacaagcactggctttgggtttggtacgtcaacaggaacagcaaataccttgtttggaactgcaagcacagggaccagtctcttctcatcccaaaacaatgcctttgcacaaaataaaccaactggctttggca

SEQ ID NO: 4709 - DNA, 1717 bp, Homo sapiens
ttcaaagaatgaggaatcaaagcacaatcaagaactgacatctcagttgttagctgcagaaaataaatgcaatctattagaaaaacaattggaatacatgcgaaatatgataaagcatgccgaaatggagaggacatctgtcttagagaaacaagtttccctagaaagagaacgacaacatgatcaaacacatgttcagagccaacttgaaaaattggatcttcttgaacaggagtataacaaacttaccacaatgcaggcccttgcagaaaaaaaaatgcaagagttggaagcaaaactccatgaagaagaacaggaaaggaaacgcatgcaagctaaggcagctgagttgcagactggtctagaaacaaatagacttatctttgaagataaggcaactccgtgtgttcccaatgcaagaagaattaaaaaaaagaagtcaaaaccaccagaaaaggtgtgaagacagaaccaaatcaggcaaaatgctgattacttggtatagtttatgtcaaaacacccataaactgtgtggtgtactacaaccttgagagagtaaatctttcattctcaatttcttcattcagaaggtggagataagtaatacctactcctaaatttttatcctgatagtgagaaaatatataagcattttggaactacagaacaccatacaaaattagcattattagtactgcattatcttgtgctcttacaatgttttgtgtatatgtatactgattttctacttagaatgtaactgttgttttgtcaagtgcttttttccccccagcctttcctaggctaggatatatgctaacaagtactattaggagctggcttgtgatcataatgccaactatagataaggcaagtagtagcctagtagttaactgaagtttcaagttagtcatgtatagtcagtttttattatcatgtgaataaaataaaattgttttccttttcttttcattcagaaaagttctaggaactattttggtgcacaaccacattatagattatgcttgggtgatatgccatttgtagctgggaaggtgagttggtcaaactccggattctttttatacaacattgatccctgaattaagtccctgcatctgcaagtatgtctacaaatggaaggaacatttttctgtgcctttaccagtgtgtggatcatgcctttaccagtgtgtggatcacagtgatgtgaaaatgagatgtagggaggtttttggggattagggaagcaaggaagagatggggaggataccttaaagtagataaagtatatgtggaaaggaagtgataaaacagagaccctaagttgaagaaggtgttgtttcagataggggtcaaggaaataagaaatagtatgtttgtagcattggatttttagtatcaatcctgttgagttacatttagatataggtagatattcgaataagcacgtagcacattctgcttgtcctcacatccagatcatttctaggactaattctccaagaagcagtcatacgtacacttgaatcttcagtttcttcagcacttgaatgtaaagctgtattgtcatatatcaagtactgagtgaagtgcctaaaactgtgctagttgacactactttataagctgtttgtgttgctggtggttttatatttagattccaactagattgttattctggcatcttgggaagtaaatgttcttctgaattttg

SEQ ID NO: 4710 - DNA, 5458 bp, Homo sapiens
tctccttctctgtctcactctctctctttctctccctctcctatcggagcacaatgaaagcctgtgtatcgccgtgactccgggcgcgagccagtgtcagcaaagcggctaacaacagacgagaaagagaaaggaaaatacaagctactttttttttccatctataaagcggagcaaatacaggagatagaaccagattgcttattgcgagtccagaccctcagatccactggccggggatggaatgtacaaaagtggacagaaaagtggctggacatgactcggtgcaatttgctggaagtttgtaagtttgaccatcgtttgtaaattactctcggaagagtttgtctctcttgatactgtattagaatagagccgggggtgaggaatagaaacgtaagcgggaaagaaaaaaatgtgttgaaggatctctctcagtggctagcgacttaagattgcttttcatttaaggctaggaaaccttagagggagtgaggattttaccggtgattggattagctgaagaaaaaagcatggtccaaaagtccaattactgacattgttaacagttgaaaagctgtctccctcttttgggagaagacaacatcctacagtaccccaaagaggagaaaacaccggagcgaaaggaaagggaggaaaaattaaaagccaaaagacagtctcccttgatttttgcacattttgaacagtgacttaaacatcttctgaaacagcactgttttgttttgttttggttttttatttaacctgaggaaaagtcaaggctgctggttacatagacatggtagaaatgtgtttctctgcagaaacatccccataaagaattgtcggaaacaactaggtgagggggagtcctctctattaatacctctctcaataccttttgctgtgtgtttctgtctcttgctggacaatccctgaattcttgatctaacccccagatcgtgtgtttacaaagtacctagtggctcttgtcagcttggtggaggaaaaaaaatccaccaactctgtccaacttctccagagctgtcaaatgcaattagagtaagttaatcagggtttgtttccaacttatcctccccccagttggtttctattctttctccccaccctctttttactaactcccctcccccacaacttctccacggctcccccacaacctctgaagacctctattcatgtggccctgaacactgagctcacattgtcaaaaacagacttgcctgcaatagccagcagtagcctctttccacctcaccatcccagaggcagcaatcattgtgtccggtaagatgggggacacagcgcccccgcaggcccccgcaggagggctagggggggcctctggggcggggctccttggagggggctcagtcaccccgagagtgcacagtgctatcgtggagcgcctccgggctcggatcgctgtctgccgccaacaccacctgagctgtgaaggacgatatgaacgaggtaggccgagagctcagaccgggaaagagaaagcaccttgcagctcctgagccttgtacagcatggccagggggcaaggaaagctggcaaacacaccaaggccaccgccactgctgccaccactacagcccctccaccgccccctgctgcccctcctgcggcctcccaagcagcagcaacagcagccccaccgcccccaccagactatcaccatcaccaccagcagcacctgctgaacagtagcaataatggtggcagtggtgggataaacggagagcagcagccgcccgcttcaaccccaggggaccagaggaactcagccctgattgcgctccagggttccttgaaaagaaaacaggtagttaacctatctcctgccaacagcaagcgacccaatggctttgtggacaactcatttcttgatatcaaaagaattcgtgttggggagaatctctctgcaggacaaggtggcctccaaataaacaatggacaaagtcagattatgtcagggaccttgcctatgagccaagcacccctgcgaaagactaacactctgccatcccatacacattctcctggcaatggcctgtttaacatgggcttaaaggaggtaaagaaggagccaggagagactctgtcttgcagtaagcacatggatggccaaatgacccaagagaatatttttcctaataggtacggagacgaccctggagaacaactgatggatcctgagctgcaggaactgttcaatgaactgaccaacatatctgtgcctcccatgagtgaccttgaactggagaacatgatcaatgccaccataaagcaggatgacccatttaacattgacttgggtcagcaaagccagaggagcacacctaggccctccttacccatggagaaaatagtgatcaaaagtgaatactcaccgggcttgactcagggcccctcaggctctcctcagctgaggcccccatcagctggccccgcattctccatggccaactctgccctctccacttcgtctccaatcccttcagtccctcagagccaggctcagcctcagacaggctccggagcaagccgggccttgccaagctggcaggaagtatcccatgcccagcagctcaaacagatagctgctaatcgtcagcagcatgcccggatgcagcagcaccagcagcagcaccagcctaccaactggtcagccttgccctcttctgctggaccatcaccaggtccatttgggcaggagaaaatccccagcccttcttttggtcagcagacattcagcccacagagctcccccatgcctggggtagctggcggcagcggccagtcgaaagtaatggctaactacatgtacaaggccggcccctcagcccagggtgggcacctagatgtcctcatgcagcaaaagcctcaggatctcagtcgaagttttattaacaacccgcacccagccatggagccccgtcagggcaacaccaagcctttgtttcattttaactcagatcaagcgaaccagcagatgccttctgttttgccttcccagaacaagccttctctcctacactacacccaacagcaacagcagcaacagcagcagcagcagcagcagcagcagcagcagcagcagcaacagcagcagcagcagcaacagcaacagcaacagcaacagcagagttcaatttcagctcaacaacagcaacagcagcagagctcaatttcagcccaacagcagcagcagcagcaacaacagcagcagcagcagcaacaacaacagcaacaacagcagcagcagcagcagcaacaaccatcttctcagcctgcccaatctctaccaagccagcctttgctaaggtcacctttgccacttcagcaaaagctcctacttcagcaaatgcagaatcagcccattgcaggaatgggataccaagtctcccaacaacagagacaggatcaacactctgtggtaggccagaacacaggccccagtccaagtcctaacccctgctcaaatccaaacactggaagtggttacatgaactcccagcaatcactgttgaatcagcaattgatgggaaagaagcagactctacagaggcagatcatggagcagaaacagcaacttcttctccagcagcagatgctggctgacgcggagaaaattgctccacaagatcagataaaccgacatttgtcaaggccacctccagattataaagaccaaagaagaaatgtgggcaatatgcaaccaactgctcagtattctggtggctcatccacaataagcttaaactctaaccaggctttggcaaacccagtttcaacacacaccattttaactcccaattccagcctcctgtctacttctcacgggacaagaatgccatcattatctacagcagttcagaatatggggatgtatggaaatctgccttgtaatcaacctaacacatacagtgtcacttcaggaatgaatcaattgacccaacagagaaacccaaagcaattgttagcaaatcaaaacaaccctatgatgccacggccacctaccttagggccaagtaataataacaatgtagccacttttggagctggatctgttggtaattcacaacaattgagaccaaatttaacccatagtatggcaagcatgccaccacagagaacatcaaacgtaatgatcacatccaacacaactgcaccaaactgggcctctcaagaaggaacaagcaaacagcaagaagccctgacgtctgcaggagtccgcttccccacaggtacacctgcagcctataccccaaatcagtcactgcaacaggcagtaggtagccagcaattttcccagagggcagtggctcctcctaaccagttaacaccagcagtgcaaatgagacccatgaaccaaatgagccaaacactaaatgggcaaaccatgggtcccctcaggggtctgaatctcagacccaatcagctaagcacacagattttgcctaatttgaatcagtcaggaacagggttgaatcagtcgaggacgggcatcaaccagccaccatccctgacgcccagcaattttccttcacccaaccaaagttccagggcttttcaaggaactgaccacagcagtgacttagcttttgacttcctcagccaacaaaatgataacatgggccctgccctaaacagtgatgctgatttcattgattctttattgaagacagagcctggtaatgatgactggatgaaagacatcaatcttgatgaaatcttggggaacaattcctaaagaagaaagggaagacaatttacaaactccaagcactaaaaggcagtatattacagaaactctgtagaggctgaactgttgatgttcaggtggactacatgaagataacatgcttaaaaatggaaagcagaaagtaactgcagtgatgaacattttggtccaaattcttgttttaaatcttacacctgaaagtaaaatattgggatcacttttccctgtctaaactccaggatacagtatccaatttatccaaacagaactgtggtgtcaatgtgtaattaattgtgtaaaatagccttcccaagtttctttttccctggaaaataaaaaaggtaatagaacttgtagtttatttaaaccccatgtcatgaggaggtactagttccaagcaacaaactccttaatttgctctaatagataggtatggtttaatctttccattgtgtcttttcatttaattttcctgaagcttgcaggatagattgaaatgttataggtttgtttggagtaaccaaacagtatgcaaattaagaaaaagccagagaacctagaaaacatccagtggattacagaatttcttccccatattcactcctcacttttacaattttcccacaatcctctacttcagtgggatgctgtgtctagtgattaaacaaaaatatagagctg

SEQ ID NO: 4711 - DNA, 1964 bp, Homo sapiens
ttggagttcagctaccaaaaggaaaccttcctctgggtcctggagtatttggcctgaaattgggaactcggaagttgctgctccagggcgctccctgcggagctccgccgcccgcctctccgcccggcctttcccggcgtccccacgcggggcgcaaccgcgagaaagaaacgcaggtcgcaccgtcagcgcccagagcagcgccagtttccgggcccgggctgctctcggagccatgagctgcggccgcccccctcccgacgtggacggcatgatcaccctcaaggtggacaacctgacctaccgcacctctcccgacagcttgaggcgcgtgttcgagaagtacgggcgcgtgggcgacgtgtacatcccgcgggagccccacaccaaggcgccccggggcttcgctttcgtccgctttcacgaccggcgcgacgcccaagacgccgaggccgccatggacggggcggagctggacggacgcgagctgcgggtgcaggtggcgcgctatggccgccgggacctgccccgcagccgccagggagagccacgcggcaggtccagaggcggcggctacggacggcggagccgcagctacgggcggcggagccgcagccccaggcggcgacaccgcagccgatcccggggtcccagctgctccaggtcccgcagccgatctcgctataggggttctcgctatagccggtctccctacagccgatctccttacagccggtcgcgctacagcgctctccctacagcagatctcgctacagggaatctcgctacggcggatctcactacagctcatctggttacagtaactctcgctacagccgatatcacagcagccggtctcactcgaagtctgggtcctccactagctctcgctctgcatcaacctccaaatcgagctctgcgcgacgatccaagtcctcctcggtctccaggtctcgctcgcggtccaggtcttcatctatgaccaggagtcctccccgggtatccaagaggaaatccaagtcaaggtcgcgatccaagaggccccccaagtctcctgaagaggaaggacagatgtcctcttaagaaaatgatgcatcaggaagcaacgtgatggaggacttgggggaaaaggatcacatactcagtctatggaagcaacgtccctgttgcagtgcagagtgctgagctgcttcctgttttcttctgattgctcctggggaaaacacgccttgtcctgaagaacaaatggctgtccagtttattaaaatgcctgtcaactgcacttccagtcacccaggccttgcagataaataatggagcatgcagtgagcacatctagctgacgataatcacaccttttcccccgtcttttctgaaaaattgtaaatctgatcatatcaacatgtatgaacttaaaatatggagaatgttatggaagaaatagtttataagtttgttaagtacttataacatggtttatctttttgattattaattttttacgctaaccattgtttctgtagttaaaattgttttcttggtgttatcttttctcagaataaaattagaaacttttgatggaaagtaggttgttttattttctgtatgacttttggatatttgtacttttgagaaaattattagcaccaagtgtttctcaaaatataatttttaaaaaatccttaataggcttttagctatgtgctttattgttttatcacaatgcagtttatttgtagtttctctcttttttcctcacacctatggtttttttacttccaaaattattttcaaataatccatttttggctttcatcattatccctactagatgttatgtgttcttttgcaattgtttctgcttatacctttactagcaaagggaaaaataacaatttggtgtcaatgatctggtgacaataggattacattggagccaattgaataaatttattctttcaatc

SEQ ID NO: 4712 - DNA, 6445 bp, Homo sapiens
gctgccgctgcccgccggctgggaggaggcgcgagactacgacggtcgcgtcttttacattgaccacaacacgcgccagacgtcgtggatcgacccccgcgacggataacaaagccattgacctttgccgattgtgttggggacgaacttcctttaggatgggaaaccgtatatgataaacaaattggagtttattacatggaccacataaataaacttacccagattgaggatccaagagaacagtggaggcgagagcaagagcgcatgttgaaggaatatttaattgtagctcaggaggctctcaatgccaagaaagaaatctaccagattaagcagcagcggttcgagctggcccaggaggaataccagcagctgcacaaaatgtgtgaggatgacagccgctcgtacgccagctcattctctggatattcaacaaatacaaagtatgacccacaccaaattaaagcagaaatagcaagtcgtcgggataggctttccagattaaaacgagagctgacccagatgaagcaggaactgcagtacaaagaaaagggggtggagaccctgcaagagattgatcggaagatgtcaagtactcacaccagctacaaactggatgaggcgcaggctatcatgagtgagctccggaccatcaagaaggccatttgcacaggcgagaaggagaggcgggacctgatgcatagcctggccaagctgaccgatagcttcaagaacagctgctccgttaccgactctctagtggacttccctcaccatgtaggcgtgcctggcgatgctggtgtaccccagcagttctgcgatgccggctcccagactgatatcatcggggagtttgtctttgatgataaaacaagacttgtagaccgagtcagacttaattggcaatatgaagaagccagaaagagagtcgccaacatccagcagcagctggcccggcttgacaatgagtcctggccaagcacggccgaggctgacagggaccggctgcagctcatcaaggagaaggaggccctgctgcaggagcttcagctcatcattgcacagcgccgctctgcgggagatgtggcccggctggaggaggagcgggagcgcctagaggaggagctgcggcgtgcacgggccacctccgcacagggcgccacggagaggattctgcttcaggaaaaaaggaattgtctacttatgcagctggaagaagccacccgcttaacatcctacctccagtcccagttaaaaagcctgtgtgccagcaccctgacggtgtcctcggggagcagccgcgggtccctagcctccagccgtgggtctctggcctccagccggggctccctgagctcggtcagcttcacggacatctacggcctcccgcagtacgagaagcccgacgctgagggcagccagcttctacgcttcgacctcattcccttcgactctctggggcgagatgctcccttttcagagcccccaggcccctcgggcttccacaagcagaggcggtccctggacacgccccagtccctggcatcgctgtcctcccgctcctcgctgtcctcgctgtcgcccccaagctcgcccctggacacgcccttcctccctgcctcacgggactcgccgctggcgcagctggcggacagctgtgaggggccaggcctgggcgccctagacagactgcgggcacacgcctcggctatgggggacgaagacttaccaggcatggcggcccttcagccacacggggtccccggggacggggaagggccgcacgagcgaggacccccaccagccagcgctcccgtgggtggaacagtgactcttcgagaagacagtgccaagaggttggagaggagggcacgccgcatctccgcatgtctgtcggattattcgctagccagcgacagtggggtgtttgaacctctaaccaaaaggaacgaagatgccgaggagcctgcctacggagacacggccagtaacggagatccccagatccacgtgggactcctgcgcgacagtggcagcgagtgtctcctcgtgcacgtgctgcagctgaagaacccggcggggctggcggtgaaggaagactgcaaagtccacatccgagtctatttgcccccactggactcgggcacgcccaacacttactgctccaaggctctggagttccaagtgccgctggtgtttaacgaagtgttcagaatccccgtgcattccagcgcgttgacactgaagtcacttcagttatacgtgtgttcagtgactccgcagctgcaggaagaactgctgggcattgctcagattaacctggctgactatgacagtttgagtgagatgcagctgcgctggcattccgtgcaggtgttcaccagctctgaaccatcaaggacgcgggaggctgggtgtgcaggagagagctccgcccgggaccctgcacacaccatctccatctccggcaagacggatgcggtgacggtgctcctggccagaaccacggcacagctgcaggcggtggagagggaactggccgaggagcgggccaagctggagtacacggaggaggaggtcctggagatggagcgcaaggaggagcaggccgaggccatatccgagcggagttggcaagcggactcggtggatagcggctgtagcaactgcacccagaccagccctccgtacccagagccctgttgcatgggtatcgactccatcctgggccacccatttgctgctcaggcagggccttacagccccgagaaatttcagccctcgcctcttaaggttgataaggaaaccaacacggaagatctctttctggaagaagcagccagcctcgtgaaggagcggcccagccgccgggcccgagggtcgccttttgttcggagtggcacgattgtccgttcccagacattctcgcctggagcacgaagccagtatgtttgcagactttatcgtagtgacagcgacagttcaacgctgccccggaagtccccctttgtccgaaatactttggaaagacgaacccttcgctataagcagtcatgcaggtcttccctggctgagctcatggcccgcacctccctggacttggagctggatctccaggcgtcgagaacacggcagaggcagctgaatgaggagctctgcgccctccgtgagctgcggcagcggttggaggacgcccagctccgtggccagactgacctcccaccctgggtgcttcgggacgagcggctccgtggcctgctgcgggaggccgagcggcagacaagacagaccaaacttgactaccgtcatgagcaggcggctgagaagatgctgaagaaggcctccaaggagatctaccagctgcgtgggcagagccacaaagagcccatccaagtgcagacctttagggagaagatagcattcttcacaaggccaaggatcaacatacctcctctcccagccgacgacgtctgatggagtgcattgtgcacatgaagtatttatccacctgttttattttcatgaagttcttagactagctgaatttgtctttaaaatatttgtgcaaagctattaatatacacattttgtaaaaaaaaaaaaaaaacacgtatatctatacatatatattttataatagtgacggcaacagggcttggtttttccttgttgtgaaatcgacatctctgaagacaggttattttataaaagatcaactatcatgttaagaatgtacagtttttatgctgttttatttgacttaaaggctggaagacagaaacgaagtgagttcaggcaaattcactgtattgtaatttatttatagtacttttttttccttgaaggaaaatactgactttaagatgtattttaagactgaaattttgttctttagtacttttcatgcagtagaacggaacttggggctggtttggtttttgacacctgaaatgcgaacgctatgtgctaaatttgtcaccgtatcatatgtgcatttaccatgtatattgtacacattcactcccttgatgtcatgttaaaatgtcccctgcagtggttcaatcgtgactcggaagcatgtgtgtgttgcagaggtcagtctctggcgtgggccgcacgccaaccgctcatttctgtgttgcctttggaagcatctttctgtgctcagcgtgagtctgaagcaggcgccagggcctctggtgtacggggcttcagcctgcttgcttgtggtggctgtctgtggggcttcagcctgactgtccgtggtggctgtccatgctgcccgcctccccccaccccgccctgtccgactgtaacagaccaggagggtggcggaggaactcctgccacgccactgtgtcatgaaggaaagtgaaagggaacgaggaagtaggaatgcccacgctcgttgactccgtgggtgaatacagcagttaggacatacacaccatcacctttgaaagtgcttgtttgggggagggaaggacatacgggtaactagaactacccagcgagtcgtccagaggagaggatcaggtttgagtcaggaggctccctgtactggagtcgtcccactattcctcaagaaatcttagaaccagcttgtgaggaaaaacattttttaatgtaataaaaatatgccattattctttgaaatgccaaatgatataaatattttgcctaatacatatttattgtagatgaaatgcactcttctcgatgaggcctcgatttgaatcaatggggtgggccacaggaaatgtcagaggaaccagaactcagaactcttcctcctggacctttcttcccttcccttggaggtatccctttgaatcaggcctctctcttctcatcagtctgtagcttccccccttgtataacctgctttcctttttacatttattaaaagtggattttgtaaaagcatttcattgacacgcgacctatcacagacaatggaattcgtcagtggtggtaagactgaaatcctgatgcttttcacacttcttgtctcttgctatgtatttctgcctctagccttgccatgttttgccttttttttttctttttggccaattcctttttatatgtgcccacaacagaggtggggagacacggagcaccctgggtccttcccagcgctgctgggcaggccccgtctccaggccccagctgttgaaactttgaagggcaacaaacaaccatccacactgccggaccctaggctgttcagggaggcagctcatttccaccccggccccaggacacccagcctgtgccccacaaggatctctctaaatgggagggattgaggctacttttctgccaagccctattaagtagtaatgtggggaaacccactgtgtcagtgcaggaagccctagacaaatgttttcaaataaatttcactgcccagcctgcacagatttccatttgaagtacttcccatccaccctgacacccaaaggggtttttttgttttgttttgtttttgagacagggtcttgctttgttgcccaggctggagtgcagtgacgtggtcatagctcactgcagcctcaacctcctgggctcaagtgaccctcctgcctcagcctcccaaagttctgagatgataggcatgagccattgtgcctagcctattttgatttttttcttagagtcaaggtcttgctctgttgcccaggctgatcttggacttgcgagccaccatgcctggctgggttttttaaaaatagaatctcactgatagcctgcaagaaacagatgcagtgcctgcttccgtatcagtccaaggagccctcgtgtttgccacctttacctttgaacctccccctgcctccctgcctgtgtccgcttttgcagctcaatgcagccatgacaaggaaagaaaagacaaaggaaggccagagagccgcgcagttctctgcaggtgcagatgcaggcagtggaggtggcctgagcaggcagaaggacaccaagcgccctatgttgcttgtcattcatgacgtggtcttggagcttctgactagttcagactgccacgccaaccccagaaaataccccacatgccagaaaagtgaagtcctaggtgtttccatctatgtttcaatctgtccatctaccaggcctcgcgataaaaacaaaacaaaaaaacgctgccaggttttagaagcagttctggtctcaaaaccatcaggatcctgccaccagggttcttttgaaatagtaccacatgtaaaagggaatttggctttcacttcatctaataactgaattgtcaggctttgattgataattgtagaaataagtagccttctgttgtgggaataagttataatcagtattcatctctttgttttttgtcactcttttctctctaattgtgtcatttgtactgtttgaaaaatatttcttctataaaattaaactaacctgcctt

SEQ ID NO: 4713 - DNA, 1035 bp, Homo sapiens
ctagccgctatcgcagagtggagcggggctgggagcaaagcgctgagggagctcggtacgccgccgcctcgcacccgcagcctcgcgcccgccgccgcccgtccccagagaaccatggagtctggcagtaccgccgccagtgaggaggcacgcagccttcgagaatgtgagctctacgtccagaagcataacattcaagcgctgctcaaagattctattgtgcagttgtgcactgctcgacctgagagacccattcctttatcgcaggagagactgtgattcagcaaggtgatgaaggggataacttctatgtgattgatcaaggagagacggatgtctatgttaacaatgaatgggcaaccagtgttggggaaggagggagctttggagaacttgctttgatttatggaacaccgagagcagccactgtcaaagcaaagacaaatgtgaaattgtggggcatcgaccgagacagctatagaagaatcctcatgggaagcacactgagaaagcggaagatgtatgaggaattccttagtaaagtctctattttagagtctctggacaagtgggaacgtcttacggtagctgatgcattggaaccagtgcagtttgaagatgggcagaagattgtggtgcagggagaaccaggggatgagttcttcattattttagaggggtcagctgctgtgctacaacgtcggtcagaaaatgaagagtttgttgaagtgggaagattggggccttctgattattttggtgaaattgcactactgatgaatcgtcctcgtgctgccacagttgttgctcgtggccctaatttgtcttagttgatattcaaggctttaaaagtcattattcctgggcttggtaagtgaatttatgagatttactgctctagaaagtatagatggcgaaaggaccgttttgtattgcttcctgattaccagtctgattataccatgtgtgctaatatactttttttgttatagattgtcttaatggtaggtcaagtaataaaaagagatgaaataa

SEQ ID NO: 4714 - DNA, 2590 bp, Homo sapiens
cttctctcgccaggcgtcctcgtggaaggttcgtgtgctagttagatgggcgccaggggtcgccggcgggaagcatggaggggtctttgggggcctttgggaacatggagtcctattctgttccgcctggggcctcggtggcggcttgcacgccccgagatgacggccgctgccctaggcagggccggcgggcgattgcgcgtgtcctgctcctcttaggcccgggaccgcgggatgggtgtcggcgtgaccaggcctgagctccctgtctctcctcagtgacatcgtctttaaaccctgcgtggcaatccctgacgcaccgccgtgatgcccagggaagacagggcgacctggaagtccaactacttccttaagatcatcgtaagtgcagggtgggtcgcctctgctcttcatgttgccccagcgcaaatagggacagtcagctgctatgtgctgagggtctactcacaccggctactgaattaggccatttttgggaaaatactgtttagttaacaatttcctgagataggtcccttctgttgcagataaacgggctcaggcaagttaagtgggtcctaagatgacagcattcgtatccaggtctgtctggcttctaaaagagcgcgctttatacttttttttttttaaacggagtctcgctctgttgtccaggctggagtgcagtggcttgatcttggcttactgcaacctccgcttcccaggttcaagcgattctcctgcttcagcctcccgagtagctgggattacaggggcgcgacaccacacccagctaatttttgtattttcaatagagacagggattcaccatgttggccaggatggtctcgatctcttgacttcatgatccaccttcctcggcctccctaagtgctaggattacaggtgtgagccaccgcgcccggccgcacattacagttttactccatttttgagaaggtctgaggtcaggaatgactcattgtaaggaagcaagctgttgcatatttaggacctgtcagccaagaaacttaagtgtccaatgacttttggatggcctttgaggtgggtctcccttgcccagaaatgctgactgtactgcgcttaagcaattaggcagcattgtagagcatagcttgtattacattttcccacacttagaaggttttcagacacaaaacccaaaggaattgtgtaacaatccggataaacacgcctagattgtttttacaaataataatgttgctatatttgcttaacgtggtgcttttaatgctgtgaatctagccctcctcttgaccaacttacttggaacattccttttttatcctgttaaccattttagtgaatcagaagcatgcctggtaattgggaaaaattaaaaactaagtaaaaaaagaaaaaactccttgattgaatgtagaaacctaattttcagcgttcatacccagctagccaatcatccagtttggcagtgttacaacgtagctcccaatctccctctgacttcaaaagcttagaagaaagggagtgggatggaaacaaattgtggggttcagtttcttctggcattttttccctctctcttcctgttaaacttggctcctctggcttgttttttgtagcaactattggatgattatccgaaatgtttcattgtgggagcagacaatgtgggctccaagcagatgcagcagatccgcatgtcccttcgcgggaaggctgtggtgctgatgggcaagaacaccatgatgcgcaaggccatccgagggcacctggaaaacaacccagctctggagaaactgctgcctcatatccgggggaatgtgggctttgtgttcaccaaggaggacctcactgagatcagggacatgttgctggccaataaggtgccagctgctgcccgtgctggtgccattgccccatgtgaagtcactgtgccagcccagaacactggtctcgggcccgagaagacctcctttttccaggctttaggtatcaccactaaaatctccaggggcaccattgaaatcctggtgatgtgcagctgatcaagactggagacaaagtgggagccagcgaagccacgctgctgaacatgctcaacatctcccccttctcctttgggctggtcatccagcaggtgttcgacaatggcagcatctacaaccctgaagtgcttgatatcacagaggaaactctgcattctcgcttcctggagggtgtccgcaatgttgccagtgtctgtctgcagattggctacccaactgttgcatcagtaccccattctatcatcaacgggtacaaacgagtcctggccttgtctgtggagacggattacaccttcccacttgctgaaaaggtcaaggccttcttggctgatccatctgcctttgtggctgctgcccctgtggctgctgccaccacagctgctcctgctgctgctgcagccccagctaaggttgaagccaaggaagagtcggaggagtcggacgaggatatgggatttggtctctttgactaatcaccaaaaagcaaccaacttagccagttttatttgcaaaacaaggaaataaaggcttacttcttt

SEQ ID NO: 4715 - DNA, 5676 bp, Homo sapiens
tagaaaattatgaccacaaagcaatggtcccttttgggttccctgaatttttccgctgtgaccctgcaatctctccgagccttcatgcagcagcacagatttctaggggagaatttgtccgcatctcaggattagattatgtggacagtgccctcctgatggggagagacagggacaagcctttcaaacggaggttgaaatcagagtcggtggaaacatctctcttccgaaagcttcgaactgttaaaagtgagcacgaaactttcaagttcacgtctgagctggaggagagccgactggagaggggcattcgcccttggaattgtcagcgatgttttgcacattatgatgtccagagcattttgtttaatatcaacgaagccatggctacgagggctaatgtggggaaaaggaaaaacataaccactggggcatctgcagcatcccagactcagatgcctacgggccagacaggcaactgtgagtcccctttagggagcaaggaggacctcaactccaaagagaacctggatgccgatgagggtgatgggaaaagtaacgacctcgtccttagttgtccttactttagaaatgagactggaggggaaggcgacaggcggattgcgctctctcgagccaactcatcctctttcagttctggggaaagctgctctttcgaatcgtcactcagctctcactgcacaaatgcaggtgtctccgtcttggaagtgcccagagaaaaccagcctattcacagggagaaagtgaagcgctacatcatagaacacattgaccttggggcctattattaccgcaaattcttctatgggaaagagcaccaaaactactttggaatagatgaaaaccttggtccagtagcagtcagcatccggagagagaaggtggaagatgccaaggagaaagaaggatcccagttcaactacagggtggctttcaggacaagtgagcttacaacactgagaggagcaattttagaagatgctataccctctactgctaggcatggtaccgcacgaggactacctctcaaagaagttttggaatacgtcattccagagctgagcattcagtgtttgcgacaggcttccaactcacccaaggtctcagagcagctgctcaagcttgatgaacaagggctgagctttcagcacaagatcgggatcctttattgcaaagcaggccagagcacagaggaagagatgtataacaatgagacggcgggaccagcttttgaagaattccttgatcttctgggccagagagtccgactgaaaggatttagtaaatatcgagctcagctagacaataagactgattccacgggcacgcactctctctataccacatacaaagactacgaactcatgttccacgtgtcaaccctgcttccctacatgcccaacaacagacaacagctactgaggaaaaggcacataggaaatgacatcgtcaccatcgtcttccaggagcctggggcacttccttttactccaaaaagcatccggtctcactttcagcatgtctttgtcatagtcaaagtgcataatccatgtaccgaaaatgtgtgttatagtgttggagtttccagatcaaaagatgtgccaccatttggcccaccgattcccaaaggtgtaacttttccaaagtcagccgtgttccgggacttccttttagccaaagtaatcaatgcagaaaatgcagcccataaatcagaaaagtttcgagcaatggccactcgaacgaggcaggagtacttgaaagatctggcggagaactttgtcacaaccgccaccgtggatacctctgtgaagttcagcttcattacgctgggtgcgaagaaaaaggagaaggtaaagccaaggaaggatgcccacttgtttagcattggggccatcatgtggcacgtgatagcccgggacttcggccagtctgctgacattgaatgtcttctcgggatctccaatgagttcatcatgttgattgaaaaggattccaagaatgttgtattcaactgttcctgcagggatgtgattgggtggacatctggattagtgagtatcaaagtgttttacgaaagaggagaatgtgtcctcctgtcctcggtagacaactgtgctgaagacatcagggaaattgttcagcgattagtaatagtgacgagaggctgcgagactgtggaaatgaccctgaggaggaacgggctgggccagcttggcttccatgtgaattttgaaggaattgtcgcagatgtggaaccttttggctttgcctggaaggctggccttcgccaagggagccgcctcgtggagatctgcaaagtagccgtggccactctgacccacgagcagatgatcgacctgctccgtacttctgtgactgtgaaggtggtcatcatccagccccatgatgacggctcgccccgaagagggtgttcagagctctgccggatccctatggtggaatataaactcgacagcgagggcaccccctgcgagtataaaacccccttcaggaggaacaccacgtggcaccgggtgcccactcctgccctgcagcccctctctagagcttcccccatccccggcacgcccgaccggctgccgtgccaacagctgctccagcaggcccaggctgccattcctcgaagcacctccttcgaccggaagctgcccgatggcacgagaagctcacccagcaaccagtcatcctccagcgaccctggacccggcgggagcggaccctggagaccacaagtgggctacgacgggtgccagtcccctctactgctcgaacaccagggctcaggccctttggaatgtgacggagccagggagagggaagacaccatggaagcaagcaggcacccggaaaccaaatggcatggcccaccttccaaagtcctgggttcctataaagaaagagctctgcagaaagatggaagttgcaaagattcccccaataagctttctcacattggggataaaagttgctccagtcactccagcagcaacacgctctccagcaacacctccagcaacagtgacgacaagcactttgggtctggcgacctgatggaccccgaattactggggctgacctacatcaaaggggcctccaccgacagtggcatcgacacggccccctgcatgcctgccaccatcctcggccctgtgcacctggcaggcagcaggtccctgatccacagccgggccgagcagtgggctgatgctgccgacgtctctgggcctgacgacgagccagccaagttatattctgtgcatggctacgcgtccaccatctccgccggcagtgctgcggaaggcagcatgggcgatctcagtgagatatcctctcattccagtggttctcaccattcaggaagcccttcagctcactgttcaaaaagtagtgggtctctggattcatccaaagtctacatcgtgtctcacagcagcggacaacaggttcccgggtccatgtccaagccctaccacagacaaggggcagtgaacaaatatgtcatcggctggaagaaatcggagggcagcccaccgcccgaggagcctgaagtgactgaatgtcccgggatgtatagtgagatggatgtcatgtccacagcaactcagcatcagacagtggtgggagatgctgttgcagagactcaacatgttctgtctaaagaagattttctgaaattgatgcttcctgacagccccttagtggaggaggggcgaagaaagttttcgttctatgggaacctgtctccaaggaggtcgctttaccgcacgctgtctgacgagagcatctgcagcaacaggagggggtcctcctttggcagttcccggagttccgtgcttgaccaggccctgcccaacgacattctgttcagcaccaccccaccctaccacagcacgctgcctccgcgggcccaccccgcacccagcatggggagcctgagaaatgagttctggttctccgatgggtccttatcagataagtccaagtgcgcagatcctggcctgatgcccctcccggacacagccacagggttagattggacccacctcgtggatgctgcacgggcatttgaaggtcttgactcagatgaagaactggggctgctctgtcaccacacgtcctatctagaccagagggtggcatccttctgcaccctgacagatatgcagcatgggcaggacctggaaggggcccaagagctgcccttatgtgtagatccaggcagtggcaaagagttcatggacacaactggggagcgttctccatcaccactgaccgggaaagtcaatcagctggaattaattcttcgacaactccagaccgaccttcggaaggaaaaacaagacaaggccgttctccaagcagaagtgcagcacctgagacaggacaacatgagactgcaggaggagtcccagaccgcgacagctcagctgcggaaattcacagaatggtttttcaccaccatcgacaaaaaatcttagccaatccgcacctcatcaagggaccactgggaaatgccccttgtccctttgaagtcacaaacatgtggtttttctgtgtgctttcaaccaatcgtagatgtttttgctgttccattctgtgtagcaccattcaccacagcaggatagggagcctcgactctttctcggtaaccacggcagagagcagcgccgatgtgaagatgaatgaatgtaactcctggtgtgaagatgaatgtaaaccctggcgacagttgagacctttttcttttagactctgctaaaacagtgctctggcttgggcttacctcaagagggaagatagttgagttttatttcctgtatatcaggtgacctggtagagatgtaaagcaatttaccatagtttgggctttagtattgtaaaataaacatgagaacaaataatcagacatatactttaatgttaaaggtgctctatttttttggatgtacagtagttttatttccacagccacattaccatagcaataagaaaggaggcatagtacatagttggaaaagctttgtggggggattaaaaaaaaaaaaaagcactgttgtgtttaacactagttcagatgcagttaccttagagacttatttatttgcaggaacaaatggtgcctgaatattaacagtgttctgattaaaaacaaaaaaaagatacatatgccttgtaaatggctcaccgagtggtcagtagtcacttcaactcttagttcacttttgtatagttgctctgctggaaagaaatgagagtgaatctgcttactcactagaacttccctgtgtgctgtgagccagcggaaccacttgtacaatgccagatttgtttatctttgtacagaagctttgatgaagtgtcttgtatttaacacccttatttaagcttatttaaccttaaattgttaattttataaaatttggtttggcctgcactacgatgagggatggaggtagctgcaggctcagaagagactgagcttgcacagatcagaccgagaagcagggtgagagattctaacgactggatgctgctagtaacacattgtttgtattgctttaccatttttaactgttagatttgagatgaacatacattttgcttttttaataaatgtttaaaagaagtccacat

SEQ ID NO: 4716 - DNA, 2693 bp, Homo sapiens
cgcctcagctcatcgacccggttcgattagaacagggcatcaagtttctgcacgcctacccgctcattcaggaagccagcctcgccagccagggagccttttctcaccctgaccaagttttcccactggcttcttcattgtatggcattcagattgcagatcatcagttgagacaagccaccaagattgcttcagcacctgaaaaactcgggcgagatccacggccacagacctccaggataagccaggagcaggtccctgaggcctcacagctctcccagctgacttcaaatctggcccaggtgaatcggacaaatatgactccctcagaccccctgcagacctcgctgtctccagaacttgtttccactcctgttcctccccctcctcccggggaggagaccaatctggaagcatcttcctccgatgagcagcctgcgtccctcacaatagcccacgtcaagccaagcatcatgaagaggaatgggagctttccaaagtactatgcctgccacctgtgtggacggcgcttcactctccggagcagcttacgtgaacacctccagatccacacaggagtacctttcacatctagccaacagggagaaagtcgcgtccccctgactctctgtagcaatgcagctgacctcgggaaagatgccatggaagtgcctgaagccgggatgataagtgacagtgagctgcagcacatctctgattctcccatcatcgatgggcagcagcagtcggaaaccccacccccctcagacattgctgacattgacaacctggagcaggccgaccaggagagggaggtgaagaggcggaagtacgagtgcacaatatgtggacgcaaatttatccagaaaagccactggagggaacacatgtacatacacaccgggaagcctttcaagtgcagcacttgtgacaaaagcttttgcagggccaaccaggctgcccgccacgtgtgcctcaaccagagcatcgacacttacaccatggtggacaaacagactctggaactctgcacatttgaggaagggagtcagatggacaacatgctggtgcaaacaaacaaaccctacaaatgcaacttgtgtgacaaaacattctccactcccaatgaggttgttaaacattcatgccaaaaccagaactcggatgtttttgccctagacgaagggcgatccattctcctgggcagtggggactcggaagtaacggagcctgaccacccagtgttagcttccatcaaaaaggaacaagaaaccgtcttactagactgaatgtcacttatctttttaaaaaactctcatttttacaaagactatcttccctcccttccctgaattcagaactgtagttctccatggcatgatacaaacaggtccttgttctcttctcctcttccccttttccacatcccagccccacctctgtaaaggctttgtgcattataaacctggaatgtatcgactttctttcaggggatattggaaagataatggtcattatacttataaactcaaattttgagaggttttagattattcagaagcatacttggaactaatgaagggtatataataaaacaactggaatccaatttggtaagctaaaattatgactttccctgggtaaaaagtcttctcagaaaaacaatgtcagaaaataacagcgtgctgcttagaaatacggctgggctctgtactatgcaaaatctagaaagtgtggggaaactttaaacccaagaaaacgttcttagtattcatcctccaggtgtcttacttcagaatgcatcctttgagattatgtccacttaagagaaatcatcagttaagaaatctactttaacaaaacaaaaaggagaaaaagtaataatgtgatggcaatcttaatttttgggtacaacatgacaagctgtgagtttgtgtgtttgtaagagaaaaatgtgtgggtacttgctaataaacaggtgaattaatgcacatccttatctcattgctggcttctttccaagttgagcaacaacaaaatgctgtatttgagtttctgacaaatttgttttaaaaatcaaatttgaatgtactattctataaattgcctttctgaatagaacatgacatgccattttctagcagctgccagtgataatttgttttacactaacttttaaatcagtgtgtgtactgcagggaaaaggatataggaatactcatcttacaggggaatttgtgaccagaagatgtagtaacttcaatgactgaaagtcaatgctgatagtttactggcaacattaattgaagcatcaaaaataaatggcaaagagaaatcaggacaaaaaatctaattgctgtttgggaaaaaacttgattttgatgtttattctccaggtttttggttgtttttttttctttcttctttcttaatgcctgaaattttctccattggcccgaaagcagtaaaaattgttcattaatcttccgttaggccaataaaagaagggcctcacaagacaaaacaggagccagaagtaaggactgaaggagaaggggagaatagctaatagctatagtatatgtatatgttaaaaactgaatatcccatcatcctatttcatgtatagttgagttctcaaatttgtaagtttttatacatcctttcattgaataaacgtttaattaaatgag

SEQ ID NO: 4717 - DNA, 1436 bp, Homo sapiens
aggttccctggttgtgaaaatacatgagataaatcatgaaggccactatcatcctccttctgcttgcacaagtttcctgggctggaccgtttcaacagagaggcttatttgactttatgctagaagatgaggcttctgggataggcccagaagttcctgatgaccgcgacttcgagccctccctaggcccagtgtgccccttccgctgtcaatgccatcttcgagtggtccagtgttctgatttgggtctggacaaagtgccaaaggatcttccccctgacacaactctgctagacctgcaaaacaacaaaataaccgaaatcaaagatggagactttaagaacctgaagaaccttcacgcattgattcttgtcaacaataaaattagcaaagttagtcctggagcatttacacctttggtgaagttggaacgactttatctgtccaagaatcagctgaaggaattgccagaaaaaatgcccaaaactcttcaggagctgcgtgcccatgagaatgagatcaccaaagtgcgaaaagttactttcaatggactgaaccagatgattgtcatagaactgggcaccaatccgctgaagagctcaggaattgaaaatggggctttccagggaatgaagaagctctcctacatccgcattgctgataccaatatcaccagcattcctcaaggtcttcctccttcccttacggaattacatcttgatggcaacaaaatcagcagagttgatgcagctagcctgaaaggactgaataatttggctaagttgggattgagtttcaacagcatctctgctgttgacaatggctctctggccaacacgcctcatctgagggagcttcacttggacaacaacaagcttaccagagtacctggtgggctggcagagcataagtacatccaggttgtctaccttcataacaacaatatctctgtagttggatcaagtgacttctgcccacctggacacaacaccaaaaaggcttcttattcgggtgtgagtcttttcagcaacccggtccagtactgggagatacagccatccaccttcagatgtgtctacgtgcgctctgccattcaactcggaaactataagtaattctcaagaaagccctcatttttataacctggcaaaatcttgttaatgtcattgctaaaaaataaataaaagctagatactggaaacctaactgcaatgtggatgttttacccacatgacttattatgcataaagccaaatttccagtttaagtaattgcctacaataaaaagaaattttgcctgccattttcagaatcatcttttgaagctttctgttgatgttaactgagctactagagatattcttatttcactaaatgtaaaatttggagtaaatatatatgtcaatatttagtaaagcttttcttttttaatttcc

SEQ ID NO: 4718 - DNA, 519 bp, Homo sapiens
atgaaggccactatcatcctccttctgcttgcacaagtttcctgggctggaccgtttcaacagagaggcttatttgactttatgctagaagatgaggcttctgggataggcccagaagttcctgatgaccgcgacttcgagccctccctaggcccagtgtgccccttccgctgtcaatgccatcttcgagtggtccagtgttctgatttgggtctggacaaagtgccaaaggatcttccccctgacacaactctgctagacctgcaaaacaacaaaataaccgaaatcaaagatggagactttaagaacctgaagaaccttcacgttgtctaccttcataacaacaatatctctgtagttggatcaagtgacttctgcccacctggacacaacaccaaaaaggcttcttattcgggtgtgagtcttttcagcaacccggtccagtactgggagatacagccatccaccttcagatgtgtctacgtgcgctctgccattcaactcggaaactataagtaa

SEQ ID NO: 4719 - DNA, 639 bp, Homo sapiens
atgaaggccactatcatcctccttctgcttgcacaagtttcctgggctggaccgtttcaacagagaggcttatttgactttatgctagaagatgaggcttctgggataggcccagaagttcctgatgaccgcgacttcgagccctccctaggcccagtgtgccccttccgctgtcaatgccatcttcgagtggtccagtgttctgatttgggtcttcctccttcccttacggaattacatcttgatggcaacaaaatcagcagagttgatgcagctagcctgaaaggactgaataatttggctaagttgggattgagtttcaacagcatctctgctgttgacaatggctctctggccaacacgcctcatctgagggagcttcacttggacaacaacaagcttaccagagtacctggtgggctggcagagcataagtacatccaggttgtctaccttcataacaacaatatctctgtagttggatcaagtgacttctgcccacctggacacaacaccaaaaaggcttcttattcgggtgtgagtcttttcagcaacccggtccagtactgggagatacagccatccaccttcagatgtgtctacgtgcgctctgccattcaactcggaaactataagtaa

SEQ ID NO: 4720 - DNA, 753 bp, Homo sapiens
atgaaggccactatcatcctccttctgcttgcacaagtttcctgggctggaccgtttcaacagagaggcttatttgactttatgctagaagatgaggcttctgggataggcccagaagttcctgatgaccgcgacttcgagccctccctaggcccagtgtgccccttccgctgtcaatgccatcttcgagtggtccagtgttctgatttggaactgggcaccaatccgctgaagagctcaggaattgaaaatggggctttccagggaatgaagaagctctcctacatccgcattgctgataccaatatcaccagcattcctcaaggtcttcctccttcccttacggaattacatcttgatggcaacaaaatcagcagagttgatgcagctagcctgaaaggactgaataatttggctaagttgggattgagtttcaacagcatctctgctgttgacaatggctctctggccaacacgcctcatctgagggagcttcacttggacaacaacaagcttaccagagtacctggtgggctggcagagcataagtacatccaggttgtctaccttcataacaacaatatctctgtagttggatcaagtgacttctgcccacctggacacaacaccaaaaaggcttcttattcgggtgtgagtcttttcagcaacccggtccagtactgggagatacagccatccaccttcagatgtgtctacgtgcgctctgccattcaactcggaaactataagtaa

SEQ ID NO: 4721 - DNA, 2252 bp, Homo sapiens
caagaccagccgggccaacatggtgaaaccccatctctacaaacaatacaaaaattagccgggcgtggtggtgcgtgcctgtagttccagctactcgggaggctgagggcccagatattacactgtcaaaactttacaagttaattgaagagtcttgtccacagctggcaaattcagtgcagatcagaatcaaactgatggctgaaggcgagttgaaggatatggaacagttttttgatgacctttcagattctttctctggaactgaaccagaggttcacaaaacaagtgtagtaggtttgtttctgcgtcacatgatcttggcctacagtaagctttctttcagccaagtgtttaaactgtacactgcccttcagcagtacttccagaatggtgagaaaaagacagtggaggatgctgatatggaactgaccagtagagatgagggtgaaagaaaaatggaaaaagaagaacttgatgtatctgtaagagaagaggaggtatcttgcagtgggcctctgtcccaaaaacaagcagaattttttctttctcaacaggcttctttgctaaagaatgatgagactaaggccctcactccagcttccttgcagaaggaattaaacaatttgttgaaatttaatcctgattttgctgaagcgcattatctcagctacttaaacaacctccgtgtccaagatgttttcagttcaacacacagtctcctccattattttgatcgtctgattcttaccggagccgaaagcaaaagtaatggggaagagggctatggccggagcttgagatacgccgctctgaatcttgccgccctgcactgccgcttcggtcactagtcaacaggcagagctcgccctgcaggaggcaattaggattgcccaggagtccaacgatcacgtgtgtctccagcactgtttgagctggctttatgtgctggggcagaagagatccgatagctatgttctgctggagcattctgtgaagaaggcagtacattttgggttaccgagagcttttgctgggaagacggcaaacaagctgatggatgccctaaaggactccgacctcctgcactggaaacacagcctgtcagagctcatcgatatcagcatcgcacagaaaacggccatctggaggctgtatggccgcagcaccatggcactgcaacaggcccagatgttgctgagcatgaacagcctggaggcggtgaatgcgggcgtgcagcagaacaacacagagtcctttgctgtcgcactctgccacctcgcagagctacacgcggagcagggctgttttgctgcagcttctgaagtgttaaagcacttgaaggaacgatttccgcctaatagtcagcacgcccagttatggatgctatgtgatcaaaaaatacagtttgacagagcaatgaatgatggcaaatatcatttggctgattcacttgttacaggaatcacagctctcaatagcatagagggtgtttataggaaagcggttgtattacaagctcagaaccaaatgtcagaggcacataagcttttacaaaaattgttggttcattgtcagaaactgaagaacacagaaatggtgatcagtgtcctactgtccgtggcagagctgtactggcgatcttcctcccctaccatcgcgctgcccatgctcctgcaggctctggccctctccaaggagtaccggttacagtacttggcctctgaaacagtgctgaacttggcttttgcgcagctcattcttggaatcccagaacaggccttaagtcttctccacatggccatcgagcccatcttggctgacggggctatcctggacaaaggtcgtgccatgttcttagtggccaagtgccaggtggcttcagcagcttcctacgatcagccgaagaaagcagaagctctggaggctgccatcgagaacctcaatgaagccaagaactattttgcaaaggttgactgcaaagagcgcatcagggacgtcgtttacttccaggccagactctaccataccctggggaagacccaggagaggaaccggtgtgcgatgctcttccggcagctgcatcaggagctgccctctcatggggtacccttgataaaccatctctagagaggacatccctgctgggctgctgtgcagagtataagattttggacttgttcatgtcccctctctccctataaatgatgtatttgtgacaccctatcttgtcaataaacagcattctgatt

SEQ ID NO: 4722 - DNA, 1630 bp, Homo sapiens
actgctctgccggccactcctgcatctttaccgtctcagggacttccagttgctgccccttcccagaggccgtggcatgcggggatggccatcactgctgcccacggggcttccactgcagtgcagacgggcgatcctgcttccaaagatcaggtaacaactccgtgggtgccatccagtgccctgatagtcagttcgaatgcccggacttctccacgtgctgtgttatggtcgatggctcctgggggtgctgccccatgccccaggcttcctgctgtgaagacagggtgcactgctgtgtgtgacctgatccagagtaagtgcctctccaaggagaacgctaccacggacctcctcactaagctgcctgcgcacacagtgggggatgtgaaatgtgacatggaggtgagctgcccagatggctatacctgctgccgtctacagtcgggggcctggggctgctgcccttttacccaggctgtgtgctgtgaggaccacatacactgctgtcccgcggggtttacgtgtgacacgcagaagggtacctgtgaacaggggccccaccaggtgccctggatggagaaggccccagctcacctcagcctgccagacccacaagccttgaagagagatgtcccctgtgataatgtcagcagctgtccctcctccgatacctgctgccaactcacgtctggggagtggggctgctgtccaatcccagaggctgtctgctgctcggaccaccagcactgctgcccccagggctacacgtgtgtagctgaggggcagtgtcagcgaggaagcgagatcgtggctggactggagaagatgcctgcccgccgggcttccttatcccaccccagagacatcggctgtgaccagcacaccagctgcccggtggggcagacctgctgcccgagcctgggtgggagctgggcctgctgccagttgccccatgctgtgtgctgcgaggatcgccagcactgctgcccggctggctacacctgcaacgtgaaggctcgatcctgcgagaaggaagtggtctctgcccagcctgccaccttcctggcccgtagccctcacgtgggtgtgaaggacgtggagtgtggggaaggacacttctgccatgataaccagacctgctgccgagacaaccgacagggctgggcctgctgtccctaccgccagggcgtctgttgtgctgatcggcgccactgctgtcctgctggcttccgctgcgcagccaggggtaccaagtgtttgcgcagggaggccccgcgctgggacgcccctttgagggacccagccttgagacagctgctgtgagggacagtactgaagactctgcagccctcgggaccccactcggagggtgccctctgctcaggcctccctagcacctccccctaaccaaattctccctggaccccattctgagctccccatcaccatgggaggtggggcctcaatctaaggccttccctgtcagaagggggttgtggcaaaagccacattacaagctgccatcccctccccgtttcagtggaccctgtggccaggtgcttttccctatccacaggggtgtttgtgtgtgtgcgcgtgtgcgtttcaataaagtttgtacactttc

SEQ ID NO: 4723 - DNA, 1843 bp, Homo sapiens
ggggcgagaggaagcagggaggagagtgatttgagtagaaaagaaacacagcattccaggctggccccacctctatattgataagtagccaatgggagcgggtagccctgatccctggccaatggaaactgaggtaggcgggtcatcgcgctggggtctgtagtctgagcgctacccggttgctgctgcccaaggaccgcggagtcggacgcaggcagaccatgtggaccctggtgagctgggtggccttaacagcagggctggtggctggaacgcggtgcccagatggtcagttctgccctgtggcctgctgcctggaccccggaggagccagctacagctgctgccgtccccttctgggacaaatggcccacaacactgagcaggcatctgggtggcccctgccaggttgatgcccactgctctgccggccactcctgcatctttaccgtctcagggacttccagttgctgccccttcccagaggccgtggcatgcggggatggccatcactgctgcccacggggcttccactgcagtgcagacgggcgatcctgcttccaaagatcaggtaacaactccgtgggtgccatccagtgccctgatagtcagttcgaatgcccggacttctccacgtgctgtgttatggtcgatggctcctgggggtgctgccccatgccccaggcttcctgctgtgaagacagggtgcactgctgtccgcacggtgccttctgcgacctggttcacacccgctgcatcacacccacgggcacccaccccctggcaaagaagctccctgcccagaggactaacagggcagtggccttgtccagctcggtcatgtgtccggacgcacggtcccggtgccctgatggttctacctgctgtgagctgcccagtgggaagtatggctgctgcccaatgcccaacgccacctgctgctccgatcacctgcactgctgcccccaagacactgtgtgtgacctgatccagagtaagtgcctctccaaggagaacgctaccacggacctcctcactaagctgcctgcgcacacagtgggggatgtgaaatgtgacatggaggtgagctgcccagatggctatacctgctgccgtctacagtcgggggcctggggctgctgcccttttacccaggctgtgtgctgtgaggaccacatacactgctgtcccgcggggtttacgtgtgacacgcagaagggtacctgtgaacaggggccccaccaggtgccctggatggagaaggccccagctcacctcagcctgccagacccacaagccttgaagagagatgtcccctgtgataatgtcagcagctgtccctcctccgatacctgctgccgagacaaccgacagggctgggcctgctgtccctaccgccagggcgtctgttgtgctgatcggcgccactgctgtcctgctggcttccgctgcgcagccaggggtaccaagtgtttgcgcagggaggccccgcgctgggacgcccctttgagggacccagccttgagacagctgctgtgagggacagtactgaagactctgcagccctcgggaccccactcggagggtgccctctgctcaggcctccctagcacctccccctaaccaaattctccctggaccccattctgagctccccatcaccatgggaggtggggcctcaatctaaggccttccctgtcagaagggggttgtggcaaaagccacattacaagctgccatcccctccccgtttcagtggaccctgtggccaggtgcttttccctatccacaggggtgtttgtgtgtgtgcgcgtgtgcgtttcaataaagtttgtacactttc

SEQ ID NO: 4724 - DNA, 1505 bp, Homo sapiens
attaagcaattgcaatttgcagtgtgccaggcactgtgccaagtattttgcttcgatgatttcacgtcatcttcaaaacaacctcatgagggctgggtcagttagaacctaaacaaactagagacctggttgcaacccctcaggctctgctgatgctgtccccctttgttcctgcagcgtggaccctgccagcagccaggccatggagctctctgatgtcaccctcattgagggtgtgggtaatgaggtgatggtggtggcaggtgtggtggtgctgattctagccttggtcctagcttggctctctacctacgtagcagacagcggtagcaaccagctcctgggcgctattgtgtcagcaggcgacacatccgtcctccacctggggcatgtggaccacctggtggcaggccaaggcaaccccgagccaactgaactcccccatccatcagagggtaatgatgagaaggctgaagaggcgggtgaaggtcggggagactccactggggaggctggagctgggggtggtgttgagcccagccttgagcatctccttgacatccaaggcctgcccaaaagacaagcaggtgcaggcagcagcagtccagaggcccccctgagatctgaggatagcacctgcctccctcccagccctggcctcatcactgtgcggctcaaattcctcaatgataccgaggagctggctgtggctaggccagaggataccgtgggtgccctgaagaggtgagtggcctgggaagtgggaagctgcttgtgctcatcccccagcccttggttgcctctaaggaggctggtgcagacatgggagctgcagcaaagtgtaagatccagcccctaccaagggcaggtagatactttcttagaaatacacccttcaggccgggtgcagtggctcccgggactttgggaggccgaggcgggtgcatcacgaggttaggagttcgagaccagcctgaccaacatggtgaaaccccatctctactaaacatacaaaaatcagccgggcgtggtggcgcacgcctgcaatcccagctactcaggaggctgaggcaggagaatcgcttgaacccaggaggtggaggttgcagtgagccgagattgcgccactgcactccagcctgggcgacagagtgagactccatctaaaaaaacaaaacaaacaaatacacccctcattagttaaggataaagatgaggggggcctgtcgcggtggctcacgcctgtaatcccagcactttgggaggccaaggcgggcagatcacaaggtcaagatatcaagaccatcctggccagcatggtgaaaccctgtctctactaaaaaaaaaaatacaaaaattagctgggcatggtggcgcactcctgtagtcccagctactcgggagggtgaggcaggagaattgcttgaacccgggaggcagaggttgcagtgagccgagatcgcgccactgcactccagcctggcaacagagtgagactccgtctc

SEQ ID NO: 4725 - DNA, 1839 bp, Homo sapiens
tttaggtttaggttggggtgccggaattaggaaggtttgtgcccccttctacacaacactgaactccttttttttttttttcagggctgggtcagttagaacctaaacaaactagagacctggttgcaacccctcaggctctgctgatgctgtccccctttgttcctgcagcgtggaccctgccagcagccaggccatggagctctctgatgtcaccctcattgagggtgtgggtaatgaggtgatggtggtggcaggtgtggtggtgctgattctagccttggtcctagcttggctctctacctacgtagcagacagcggtagcaaccagctcctgggcgctattgtgtcagcaggcgacacatccgtcctccacctggggcatgtggaccacctggtggcaggccaaggcaaccccgagccaactgaactcccccatccatcagaggacaagcaggtgcaggcagcagcagtccagaggcccccctgagatctgaggatagcacctgcctccctcccagccctggcctcatcactgtgcggctcaaattcctcaatgataccgaggagctggctgtggctaggccagaggataccgtgggtgccctgaagagcaaatacttccctggacaagaaagccagatgaaactgatctaccagggccgcctgctacaagacccagcccgcacactgcgttctctgaacattaccgacaactgtgtgattcactgccaccgctcacccccagggtcagctgttccaggcccctcagcctccttggccccctcggccactgagccacccagccttggtgtcaatgtgggcagcctcatggtgcctgtctttgtggtgctgttgggtgtggtctggtacttccgaatcaattaccgccaattcttcacagcacctgccactgtctccctggtgggagtcaccgtcttcttcagcttcctagtatttgggatgtatggacgataaggacataggaagaaaatgaaaggcatggtctttctcctttacggcctccccacttttcctggccagagctgggcccaagggccggggagggaggggtggaaaggatgtgatggaaatctcctccataggacacaggaggcaagtatgcggcctccccttctcatccacaggagtacagatgtccctcccgtgcgagcacaactcaggtagaaatgaggatgtcatcttccttcacttttagggtcctctgaaggagttcaaagctgctggccaagctcagtggggagcctgggctctgagattccctcccacctgtggttctgactcttcccagtgtcctgcatgtctgcccccagcacccagggctgcctgcaagggcagctcagcatggccccagcacaactccgtagggagcctggagtatccttccatttctcagccaaatactcatcttttgagactgaaatcacactggcgggaatgaagattgtgccagccttctcttatgggcacctagccgccttcaccttcttcctctaccccttagcaggaatagggtgtcctcccttctttcaaagcactttgcttgcattttattttatttttttaagagtccttcatagagctcagtcaggaaggggatggggcaccaagccaagcccccagcattgggagcggccaggccacagctgctgctcccgtagtcctcaggctgtaagcaagagacagcactggcccttggccagcgtcctaccctgcccaactccaaggactgggtatggattgctgggccctaggctcttgcttctggggctattggagggtcagtgtctgtgactgaataaagttccattttgtggt

SEQ ID NO: 4726 - DNA, 1568 bp, Homo sapiens
ggaaagacgagtccaggggccgtcctggcgaggtcaaaacatttagtctggtcttttcagcgtggaccctgccagcagccaggccatggagctctctgatgtcaccctcattgagggtgtgggtaatgaggtgatggtggtggcaggtgtggtggtgctgattctagccttggtcctagcttggctctctacctacgtagcagacagcggtagcaaccagctcctgggcgctattgtgtcagcaggcgacacatccgtcctccacctggggcatgtggaccacctggtggcaggccaaggcaaccccgagccaactgaactcccccatccatcagaggcaaatacttccctggacaagaaagccagatgaaactgatctaccagggccgcctgctacaagacccagcccgcacactgcgttctctgaacattaccgacaactgtgtgattcactgccaccgctcacccccagggtcagctgttccaggcccctcagcctccttggccccctcggccactgagccacccagccttggtgtcaatgtgggcagcctcatggtgcctgtctttgtggtgctgttgggtgtggtctggtacttccgaatcaattaccgccaattcttcacagcacctgccactgtctccctggtgggagtcaccgtcttcttcagcttcctagtatttgggatgtatggacgataaggacataggaagaaaatgaaaggcatggtctttctcctttacggcctccccacttttcctggccagagctgggcccaagggccggggagggaggggtggaaaggatgtgatggaaatctcctccataggacacaggaggcaagtatgcggcctccccttctcatccacaggagtacagatgtccctcccgtgcgagcacaactcaggtagaaatgaggatgtcatcttccttcacttttagggtcctctgaaggagttcaaagctgctggccaagctcagtggggagcctgggctctgagattccctcccacctgtggttctgactcttcccagtgtcctgcatgtctgcccccagcacccagggctgcctgcaagggcagctcagcatggccccagcacaactccgtagggagcctggagtatccttccatttctcagccaaatactcatcttttgagactgaaatcacactggcgggaatgaagattgtgccagccttctcttatgggcacctagccgccttcaccttcttcctctaccccttagcaggaatagggtgtcctcccttctttcaaagcactttgcttgcattttattttatttttttaagagtccttcatagagctcagtcaggaaggggatggggcaccaagccaagcccccagcattgggagcggccaggccacagctgctgctcccgtagtcctcaggctgtaagcaagagacagcactggcccttggccagcgtcctaccctgcccaactccaaggactgggtatggattgctgggccctaggctcttgcttctggggctattggagggtcagtgtctgtgactgaataaagttccattttgtggtcctgc

SEQ ID NO: 4727 - DNA, 4248 bp, Homo sapiens
gggaaagcgaggagccgcggcggcgtggagccggcgggcccgggcgggggctccccggagccctaccaccccaccctgggcatctacgcccgctgcatccggaacccaggggtgcagcacttccagcgggacacgctgtgcgggccctacgccgagagcttcggcgagatcgccagcggcttctggcaggccacagctattttcctggctgtgggaatctttattctctgcatggtggccttggtgtccgtcttcaccatgtgtgtacagagcatcatgaagaaaagcatcttcaatgtctgtgggctgttgcaaggaattgcaggtctattccttatcctcggtttgatactctaccctgctggctggggttgccagaaggccatagactactgtggacattatgcatctgcctacaaacctggagactgctccttgggctgggccttttataccgccattgggggcacagtcctcactttcatctgtgctgtcttctctgcacaagcagaaattgcaacctctagtgacaaagtacaggaagaaattgaagaggggaaaaatctgatctgcctcctttagtttggaagagacaatgccattttctcccttgagtaatcttgtgaaacagtccacagtttcatcatttgagtcaagtggagaactaacctttacctaccaaagccacgttccacggcccgaggcttaaacaggaccaatgagaggccacatccagctacgcaaagttactggacatgcggtctgcagtgcacattataaggaatggaacatgaaaatagtatataatcctagacctggagttgccaagttctgtcagactccatctcccccaggttcaatgaaggataataatctaaatcattagggcagcagtttctctggtaacggaagagaccgtccgccagatctgcaggctgtttctgctccaacactgcttgcttgtgagcatctctgcctcagaatggggttttgggttggagttcttgttttcctctgttctttcaagttgtctccaacgaacagaaaactataaacttactggggacaggatgtgtgctaaagggcacagcaagacactgtcttttgcttagctgaccaaaggggtcagcagggatggcgtggagtcatgctgtggaacttattctaggctgaatcctagggtaaggtggatcaactgaactgtcactccagagattttagaaatttgagtaaagaaacaataaggacctatacaatcatatgagaacaaaaatatgaaatcttgctagtgaagacgtattttttcttcttcccagcagccaggctagcaccagttctggcccagtctcctcttcttctggagatcacatgtttttcttctaaggttaggattgtgctttgactgcgaaaggaaacctcactgtttcctccttccagggactgaggtctccaagctagctgtggcttatgcagatgttcactgggaggacctgccagaatctcggcacttggggggagacctttactcccagtttggtgaccatgctgtagtcagctctatttccaatcccgacagtagcagaatggcattctacaacaaaaagaagctagttatgggagttaagtttttgtagttactggtgttgatcctgaaagcagactgagataacattaaattgctgcaactgaagaactgcagccaagaccttaattccaggaaagcacagaggacaaagttaattcaaaaagaggcgctagatcaaggtcacagcactgcctacacctgtttacaaaaagaatcaaataccactatgaataaggattcaggggtttttaatctactttccataaattaccaatatcactgattcaggaagatagtatctcagaatgaccagagcagcacagaaacaagctactctgacattatgggagcttcaaaattgtatcatgatacagaaacactccttagcactttaagaaagtgagatggaactgccagatttctggaaggagaaaaagtgtaggtatttgggttcattaatctgctcacttgaggactttgttttgaaaaagtaccttctgtggacaaggtattgtgctaccagctatacaaccctgacttcagagtttgcaaccttgccctgagtgaatcatgttaaagctgtctgagtctaaagcaccgtatcttggtgcagaacagataattatacagagatggaatgggacaaccgcagttttactacattctggtgtttggcctatatgagaaaccatcttctcacagattaagggctaagggcaaaaggggtgggaggtgtggaactagccttaatgagtttcccattcctgaaccaaaattcaaagtgagtgagatgtaaatcctgtgattttggtgaagaaaaaaacgggtatcttcatagcagcctaggaaaccttaaccatatctctaacaccacacagaaagaggctggaggagccactggacaaagcttctgtctctgtgtgtacatttataatgttctaaccaagtctcaaaccttgatgaaaaacacaaaatttttccataaacttatcagaagactcacttttctttctttcttggatagagaaaccattttctgacactaggtttacaatctcagtgtccttacaagttaagtcctaagctcacaggatcctccgagcatgtccatcacctgctctttggctaaggtggcagtgtacctctagatcaacctgggaacagtcacaagggagtgtgacttcttggccataataaactcactcgatagtgtttatgttattaatctgaatgcaacagaagacaaaagcacaggcatgcacacacacagaaccccaaaccactaaaaactacctaaacactgacttagtaaatagtaaaaaggtaatgttgggacttttaaaccttgaatccattagccaggcttgggatgaaaggaccatctaaaatcatgctagtctaaaccatgctcttccacacagctgtttaaaaaccactgggtatgaggaatatgctagaaagaaatgttaaaaatagattgttggctcacacttatttttctaataaataggaccattattactaccaggaaagtcttatttattttgcctgaaattggcttaaagaaagtctcatgacgggatgggatgggctgcgcttctcaatgaactctgaggcagaaatatttgccttggattctgtggattctttaaacctgtgtgctaataattcaaacaatgttgcattaattgtataagggtttttgtatagttttcaaacatctgtggtgtaatgatctttgttaaacatatattctgtaaagtgccatagtctttttttatgtgtagcatatttaaaaatatatatgtatattatacatacacaagtttgtgtgaaagatgtgcaataacaaaggtgtatgtatgttttgttgttttgttttggaaactggacaggagtcaaaacagggatgtttgtttctgttttggcaaggagagttccacatttttgccttcatggcttattcagtaacccataattttaatgctacacaaatcttatgtgaagaaaagactggtatgaaatcattttttcctgggtctaaaataatcgctagtgttatgtcaaagttaagcccgcacgccaggcccagttaatgctagtctttcatgtgaaatgtgaagctgccatgttgccttttctcttagtaggataactagtagctggtacataatcactgaggagctatttcttaacatgcttttatagaccatgctaatgctagaccagtatttaagggctaatctcacacctccttagctgtaagagtctggcttagaacagacctctctgtgcaataacttgtggccactggaaatccctgggccggcatttgtattggggttgcaatgactcccaagggccaaaagagttaaaggcacgactgggatttcttctgagactgtggtgaaactccttccaaggctgagggggtcagtaggtgctctggagggactcggcaccacttgatattcaacagccacttgagccaaatataaaattgtatttacagctgatggactcaatttgagccttcaaacttgtagttatcctattatattgtaaactaatacattgtctagcattgatttggttcctgtgcatatgtattttcactatgtgctcccctccccagatcttaattaaaccagattttgcaattc

SEQ ID NO: 4728 - DNA, 2360 bp, Homo sapiens
tccaacatcaagtaatgatgacagtaaatctaatttgaatacatctggcaagacaacttcaagtacagatggacccaaattccctggagataaaagttcaacaacacaaaataataaccagcagaaaaaagggatccaggtgttacctgatggtcgggttactaacattcctcaagggatggtgacggaccaatttggaatgattggcctgttaacatttatcagggcagcagagacagacccaggaatggtacatcttgcattaggaagtgacttaacaacattaggcctcaatctgaactctcctgaaaatctctaccccaaatttgcgtcaccctgggcatcttcaccttgtcgacctcaagacatagacttccatgttccatctgagtacttaacgaacattcacattagggataagctggctgcaataaaacttggccgatatggtgaagaccttctcttctatctctattacatgaatggaggagacgtattacaacttttagctgcagtggagctgtatgttcaaagtattttaatcacttttgtattatagtggatcttgactatgctgaaaacatctttaagtgatgatggctatctttaaatggaactatttctccatcaagaaatttatttttacattattaaagtgaatttaatttagattaaaaccgtatcttaaccatggcttcataatctatatacctaaaaagaatttcaaacttaatgctgaagctgggtgcagtggctcacacttgtaatcccagcactttggtgaggtggacagatcacttgaggccagaagttagggacagcctgggcaacacagcaaaccacatttctacaaaaaataaaggaaaatattagctaggtgtggtggcacacatctatatagtcctagctacttgggaggctacagcaggaggatcgcttgagcccaggagtttgaggtgtcagtgagctatgattgtgccattgcactctagtgtggctgacagtgcaagaccctgtctctaaaaataactaataagtgccaaatttgtaagaagacagaattgacataactcatggatttggtgaatctaatttttgtaaatatgtgaattatatgatattcatgactatgttttttattccttgtggaaccatatgtataaataattcgatactgaatttaatcatttcataaacattattacttataagcaaggcagtgtgcatatttgttgtacgttttgaagtgctgattaaagtccacattttcattatcagcagtctattggccagtttaaacaaatattaatgtaaagaaattggttcattgatattttttccctgagcagttctgtatttacctgatgctctaaaattaagttttctgtcgttactcaaatgtacagttggcaacacattttgttatcaatagacaattatgtttactatagagtaaactattagtaattatttatgaccttatgattgggagaccttttcacaaatttaagtatttcataacatttctaataacatttctataaatggctttggatcaaatagtttaaagtatataattcagtatgttgataatgaattgtttcgtttcatttcacaactgagaggatttttcccttatgtttttccttcatttttgtgagaatagagattattacctgttgttccttttaattgttcataagtaaataaatacattcaggcactcattcatctatcactggcagttctgttttcatattttatttatgtcttaaaaactacctcatgacgttggtaggaaagcatttctttacatggaggtttattttgtgggacattacctcctctggatgttacttcctcagtttacaagtagtgtaaattctcattgattcttttatgaattgtaatggattttctcttagcttttgagaatttagaatctgaaatttgaataaaaagtaaatatattcagtataatttttcaaaatgctctagtttcaagatagttaaaaaattatgtggaatttacataattaattcaaatatagtttgtatttagttccttatcaaataatgcaaatagttggagatacctcaatttcttttgagtgttaagaagagcaagaaaggagtgaagtttttgcaacacattgtgtctttatttggtctgcctatgtttttatcacattgcttataaaacttttaaaatccttgtttgtataaaaagtttctttagttaaataaaagtgtgtgtattaattagtgtgccttctggacaaattaagaaatattttttctatatttcaatgcggttgtatttaataacttataataaatgagtaggaagcattcatatt

SEQ ID NO: 4729 - DNA, 4352 bp, Homo sapiens
agagaactagaaagagagcgtgctagggaacgggagagagaaagagaaaaagagagagatcgtgaaagggatagagaccgagaccacgatcgagagcgggaaagagagagggaacgagacagggaaaaagaacgggaacgagaaagagaagagagagagagggagagagagcgagaacgggagagagagcgagagcgagaacgggaacgagaaagagcgagagaaagggataaagaacgagaacgccaaagggattgggaagacaaagacaaaggacgagatgaccgcagagaaaagcgagaagagatccgagaagataggaatccaagagatggacatgatgaaagaaaatcaaagaagcgctatagaaatgaagggagtcccagccctagacagtccccgaagcgccggcgtgaacattctccggacagtgatgcctacaacagtggagatgataaaaatgaaaaacacagactcttgagccaagttgtacgacctcaagaatctcgttctcttagtccctcgcacctcacagaagacagacagggtagatggaaagaggaggatcgtaaaccagaaaggaaagagagttcaaggcgctacgaagaacaggaactcaaggagaaagtttcttctgtagataaacagagagaacagacagaaatcctggaaagctcaagaatgcgtgcacaggacattataggacaccaccagtctgaagatcgagagacatctgatcgagctcatgatgaaaacaagaagaaagcaaaaattcaaaagaaaccaattaagaaaaagaaagaggatgatgttggaatagagaggggtaacatagagacaacatctgaagatggtcaagtattttcaccaaaaaaaggacagaaaaagaaaagcattgaaaaaaaacgtaaaaaatccaaaggtgattctgatatttctgatgaagaagcagcccagcaaagtaagaagaaaagaggcccacggactccccctataacaactaaagaggaattggttgaaatgtgcaatggtaagaatggtattctagaggactcccagaaaaaagaagatacagcattcagtgactggtctgatgaggatgtccctgaccgtacagaggtgacagaagcagagcatactgccaccgccacgactcctggtagtaccccttctcctctatcttctcttcttcctcctccaccgcctgtggctactgccactgctacaactgtgcctgcaactcttgctgccactactgctgctgccgccacctctttcagcacatctgccatcactatttccacctctgccacccccaccaataccaccaataatacttttgccaatgaagactcacacagaaaatgccacagaacacgagtagaaaaagtagagacgcctcacgtgactatagaagatgcacagcatcgcaagcctatggatcaaaagaggagcagcagcctcgggagcaatcggagtaaccgtagtcatacgtctggtcgtcttcgctccccatccaatgattcagcccatcgaagtggagatgaccaaagtggtcgaaagagagtactgcacagtggctcaagagatagagaaaaaacaaaaagcctggaaatcacaggagagagaaaatctaggattgatcagttaaagcgtggagaacccagtcgaagtacttcttcagatcgccaggattcaagaagccatagttcaagaagaagttctccagagtcagatcgacaggtccattcaagatctgggtcatttgatagcagagacaggcttcaagaacgagatcgatatgaacacgacagagagcgcgagagagagaggagagatacgaggcagagagaatgggaccgagatgctgataaagattggccacgcaacagggatcgagatagattgcgagaacgagaacgagagagagaacgagacaaaaggagagacttggatagggaaagagagagactaatttctgattctgttgaaagggacagggacagagacagagacagaacttttgagagttctcaaatagagtctgtgaaacgctgtgaagcaaaactggaaggtgaacatgaaagggatctagaaagcacttcccgagactctctagccttggataaagagagaatggataaagatctgggatctgtgcagggatttgaagaaacaaataaatccgagagaactgagagtctggaaggagatgacgagtccaagttagatgatgcacattcattaggctctggtgctggagaaggatacgagccaatcagtgatgacgaactagatgaaattctggcaggtgatgcagaaaagagggaggaccaacaggatgaggagaagatgccagatcccttagatgtgatagatgtggattggtctggtcttatgccaaagcatccaaaagaaccacgagagcctggggctgcactcttaaaattcacacctggagctgttatgctaagagttgggatttctaaaaagttggcaggttctgaactctttgccaaagtcaaagaaacatgtcagagacttttagaaaaacccaaagatgcagacaatctctttgaacatgaattgggggctctcaatatggctgcattactacgaaaagaagaaagagcaagtcttcttagtaatcttggcccatgttgtaaggcgttgtgcttcagacgggattctgcaattcgaaagcagcttgttaaaaatgagaagggcaccataaaacaagcttacacgagtgctccaatggtagacaatgaattacttcgattgagtcttcggttatttaagcggaagactacttgccatgctccaggacatgaaaagactgaagataataaactttcacagtccagtatccaacaggaactgtgtgtgtcttaagaccgaagttcaatatggtatttttggtactgtcttccttcagcagtgcatattcttttgcaaagttctttggtttgacaagcattagtgacaaaggcagaaaagatttatcagccatgctaaaagagtgaagaattttgatctttagagacactagttttggccaacttaagattttacgttaatttttacatagtatttgacactcatgcaaaataatgtgaaaacatctagatttagtagtttattctgcgccttttgttaaaactgaagattttggaaaatggttgtcactgctcttccagcctatgaatatttttgtgaaatggaaccatggatttatgtctggatcatccatacagaaccaacaattttattcaaaaacaatgtgttcatcaaagtaattgctcacattgtgcagtactatgttgtacagaccacgtgaaagggaatgctggtctagctggcgtggtatgtttataggcgaatttcagcagaaggaagccaaaatagttttttccttttgaaagttttttaaaaattatttcatgggtcttttttttaattaatatgtgtgcattgttacaatgtatgttggatgtcttttgaccctaaatgctttttttgttatcagagattgtgtactatttttatttttaataaatgtatcttccctttccttgttttagatttactttgctcttcgttaatcttattcctgatgatctagaacattagtcatcaacattacatgtttcatgcttcagatattttactgcttgtgtccttattgttggacagctttaaacagagttgatgtacttcaaatatagctcattgatacttaaggcatcttcttggaatgtggcttttgaagaaaaaaattactcaaagcaaatcaagagttaacaaacctaacgtaacctgaggtttaatattctactatcatattttttagagctataacttttgattatattaaactgcctccagctgtactatgtaaaacagatttacttttaaaaattacagtatacctgctttgttctatatgtatatgtttaactcatgaagtggactcttagaaggatttgaaatggactctggccacagaatttgtgagcagacagtagtagtgataataataaaagaaggcaatcaaaatttaattttatcatgccctctcacaggtttgtgttataattgtaagcccatattacttgtgttagtagttttgtctctataggtaacataatgacagtggtgtaaagtttctgttcaagaaacatatgttgtaaagttactttatacaagatacctgccaaaggaaatggtcttactttcaaatgactttgaaagcatgtataattgcaaacagagcaggagaagactttaatcagaatttccttgtgtccttttcctttactaagtgttttgaataaagaaaaaaaaaatgt

SEQ ID NO: 4730 - DNA, 1945 bp, Homo sapiens
ataagaggcgtcattggcgcccgagctgtgaccgccgccactggggcagccagcacaatcgggcggaggtggcgctgccccttcagacctgaaagatgtctgaaaattccagtgacagtgattcatcttgtggttggactgtcatcagtcatgaggggtcagatatagaaatgttgaattctgtgacccccactgacagctgtgagcccgccccagaatgttcatctttagagcaagaggagcttcaagcattgcagatagagcaaggagaaagcagccaaaatggcacagtgcttatggaagaaactgcttatccagctttggaggaaaccagctcaacaattgaggcagaggaacaaaagatacccgaagacagtatctatattggaactgccagtgatgattctgatattgttacccttgagccacctaagttagaagaaattggaaatcaagaagttgtcattgttgaagaagcacagagttcagaagactttaacatgggctcttcctctagcagccagtatactttctgtcagccagaaactgtattttcatctcagcctagtgacgatgaatcaagtagtgatgaaaccagtaatcagcccagtcctgcctttagacgacgccgtgctaggaagaagaccgtttctgcttcagaatctgaagaccggctagttgctgaacaagaaactgaaccttctaaggagttgagtaaacgtcagttcagtagtggtctcaataagtgtgttatacttgctttggtgattgcaatcagcatgggatttggccatttctatggcacaattcagattcagaagcgtcaacagttagtcagaaagatacatgaagatgaattgaatgatatgaaggattatctttcccagtgtcaacaggaacaagaatcttttatagattataagtcattgaaagaaaatcttgcaaggtgttggacacttactgaagcagagaagatgtcctttgaaactcagaaaacgaaccttgctacagaaaatcagtatttaagaaagctcttcactgactttgttaatgatgttaaagattatcttagaaacatgaaggaatatgaagtagataatgatggagtatttgagaagttggatgaatatatatatagacacttctttggtcacactttttcccctccatatggacccagtcgacctgataaaaagcaacgtatggtaaatattgaaaactccaggcatcgaaaacaagagcagaagcaccttcagccacagccttataaaagggaaggtaaatggcataaatatggtcgcactaatggaagacaaatggcaaatcttgaaatagaattggggcaattaccttttgatcctcaatactgattcacaattgagttaaattagacaactgtaagagaaaaatttatgctttgtataatgtttggtattgaaactaatgaaattaccaagatgacaatgtcttttcttttgtttctaagtatcagtttgataactttatattattcctcagaagcattagttaaaagtctactaacctgcattttcctgtagtttagcttcgttgaattttttttgacactggaaatgttcaactgtagttttattaaggaagccaggcatgcaacagattttgtgcatgaaatgagacttcctttcagtgtaagagcttaaagcaagctcagtcatacatgacaaagtgtaattaacactgatgtttgtgttaaatttgcagcagagcttgagaaaagtacattgttctggaatttcatcattaacattttataatcttacactcacttcttgtctttttgtgggttcaagagccctctgacttgtgaagaatttgctgccctcttaagagcttgctgacttgttttcttgtgaaattttttgcacatctgaatatcgtggaagaaacaataaaactacaccatgag

SEQ ID NO: 4731 - DNA, 6373 bp, Homo sapiens
cggcctgcgctccacttcgggagtggtagttcttctcttcaccgctgccgggcaggaggcgcaggcgggactacgcgtcacggcatgcactgcggcgcccagccggtcaccgcctgccggctgcagacgcctgcgagcaggttgtttttataagaggcgtcattggcgcccgagctgtgaccgccgccactggggcagccagcacaatcgggcggaggtggcgctgccccttcagacctgaaagatgtctgaaaattccagtgacagtgattcatcttgtggttggactgtcatcagtcatgaggggtcagatatagaaatgttgaattctgtgacccccactgacagctgtgagcccgccccagaatgttcatctttagagcaagaggagcttcaagcattgcagatagagcaaggagaaagcagccaaaatggcacagtgcttatggaagaaactgcttatccagctttggaggaaaccagctcaacaattgaggcagaggaacaaaagatacccgaagacagtatctatattggaactgccagtgatgattctgatattgttacccttgagccacctaagttagaagaaattggaaatcaagaagttgtcattgttgaagaagcacagagttcagaagactttaacatgggctcttcctctagcagccagtatactttctgtcagccagaaactgtattttcatctcagcctagtgacgatgaatcaagtagtgatgaaaccagtaatcagcccagtcctgcctttagacgacgccgtgctaggaagaagaccgtttctgcttcagaatctgaagaccggctagttgctgaacaagaaactgaaccttctaaggagttgagtaaacgtcagttcagtagtggtctcaataagtgtgttatacttgctttggtgattgcaatcagcatgggatttggccatttctatggcacaattcagattcagaagcgtcaacagttagtcagaaagatacatgaagatgaattgaatgatatgaaggattatctttcccagtgtcaacaggaacaagaatcttttatagattataagtcattgaaagaaaatcttgcaaggtgttggacacttactgaagcagagaagatgtcctttgaaactcagaaaacgaaccttgctacagaaaatcagtatttaagagtatccttggagaaggaagaaaaagccttatcctcattacaggaagagttaaacaaactaagagaacagattagaatattggaagataaagggacaagtactgaattagttaaagaaaatcagaaacttaagcagcatttggaagaggaaaagcagaaaaaacacagctttcttagtcaaagggagactctgttgacagaagcaaagatgctaaagagagaactggagagagaacgactagtaactacggctttaaggggggaactccagcagttaagtggtagtcagttacatggcaagtcagattctcccaatgtatatactgaaaaaaaggaaatagcaatcttacgggaaagactcactgagctggaacggaagctaaccttcgaacagcagcgttctgatttgtgggaaagattgtatgttgaggcaaaagatcaaaatggaaaacaaggaacagatggaaaaaagaaagggggcagaggaagccacagggctaaaaataagtcaaaggaaacatttttgggttcagttaaggaaacatttgatgccatgaagaattctaccaaggagtttgtaaggcatcataaagagaaaattaagcaggctaaagaagctgtgaaggaaaatctgaaaaaattctcagattcagttaaatccactttcagacactttaaagataccaccaagaatatctttgatgaaaagggtaataaaagatttggtgctacaaaagaagcagctgaaaaaccaagaacagtttttagtgactatttacatccacagtataaggcacctacagaaaaccatcataatagaggccctactatgcaaaatgatggaaggaaagaaaagccagttcactttaaagaattcagaaaaaatacaaattcaaagaaatgcagtcctgggcatgattgtagagaaaattctcattctttcagaaaggcttgttctggtgtatttgattgtgctcaacaagagtccatgagcctttttaacacagtggtgaatcctataaggatggatgaatttagacagataattcaaaggtacatgttaaaagaactggatactttttgtcactggaacgaacttgatcagttcatcaataagtttttcctaaacggtgtctttatacatgatcagaagctcttcactgactttgttaatgatgttaaagattatcttagaaacatgaaggaatatgaagtagataatgatggagtatttgagaagttggatgaatatatatatagacacttctttggtcacactttttcccctccatatggacccaggtcggtttacataaaaccgtgtcattacagtagtttgtaacatttgtagattggatagcatttttatgatttgatgagtttcttgtaaggttaccgtttctaagagttgtgctttatggccactgagagaattcagaataaattgaaagatggagtctaaaaattattagctgttacaaatggaacatttcattataacgtgatcactttgacttgagcaaatggtttaatttttatcttaaaaatcagttaagaatatataaaatcctactttggccaagtttgtttcttttcattatagtttatatgaaaagatcaccttaagtgaaattattttcctttaatcttttatgtatttattcacttttggaagctaggaatgagcaacacaaattttactctgaagtcagaagagctcatatataataattctaatgtcccacctattttcacttgtccattccatgtaccagcttagttatgatacttagtcacataattatctttgataaaggtagaggcacaaagaggcaaactaagcaagtcaaattctaatgtgtgtacttcataataattttttatccattttcatctttatattctgtaacatgaaacttacctaatcttcaaatgttagcttcattttttacctttgaaatacttaatctttctgaataaatataatgtgtctataaaataatgagactgattctggtgtctttagtcattaagctggtatctagtcctataatgaacaaaggtgaagctgccttgaggagacaagtgaaaaatttttgcttcaaaggagctcacaagctaagtaaataaatgaaattaaggtatggggcatggtggcctcaggctgtctggaggtgtttggaaaggcttcttgagtgaggtggcctttgaactgaacttagtttttaaagtagcttttggaagagaaatgaggatttgctatgcagacagggaagggaatttcacttaaaaggaaggtcatttggagatgtgaagatacactgctttaaggaagcagggtagagctggaggataagagatgcagaccatgaagggccccattttatgctaaaggttttgtcctgtaggacatggagaacttctgaagaattttcaaggcgggtgggataagattatattgtattttagattacagtagtccccccttatcttcaggatatatgttccaagacccccagtggatgctggaaaccagggatagaacataattctatatatactatgcatgaatttctttttccttctttacaatctcacacataggtttgttcttactatagatcttaccaatctcagcatacttttatttctcttgagaaccttcaccctttcacttaaaggaggcgctttatagcttctctttggcatatccaaatgccagcatcactgttgtattttggggtcattattaagttacttaatcatccttaatccttatcttagggatacttgaacacaaacactgtggtaggataacagtatatctgattaacagactgctactaggtgattaatgggtgggtagtgtaaatacacaagaaaaggatgattcacatcccatgtgggatggagcagaactgcattatttcattacattactcagaacaggcatataattgaaaacttatgaattatttttttttaattatttgagatggaatcttgctttgtcagccaggctggagtgcagtgacacgatctcagctcactgcaacctctgtctcctgggttcaggtgattctcctccctagtctcccaagtagctgggactataggcacgtgccaccacacccggctaattttcatatttttagtagagatggggtttcaccatgttggccaggctgttcttgaaatcctgacctcaagtgatccacacatgtctacctcccaaagtgctgggattacagtcgtgagccactgtaccccgcctaaaactgatgaattatttctgaaattttctatttaacattttcagaccacagttgaccacaggtaacggaaacctcaatcacagaaagtaaagccgtggatacggtgggactaatgtattggtagcagcctagaggattgatgggaaaggtatgaagctagaaggtggtcaatataatacagacatgagctgatgaacatctaaactgggactatactagtaggagaggaaaggaaaaaacatttggaaaatagtaacattgatatttcttgtgaaggagaagtagaaagtaacagtgacttctagatttctgggttgggtcatcttgttggatagtagtaccactgagatagggaattcaaggtttggggcaagggtaattggagatgagaattgtgtttggaggtaactactgacattcaagtggagagggttagttggcagttagttctatggtcatctcttttgccgagactgtatatttatcagactcctgggagaacaccaacatccatggggttgtagggaaggctaaggacaggagtggggagtggtaccttgaaaatccaaaagccatctcaagtaaaaggaataaatgtgtcatgctttttaaaaagttgatgtgcggaaaatgttttcttggcttggaaactgggcggccaggggatgacagtatggacttccagtgaagtagtgacggaagcctgatcatagacattaaggaaagcggtgtaggtgttgtgagcttttgctgtaagaaaaagttgagacttttgttttgctttgtttgtgagagatgtgtatgtatttctgctgagtgataaagccagcggggagggactgatttttataggaaaggaggaaaaataatggaaacacatctcattattttattgtcacatttcttttctttgttatcttttgagtgtttcccttttttgccagtagagttattgtctattttttctttctataggacaaaaaaactaatacagactcctttatttttatatggatatactaggattgtaattcagatatttaatatcttttatcagtgttcagatcatagattaatggagaaaacatttaaaattgttttaaatttaaatacattgaactctaacatagatgaaaaatgtgtttactgctttcagtcgacctgataaaaagcaacgtatggtaaatattgaaaactccaggcatcgaaaacaagagcagaagcaccttcagccacagccttataaaagggaaggtaaatggcataaatatggtcgcactaatggaagacaaatggcaaatcttgaaatagaattggggcaattaccttttgatcctcaatactgattcacaattgagttaaattagacaactgtaagagaaaaatttatgctttgtataatgtttggtattgaaactaatgaaattaccaagatgacaatgtcttttcttttgtttctaagtatcagtttgataactttatattattcctcagaagcattagttaaaagtctactaacctgcattttcctgtagtttagcttcgttgaattttttttgacactggaaatgttcaactgtagttttattaaggaagccaggcatgcaacagattttgtgcatgaaatgagacttcctttcagtgtaagagcttaaagcaagctcagtcatacatgacaaagtgtaattaacactgatgtttgtgttaaatttgcagcagagcttgagaaaagtacattgttctggaatttcatcattaacattttataatcttacactcacttcttgtctttttgtgggttcaagagccctctgacttgtgaagaatttgctgccctcttaagagcttgctgacttgttttcttgtgaaattttttgcacatctgaatatcgtggaagaaacaataaaactacaccatgagg

SEQ ID NO: 4732 - DNA, 2478 bp, Homo sapiens
gttttgaaagttgatggagcgaactgcttttccaaagactcttttgaaaaactttttaagtaggccattctgactttaacatttctctttgtcttaacattagacaaaaagtaaccttcctgaagaggacatgtgattggaagttgtcaattgttgaagcattggtaactccagtctctaacgttttagaaaatcataacaagcggttctctaccctgtaaaggtgaactactgagttcttcattatgtctgatggagattatgattacctcatcaagtttttagctttgggagactctggtgtagggaagaccagtgtactttaccaatatacagatggtaaatttaactccaaatttatcacaacagtgggcattgatttcagggaaaaaagagtggtgtacagagccagtgggccggatggagccactggcagaggccagagaatccacctgcagttatgggacacagcagggcaggagaggtttcgtagcttaacgacagcgttcttcagagatgctatgggttttcttctactttttgatctgacaaatgagcaaagtttcctcaatgtcagaaactggataagccagctacagatgcatgcatattgtgaaaacccagatatagtgctgtgtggaaacaagagtgatctggaggaccagagagtagtgaaagaggaggaagccatagcactcgcagagaaatatggaatcccctactttgaaactagtgctgccaatgggacaaacataagccaagcaattgagatgcttctggacctgataatgaagcgaatggaacggtgtgtggacaagtcctggattcctgaaggagtggtgcgatcaaatggtcatgcctctacggatcagttaagtgaagaaaaggagaaaggggcatgtggctgttgagaagtcaagtaagcgacatagtagttcaggtggcccatgcctgggatcttctctatgattgatacatggcacagtgagagattaatgggcattgtgtacaaattgcttctcaccatccccattagacctacgaataaagcatccggttctaaaattaatttgttgcagctttgtaaatatttctttaagattcagcctgagagttaggagaaatatttcagagccaaaagtgccttatacaaccttagcctattatagtaaatcattcaaggattcagaattttgcagtcacagaagagtgtatttattatgtagaatgaatgagggtactgtcacctgccttaatgtaggtaggcccagagtcttacatttaagatcttacatgcagttataaaaccgccacagtcttcaatccagatttgaagactcatgccataggtgacattctaaaataccattaaagccacttaaatgttaaataagaatatacatgcacatcagctcaatgtctttgagtattaattttatgtaagcattctatttaacatgaatataggacaaatcatggctatatctatagaccttggataaactggattgaccaattatacactcacggtgacttttttattggtgggaaggggattggggtggggcaggctggcttaatgtaatatgagcaaccaaagtgggacttctgtctccccgctatattcccattgctctgaatggttgattgaagggtcagggaactagattttatggctttagttcactgtgattgtacatttatacttggcctatgtgctggccgcacctgaacatagctggtgcttatgccgagttatttgcgatgagtaaatatttagtttctttttcttcatatttataatgttgatctggcatcctcaggctgcagctttattagcttataacttactcatctctatctttaccagcaggctctgtattgttgatatttgcaacttgttttgcttttccattggtggaattgaaataattagtttttaattacataagatgcctgtttgctatttggtggaagatagatgttcatattgaagcagtcacatttgtactgtagttcaataaaagaaaaatgaagtattctgtagcctatatttttcatagagctcatgagcatttactgtacttgctgggtcttgccaagatcatttattccgctgcattgccaaagtgtcttcataccaaattaaaggtggttttaatatatgtttcatggaagttgtttataaaattcaaaggtatttcatttaggtgaaaagtcttatttattaaagtggtttgaataaagtagatcaaaacttccagagatcttaatggctatataggaagaaatatcactcaccataatttaaataaagaataaaaatacttgtattttgtggtggcaaatgtttggtagaactgtaattagaaaaatacaagtatatttgcgtgatggttacactagaagcccagactttacgactacacaatatattcatgtatctaaactgtacttgtaccccctaaatttattttt

SEQ ID NO: 4733 - DNA, 1738 bp, Homo sapiens
cttcctgttgccttaggggaacgtggctttccctgcagagccggtgtctccgcctgcgtccctgctgcagcaaccggagctggagtcggatcccgaacgcaccctcgccatggactcggccctcagcgatccgcataacggcagtgccgaggcaggcggccccaccaacagcactacgcggccgccttccacgcccgagggcatcgcgctggcctacggcagcctcctgctcatggcgctgctgcccatcttcttcggcgccctgcgctccgtacgctgcgcccgcggcaagaatgcttcagacatgcctgaaacaatcaccagccgggatgccgcccgcttccccatcatcgccagctgcacactcttggggctctacctctttttcaaaatattctcccaggagtacatcaacctcctgctgtccatgtatttcttcgtgctgggaatcctggccctgtcccacaccatcagccccttcatgaataagttttttccagccagctttccaaatcgacagtaccagctgctcttcacacagggttctggggaaaacaaggaagagatcatcaattatgaatttgacaccaaggacctggtgtgcctgggcctgagcagcatcgttggcgtctggtacctgctgaggaagcactggattgccaacaacctttttggcctggccttctcccttaatggagtagagctcctgcacctcaacaatgtcagcactggctgcatcctgctgggcggactcttcatctacgatgtcttctgggtatttggcaccaatgtgatggtgacagtggccaagtccttcgaggcaccaataaaattggtgtttccccaggatctgctggagaaaggcctcgaagcaaacaactttgccatgctgggacttggagatgtcgtcattccagggatcttcattgccttgctgctgcgctttgacatcagcttgaagaagaatacccacacctacttctacaccagctttgcagcctacatcttcggcctgggccttaccatcttcatcatgcacatcttcaagcatgctcagcctgccctcctatacctggtccccgcctgcatcggttttcctgtcctggtggcgctggccaagggagaagtgacagagatgttcagctacgagtcctcggcggaaatcctgcctcataccccgaggctcacccacttccccacagtctcgggctccccagccagcctggccgactccatgcagcagaagctagctggccctcgccgccggcgcccgcagaatcccagcgccatttatgaggagtcaaatcctaaggatccagcggcagtgacagaatccaaagagggaacagaggcatcagcatcgaaggggctggagaagaaagagaaatgatgcagctggtgcccgagcctctcagggccagaccagacagatgggggctgggcccacacaggcgtgcaccggtagagggcacaggaggccaagggcagctccaggacagggcagggggcagcaggatacctccagccaggcctctgtggcctctgtttccttctccctttcttggccctcctctgctcctccccacaccctgcaggcaaaagaaacccccagcttcccccctccccgggagccaggtgggaaaagtgggtgtgatttttagattttgtattgtggactgattttgcctcacattaaaaactcatcccatggccagggcgggccactgtgctcctggaa

SEQ ID NO: 4734 - DNA, 1288 bp, Homo sapiens
gatcccggggtcgcgcgagagccgcaagcggagttggtgggcgctatgctatcacccgaggcagagcgagtgctgcggtaccttgtagaagtggaggagctcgccgaggaggtgctggcggacaagcggcagattgtggacctggacactaaaaggaatcagaatcgagagggcctgagggccctgcagaaggatctcagcctctctgaagatgtgatggtttgcttcgggaacatgtttatcaagatgcctcaccctgagacaaaggaaatgattgaaaaagatcaagatcatctggataaagaaatagaaaaactgcggaagcaacttaaagtgaaggtcaaccgcctttttgaggcccaaggcaaaccggagctgaagggttttaacttgaaccccctcaaccaggatgagcttaaagctctcaaggtcatcttgaaaggatgagactcaagaaccaagatgggggaccagcaaccccccagggtcatggaggacccaggaccctccaaccttgacacctgtaaggacaggatctgccctgtaaggggccagccgtcaggaatctggccatgaaaacctctttgtagtgcttggctactctgtgatggcaggagggaaccttcagcctgtctggctgctggacctggacaccagggctcggtggacacaagatctattgacgggccttggtagccaccagtgggtgtgtggggcagtggctgtgggggtgtaagaatgactgcaacaggcacttcccaacaatggcctgctgttcacatggaccctgagcaaggaaggagggagggaggggcagagtggagtgtcattccagcattcctctcagaagggagagaggttttcaggctggtgccatgcgattggaataaagcaggaggctcatgggtggttgctgaatgaagaacagaatcttggtgctttgtggctcaccacagccatctgtggggcaggcacacacacctcccgccagctccaattttgcactttttccctgcttgattccaagagtaggtgctgcctagcagcccttcgtggccactctttactcaggagggccttgcagagtcctgcaccaggcctgggtgagtggatgcgcctcttaccatatgacacgtgtcaagatgcccttccgccccctctgaaagtggggcccggccagcactgctcgttactgtctgccttcagtggtctgaggtcccagtatgaactgccgtgaagtcaaaactcttatgtgttcattaagggctcaataaatgttagctgaatg

SEQ ID NO: 4735 - DNA, 2617 bp, Homo sapiens
gagcggcccccggaggctttcctggtagaagttgatgcgaggaagggcggcggggaccaggggacggtattcagaattcgagcgcaggagctccgcttctccacctgctcccggggagctattgggatccagagaatcacccgctgatggtttttgcccaggcctgaaacaaccagagagctacgggaaaggaagggcttggcttgccagaggaattttccaagtgctcaaacgccaggcttacggcgcctgtgatccgtccaggaggacaaagtgggatttgaagatccactccacttctgctcatggcgggccagggcctgcccctgcacgtggccacactgctgactgggctgctggaatgcctgggctttgctggcgtcctctttggctggccttcactagtgtttgtcttcaagaatgaagattactttaaggatctgtgtggaccagatgctgggccgattggcaatgccacagggcaggctgactgcaaagcccaggatgagaggttctcactcatcttcaccctggggtccttcatgaacaacttcatgacattccccactggctacatctttgaccggttcaagaccaccgtggcacgcctcatagccatatttttctacaccaccgccacactcatcatagccttcacctctgcaggctcagccgtgctgctcttcctggccatgccaatgctcaccattgggggaatcctgtttctcatcaccaacctgcagattgggaacctatttggccaacaccgttcgaccatcatcactctgtacaatggagcatttgactcttcctcggcagtcttccttattattaagcttctttatgaaaaaggcatcagcctcagggcctccttcatcttcatctctgtctgcagtacctggcatgtagcacgcactttcctcctgatgccccgggggcacatcccatacccactgccccccaactacagctatggcctgtgccctgggaatggcaccacaaaggaagagaaggaaacagctgagcatgaaaacagggagctacagtcaaaggagttcctttcagcgaaggaagagaccccaggggcagggcagaagcaggaactccgctccttctggagctacgctttctctcggcgctttgcctggcacctggtgtggctgtctgtgatacagttgtggcactacctcttcattggcactctcaactccttgctgaccaacatggccggtggggacatggcacgagtcagcacctacacaaatgcctttgccttcactcagttcggagtgctgtgtgccccctggaatggcctgctcatggaccggcttaaacagaagtaccagaaggaagcaagaaagacaggttcctccactttggcggtggccctctgctcgacggtgccttcgctggccctgacatccctgctgtgcctgggcttcgccctctgtgcctcagtccccatcctccctctccagtacctcaccttcatcctgcaagtgatcagccgctccttcctctatgggagcaacgcggccttcctcacccttgctttcccttcagagcactttggcaagctctttgggctggtgatggccttgtcggctgtggtgtctctgctccagttccccatcttcaccctcatcaaaggctcccttcagaatgacccattttacgtgaatgtgatgttcatgcttgccattcttctgacattcttccacccctttctggtatatcgggaatgccgtacttggaaagaaagtccctctgcaattgcatagttcagaagccctcacttttcagccccgaggatggttttgttcatcttccaccacctttgaggacctcgtgtcccaaaagactttgcctatcccagcaaaacacacacacacacacacacacacacaaaataaagacacacaaggacgtctgcgcagcaagaaaagaatctcagttgccaagcagattgatatcacacagactcaaagcaaaggcatgtggaacttctttatttcaaaacagaagtgtctccttgcacttagccttggcagacccttgactccaggggagatgacctgggggaggaagtgtgtcaactatttctttaggcctgtttggctccgaagcctatatgtgcctggatcctctgccacgggttaaattttcaggtgaagagtgaggttgtcatggcctcagctatgcttcctggctctccctcaagagtgcagccttggctagagaactcacagctctgggaaaaagaggagcagacagggttccctgggcccagtctcagcccagccactgatgctggatgaccttggcctgaccctggtctggtctcagaatcacttttcccatctgtaaaattgagatgaattttggtgttgaaagttcttcctggagcagatgtcctagaaggttttaggaatagtgacagagtcaggccaccccaagggccatgggagccagctgacctgcttgaccgaaggatttctgacagactatctttggggatgttttcaagaagggatataagttatttactttgggcatttaaaagaaaatttctctcgggaataattttatagaaaaataaagcttctgtgtctaaggc

SEQ ID NO: 4736 - DNA, 1638 bp, Homo sapiens
aatattctgcttttcctgttatgtgtttcagatttttctacaccaccgccacactcatcatagccttcacctctgcaggctcagccgtgctgctcttcctggccatgccaatgctcaccattgggggaatcctgtttctcatcaccaacctgcagattgggaacctatttggccaacaccgttcgaccatcatcactctgtacaatggagcatttgactcttcctcggcagtcttccttattattaagcttctttatgaaaaaggcatcagcctcagggcctccttcatcttcatctctgtctgcagtacctggcatgtagcacgcactttcctcctgatgccccgggggcacatcccatacccactgccccccaactacagcatagcctgtgccctgggaatggcaccacaaaggaagagaaggaaacagctgagcatgaaaacagggagctacagtcaaaggagttcctttcagcgaaggaagagaccccaggggcagggcagaagcaggaactccgctccttctggagctacgctttctctcggcgctttgcctggcacctggtgtggctgtctgtgatacagttgtggcactacctcttcattggcactctcaactccttgctgaccaacatggccggtggggacatggcacgagtcagcacctacacaaatgcctttgccttcactcagttcggagtgctgtgtgccccctggaatggcctgctcatggaccggcttaaacagaagtaccagaaggaagcaagaaagacagggtcttttaacatccgaggaccacattctttgtgctttccaaatcatcacctgccccatgcaacttacagggataaagccaagatgaaactccccctacttctggctcttctatttggggcagtttctgctcttcatctaaggtctgagacttccacctttgagacccctttgggtgctaagacgctgcctgaggatgaggagacaccagagcaggagatggaggagaccccttgcagggagctggaggaagaggaggagtggggctctggaagtgaagatgcctccaagaaagatggggctgttgagtctatctcagtgccagatatggtggacaaaaaccttacgtgtcctgaggaagaggacacagtaaaagtggtgggcatccctgggtgccagacctgccgctacctcctggtgagaagtcttcagacgtttagtcaagcttggtttacttgccggaggtgctacaggggcaacctggtttccatccacaacttcaatattaattatcgaatccagtgttctgtcagcgcgctcaaccagggtcaagtctggattggaggcaggatcacaggctcgggtcgctgcagacgctttcagtgggttgacggcagccgctggaactttgcgtactgggctgctcaccagccctggtcccgcggtggtcactgcgtggccctgtgtacccgaggaggctactggcgtcgagcccactgcctcagaagacttcctttcatctgttcctactgagctggtcccagccagcagttcagagctgccctctcctgggcagctgcctcccctcctctgcttgccatccctccctccacctccctgcaataaaatgggttttactgaaa

SEQ ID NO: 4737 - DNA, 3330 bp, Homo sapiens
ggctcggctccttggcgctgcctggggtcctttccgcccggtccccgcttgccagcccccgctgctctgtgccctgtccggccaggcctggagccgacaccaccgccatcatgccggccgtgtccaagggcgatgggatgcgggggctcgcggtgttcatctccgacatccggaactgtaagagcaaagaggcggaaattaagagaatcaacaaggaactggccaacatccgctccaagttcaaaggagacaaagccttggatggctacagtaagaaaaaatatgtgtgtaaactgcttttcatcttcctgcttggccatgacattgactttgggcacatggaggctgtgaatctgttgagttccaataaatacacagagaagcaaataggttacctgttcatttctgtgctggtgaactcgaactcggagctgatccgcctcatcaacaacgccatcaagaatgacctggccagccgcaaccccaccttcatgtgcctggccctgcactgcatcgccaacgtgggcagccgggagatgggcgaggcctttgccgctgacatcccccgcatcctggtggccggggacagcatggacagtgtcaagcagagtgcggccctgtgcctccttcgactgtacaaggcctcgcctgacctggtgcccatgggcgagtggacggcgcgtgtggtacacctgctcaatgaccagcacatgggtgtggtcacggccgccgtcagcctcatcacctgtctctgcaagaagaacccagatgacttcaagacgtgcgtctctctggctgtgtcgcgcctgagccggatcgtctcctctgcctccaccgacctccaggactacacctactacttcgtcccagcaccctggctctcggtgaagctcctgcggctgctgcagtgctacccgcctccagaggatgcggctgtgaaggggcggctggtggaatgtctggagactgtgctcaacaaggcccaggagccccccaaatccaagaaggtgcagcattccaacgccaagaacgccatcctcttcgagaccatcagcctcatcatccactatgacagtgagcccaacctcctggttcgggcctgcaaccagctgggccagttcctgcagcaccgggagaccaacctgcgctacctggccctggagagcatgtgcacgctggccagctccgagttctcccatgaagccgtcaagacgcacattgacaccgtcatcaatgccctcaagacggagcgggacgtcagcgtgcggcagcgggcggctgacctcctctacgccatgtgtgaccggagcaatgccaagcagatcgtgtcggagatgctgcggtacctggagacggcagactacgccatccgcgaggagatcgtcctgaaggtggccatcctggccgagaagtacgccgtggactacagctggtacgtggacaccatcctcaacctcatccgcattgcgggcgactacgtgagtgaggaggtgtggtaccgtgtgctacagatcgtcaccaaccgtgatgacgtccagggctatgccgccaagaccgtctttgaggcgctccaggcccctgcctgtcacgagaacatggtgaaggttggcggctacatccttggggagtttgggaacctgattgctggggacccccgctccagccccccagtgcagttctccctgctccactccaagttccatctgtgcagcgtggccacgcgggcgctgctgctgtccacctacatcaagttcatcaacctcttccccgagaccaaggccaccatccagggcgtcctgcgggccggctcccagctgcgcaatgctgacgtggagctgcagcagcgagccgtggagtacctcaccctcagctcagtggccagcaccgacgtcctggccacggtgctggaggagatgccgcccttccccgagcgcgagtcgtccatcctggccaagctgaaacgcaagaaggggccaggggccggcagcgccctggacgatggccggagggaccccagcagcaacgacatcaacgggggcatggagcccacccccagcactgtgtcgacgccctcgccctccgccgacctcctggggctgcgggcagcccctcccccggcagcacccccggcttctgcaggagcagggaaccttctggtggacgtcttcgatggcccggccgcccagcccagcctggggcccacccccgaggaggccttcctcagcccaggtcctgaggacatcggccctcccattccggaagccgatgagttgctgaataagtttgtgtgtaagaacaacggggtcctgttcgagaaccagctgctgcagatcggagtcaagtcagagttccgacagaacctgggccgcatgtatctcttctatggcaacaagacctcggtgcagttccagaatttctcacccactgtggttcacccgggagacctccagactcagctggctgtgcagaccaagcgcgtggcggcgcaggtggacggcggcgcgcaggtgcagcaggtgctcaatatcgagtgcctgcgggacttcctgacgcccccgctgctgtccgtgcgcttccggtacggtggcgccccccaggccctcaccctgaagctcccagtgaccatcaacaagttcttccagcccaccgagatggcggcccaggatttcttccagcgctggaagcagctgagcctccctcaacaggaggcgcagaaaatcttcaaagccaaccaccccatggacgcagaagttactaaggccaagcttctggggtttggctctgctctcctggacaatgtggaccccaaccctgagaacttcgtgggggcggggatcatccagactaaagccctgcaggtgggctgtctgcttcggctggagcccaatgcccaggcccagatgtaccggctgaccctgcgcaccagcaaggagcccgtctcccgtcacctgtgtgagctgctggcacagcagttctgagccctggactctgccccgggggatgtggccggcactgggcagccccttggactgaggcagttttggtggatgggggacctccactggtgacagagaagacaccagggtttgggggatgcctgggactttcctccggccttttgtatttttatttttgttcatctgctgctgtttacattctggggggttagggggagtccccctccctccctttcccccccaagcacagaggggagaggggccagggaagtggatgtctcctcccctcccaccccaccctgttgtagcccctcctaccccctccccatccaggggctgtgtattattgtgagcgaataaacagagagacgct

SEQ ID NO: 4738 - DNA, 1713 bp, Homo sapiens
cttaagtgacccgttcccccttcacccagcaccgtttgttgagggcctgccatatctgggccccgagtacccagtctgtagggaaagtggacatccatactcaccccccaggcatggccctgggaggctgactgtgcatggctccagggaggccagggacagggccctgagcgggtgatccctgggctggacaccaaggttgagaagttaggccggcagcgtggaggggacagcactgtgggggtggcccggtgtggggaggggacatggggttttgggacggtcacaccacttcatctagacaccacagccaggcacatctgtcaggcttagttctcccatgcgccatcctcaagaggcaccagcactttatctgttgagcctttatgtggcaccaactgtgtgcactattacccggttttacagatgatggaggcccagaagcaggaggtggctggtgttaggtcacacagctaggaggcagcagaacggtggggcgctgcctgtgctcttaacccccaggccaagtcaccccatcaggcagtcaggagggctggcggcagggggtgatgtgggtgggaggtagtgccttcttggcattctcaccgcagcctgggtgccgggtgccactctgacctcagccatggcagggtcgggggatgccgatgggcgctgcacgggctctcagaggcccctcacctatggccatggccttgactgtgggggcctctgtccaccgatgatctcccttcatcccctacaggtggggcggtccagggtggtgggggcacagtggccccgggcagtgaccacagggtcctgacccgcggcccccgcaggcgggctgcatgctgttcccccacatctccccctgtgaggtgcgcgtgctcatgctcctgtactcgtccaagaagaagatcttcatgggcctcatcccctacgaccagagcggcttcgtcagtgccatccggcaggtcatcaccacccgcaagcaggcagtgggacctggtggtgtcaactcaggcccagtccagatcgtcaacaacaagtttctggcatggagtggtgtcatggagtggcaggagcccaggcctgagcccaacagtcggtccaagaggtggctgccatcccacgtctacgtgaaccagggggagatcctgaggaccgagcagtggccaaggaagctgtacatgcagctcatcccgcagcagctgctgaccaccctagtgccgctgttccggaactcgcgcctggtccagttccacttcaccaaggacctggagacactgaagagcctgtgccggatcatggacaatggcttcgccggctgcgtgcacttttcctacaaagcatcgtgtgagatccgcgtgcttatgctcctgtactcttcagagaagaaaatcttcattggcctcatcccccatgaccagggcaactttgtcaacggcatccggcgtgtcattgccaaccagcagcaggtcctgcagcggaacctggagcaggagcaacagcaacgagggatgggggggtagtggttaccccgggctgggcccctccaggagtcacagatgaggcccccgcagagactggtgacacgcttctgagcaggggcccctggggacttcaactgcccagcaacatggaggatggtgtcctgaggcctccaaggacggtccccacccctctacgtttccccaataaagccttttaaaa

SEQ ID NO: 4739 - DNA, 2243 bp, Homo sapiens
acaagctcccgggaaaccaggagtgacaagggcgcctgtccctgaggagtggagagcgcggagttggtgctgagtcagccctgatgtggcagaggaggagcaggcccccgcagaaccagggctcttcagtgtctccaggtccttggtgaagtggaactggaccaggcgcgagttccggaacagcggcactagggtggtctgcggggaagcgaggggacccccagctctggcttctcccaccacggcctcccggctcccagcccgctgagtcccccgggcccaggaccaaactgagactcccctgtcctccctacctcaggaaacgtcatctccaccgctcaaccagcccaaccctggagtgctgtggaagccgctctcagatcccttggcagccccccaggtgcaggtcgtggctgcccctgccccgctcagtccctgcacagccaccagctggctgcctgggaccccttgaagccaagcctgaggagctacccaccacacctgcttcagcaccctcagctccgctccctcacagccagctcaggccacctggggaggcgctcttgcccccagccccgccctctggaagagctactgcgtgcaggctccagcacccggccccagcccctcaccagcagctgctgcgggatgagctgcatgtacagcttccttggccactgctcggtcctcctgtggggcacaaagggacgagggtcaggaagccccagctcccctggatgctgcctccaccccccagcccagcactcacaggatctccccctggttcacgtagacgtgggatggcagccacctcttggaccgactgttgggctcaggcctgggcttttgggggagaggcaaagaggagccctcagggctggagacccccaatgccagtgtcccctcccagccacagtccgtgaggatctgggggtcccaagtccctgggctgccgagtgctcacctcctgccactccatgacaccactccatgccagaaacttgttgttgacgatctggactgggcctgagttgacaccaccaggtcccactgcctgttggaagggaacggggtgggaagaggggcccaggctcctgggaaacctgtctgtctgtcctggggcctgccatccctccctccgagccttggcctgttagccccagctgggtccattctctagtcccaggggaacaggccctgcccctcatctgctcacagccccccatggctccccagtggcctgagacaggtcccggccctcacctggtgcacaggacctgcagagtctgcctcaactggcaaggcatgaccaggacacgtggttaccaggcagggccttccagccgcaggacgatcccaacccctgcccagctccccgctccgctggcttccctgccgccgcgccaagacccaccctccagccctgcagagccgcccagtggccgcttttccatggagccctggtgggaacccgcccggcatcctccgggctcccctgcagctccttgctccagccatcgcatcacactccgcccacaccaagtctggctgcccaaccagggcagtggggtctaatccccctctgtccccagaggggctgtgcttggctggcacacctgcttgcgggtggtgatgacctgccggatggcactgacgaagccgctctggtcgtaggggatgaggcccatgaagatcttcttcttggacgagtacaggagcatgagcacgcgcacctcacagggggagatgtgggggaacagcatgcagcccgcctgcgggggccgcgggtcaggaccctgtggtcactgcccggggccactgtgcccccaccaccctggaccgccccacctgtaggggatgaagggagatcatcggtggacagaggcccccacagtcaaggccatggccataggtgaggggcctctgagagcccgtgcagcgcccatcggcatcccccgaccctgccatggctgaggtcagagtggcacccggcacccaggctgcggtgagaatgccaagaaggcactacctcccacccacatcaccccctgccgccagccctcctgactgcctgatggggtgacttggcctgggggttaagagcacaggcagcgccccaccgttctgctgcctcctagctgtgtgacctaacaccagccacctcctgcttctgggcctccatcatctgtaaaaccgggtaatagtgcacacagttggtgccacataaaggctcaacagataaa

SEQ ID NO: 4740 - DNA, 4566 bp, Homo sapiens
gggaaatagagtcctggcgctgccgcggaggatcctgggtgcagccgctcagagaagcttctcgcgcacaggaagtcgctgcgaggaggcgcgtgtgcggggagttgaatctcccgctcccttgaggctggggttgcgtctgttgacgcggccgactacaatcccgagccctgccagccgggaacacggaggggaaggaggaggagcttaaaagaggctactgaaccccagttggccatggctgaggaatttgtgaccctcaaggatgtcggcatggacttcaccttgggagactgggagcagctcgggctggaacagggggacacgttctgggacacagcgttggacaattgccaggacctcttcctgctggaccccccaagacccaacctgacctcccacccagatggcagtgaagatctggagcctctggcaggaggaagcccagaagcaacaagccctgatgtgactgagaccaagaactctcctctgatggaggatttcttcgaagaaggattctcccaggagattatagagatgttatccaaggatggcttctggaactccaatttcggagaagcctgtatagaggacacctggttagatagtttgctaggcgatccagaaagtcttctgaggtctgatattgccaccaacggggaaagtcccacggaatgcaagagtcatgaattaaagagaggactcagtcctgtgtccaccgtttccacgggagaagattccatggtgcataatgtttctgaaaagaccctcacaccagctaagtctaaggaatataggggtgagtttttctcctactccgaccacagccagcaggattctgttcaggaaggggagaaaccatatcaatgtagtgaatgtgggaaaagcttcagtgggagttaccgtcttacccagcactggatcactcatactagggagaaacccactgtccatcaagagtgtgagcaaggttttgaccggaatgcttccctttctgtgtatccgaaaactcacacgggctacaaattctatgtgtgtaatgaatatgggacaacttttagtcagagtacatacctgtggcatcagaaaactcacactggagaaaaaccatgtaagagtcaagatagtgaccacccacccagtcatgacacacagcctggtgagcatcagaaaactcacacagatagtaagtcctacaactgtaacgaatgcggcaaggcttttacccggatcttccaccttactcggcaccagaagatccacactcggaaacgctatgagtgttccaagtgccaggcgaccttcaacttgagaaaacacctcatccaacatcagaaaactcacgctgcaaaaactacctctgagtgtcaggagtgtgggaagatttttaggcacagttcgctgctcattgaacaccaggctcttcatgctggagaggagccttataagtgtaacgaacgtgggaaatccttcaggcataactctaccctaaagatccatcagagggttcacagtggagagaagccttacaaatgcagtgagtgtgggaaggccttccaccggcacactcaccttaatgaacatcggcgaattcatacaggctacagaccccacaaatgtcaggaatgcgtcaggagtttcagccggccctcacatctgatgcgacatcaggccattcacaccgcagaaaagccctatagctgtgctgaatgcaaggagactttcagcgataacaatcgccttgtgcaacaccagaaaatgcacactgtcaaaaccccatatgaatgtcaggagtgcggagaacgcttcatttgcggctcaaccctgaagtgccacgagagtgttcacgccagagaaaaacaaggattttttgtgagtgggaagatcttggatcagaacccagaacagaaagagaagtgctttaagtgtaacaaatgtgagaaaacctttagctgcagcaaatacctaactcagcacgagaggattcacaccaggggagtgaagccctttgaatgtgaccagtgtgggaaagcctttggccaaagtactcggctcattcaccatcaaagaatccactctagagtgaggctgtataaatggggtgagcaagggaaagccatcagcagtgcctcccttatcaaacttcagtccttccacacaaaggagcacccttttaaatgtaacgaatgcggaaagaccttcagccacagtgcacacctctcaaaacatcagttaattcacgctggagagaatccctttaaatgtagtaagtgtgacagagtcttcacccagagaaactaccttgttcagcatgagcgaactcatgccagaaagaagccgttggtgtgtaacgaatgcgggaaaacgttccgtcagagctcatgcctttctaagcatcagagaattcactcaggtgagaagccctatgtatgtgattactgcgggaaggccttcggcctgagtgctgagcttgtccgccaccagagaattcacactggagaaaagccttatgtttgtcaggaatgcgggaaagccttcacccagagctcatgcctttctattcaccggagagttcacactggggagaagccctacagatgtggtgaatgtgggaaagcctttgcccagaaagcaaatctaacacagcaccagagaattcacacaggggagaagccttactcctgtaatgtgtgtggcaaagcttttgtcctcagtgcccatctcaaccagcacctgagagttcacacccaggagacactttatcagtgtcaacgttgccagaaagcctttcggtgccactcgagcctcagccgccatcagcgtgtacacaacaagcagcaatactgcctgtagccattgggtggcagcagagtcccagaatatgagaccgttactcggatgttgaaagttggaaactatcccattgcaagtttctctccaaataaatgcatctaaagattgattagaaagtttgtgcgcatgtttttcattataacaatgaaaacacaaaagtggagaagctgtacaacgtcaggattcagaggtaggctctggagccagtctaccttgagttaaatcccacctctgccatctactacctaagtgaccttgggaaggtcagaaaaatctctcagggcctcggtgtccttatctgtaaaatgggcatcacctacctcagagggcttttctgaggattaaataaataaatgtgaagcacttagaactgatggccagcacatgagggctcaccaagtgtaagccacaaatacacatcagctatagcacaaatatacttgtgttacaagaaaggaattagtaatctgtgtttactgtagttaatgttcttacaatgtatcgcttttaatttaagttttccttttttacagtttttctccagcactttactcttcttaagtgcctggccttttttgtccctttatctctcctggtttttttcttaagccccagaaagccaaaaagaacatgtaaactcttcacctcaactagctacaaccttccactcctaacctcccaagcttctcacttaaagaggactccctatcccacaaacacatgctccctcttcctatgaccttcctccatttaacagtgttggttatgcaataagacacccaatttttcatgggagttgacaccaaaacacagctggattccatcaggaaagctgcattgatcagggtgttaaccgcatatgaaacaacccatatggaagacatacttaggggtcaaacctgtggtgtgtggaagtgaccactgggatgtcatcattcaccatttatccaggatggccgctcaccaggcaatttgctaggctcgggggcgggtagtatccatacactatgcactactgctctgaagcttctggaatcagaaatgaacccattttcatcgacgattgctgttagttgacaagtgacatcttgaaaatgccacattccctcatgtcacaggaagttctgggatcaccaaggattgttggagagtccagtgagatggaaccacacaaccagttccctaccagtgtcttgtcagctctgggtgtttgttccctgccactaagtggctcagtcacacctttgctgaaacacagtagtcttatgaaaagcactggacacatactttgaatacctttcatattttaggtgctgaaaatggtgagggagtgagtgctctgcacccttgggcttttcaactcttgcacctggagttctgctggttaagtttgttaaacttagttgaaactgggaacctgttggctaaccattggggccttacactgtttttcaaatggttgcaacatttaacttctcgcacatggttcccgtcctctggagctctgtcttgtcggggagatgggcatgttgtataccaaaagagtgtacaaagtgttgcagggctgtgacacaatagggactctatggaaaactggcagccattgggtgtgggggcagtctgtaaatcagtcacctgtgttgctgcaggccaaggtagaaacgccctccgtgtgtgcatatttgttggttctctgattaaagttttgagtct

SEQ ID NO: 4741 - DNA, 1657 bp, Homo sapiens
  misc_feature (523)..(523): n is a, c, g, or t
cccgtcagaccttcctgacctcccacctggttctctaggggcagggtggacaggaagcagctcagcccagcctgggagaggccaagggctgcctcctatcagagagcgcctgctcgctgtgcccccgggttatgacgacccccaataaaggaaacaaggccttgaaggtgaagcgggagccgggtgagaatggcaccagctgacggatgaggagctggtgaccatgtcggtgcgggagctgaaccagcacctgcggggcctgtccaaggaggagatcgtccagctgaagcagcgccggcgcacgctcaagaaccgcggctacgctgccagctgccgcgtgaagcgggtgacgcagaaggaggagctggagaagcagaaggcggagctgcagcaggaggtggagaagctggcctcagagaacgccagcatgaagctggagctcgacgcgctgcgctccaagtacgaggcgctgcagaccttcgcccggacggtggcccgcagccccgtggcgccacgcgactcntcttagccgccggcctggggctcctcgtcccaggcaaggtggccgccaccagcgtcatcacaatagtaaagtccaagacggatgcccgatcgtagggacgcgcgtctgcccaggcgggtctttgcggggccactaggcacatggcgaatttggctgcactgtccctctgtttccttctcttctctttcctccctctcttccccacccttctctcttccctgcaaagcacaacctgtaccccaggggcgccgggctgagcccttctgatctcgtcattgtcgtcgtgtgtcttgtatgttgggattggtcagttcggcggtgacgtggggtcgccccaaccccttttgtaccagggccatgcaggcttggagtccagagttggtgctgtgggaacggactagagagagttgcgggagagagaaggagcaggcacgctgggcctcgcgtgtccccgagcagtgagggtcccagtgttccctccactcccgagtggccacaggctcgcgggctgggaaggattcactctctttagccccaggggagcagctcagcttagcccagcatgaagagatgggctctgctctgagagtagggcgggcttgaaggccctgatgggtggaccaccagcctgggcgcagtggtgctgggggcgtgcagctgggcccaggggctgtgcactcaggcctgacccgttgcactgaacaagaccaaatctctggttgtgcgcttaacgtgagggtgggtccagtgtgccctgcgatgggtcccgtgtcactgtttacatgacctatttgtgtggttatatagccctttatttaaaagagagaagttccttttacaaagttattaaattaattatatgtttaaaagttaaagaaaaaagagctgcagagtatttataaaactgtcttttagaaaaaaaacaagcaagaagaccatttgaccatatgaatggaaaagggaagaaagtataatagaaactttgctagttaaaaaaaaaagaaaaaaaaagaaaaaaaatccctttcttgtaaacttacggacacctctttgtggctgttggagtttagtttttatatacacagagttatcagacattatttataaaacttagtttaaaaaaaagacaaaaaa

SEQ ID NO: 4742 - DNA, 4472 bp, Homo sapiens
caggtttattcagtcaccatgaagctgctgctgctgcacccggccttccagagctgcctcctgctgaccctgcttggcttatggagaaccacccctgaggctcacgcttcatccctgggtgcaccagctatcagcgctgcctccttcctgcaggatctaatacatcggtatggcgagggtgacagcctcactctgcagcagctgaaggccctactcaaccacctggatgtgggagtgggccggggtaatgtcacccagcacgtgcaaggacacaggaacctctccacgtgctttagttctggagacctcttcactgcccacaatttcagcgagcagtcgcggattgggagcagcgagctccaggagttctgccccaccatcctccagcagctggattcccgggcctgcacctcggagaaccaggaaaacgaggagaatgagcagacggaggaggggcggccaagcgctgttgaagtgtggggatacggtctcctctgtgtgaccgtcatctccctctgctccctcctgggggccagcgtggtgcccttcatgaagaagaccttttacaagaggctgctgctctacttcatagctctggcgattggaaccctctactccaacgccctcttccagctcatcccggaggcatttggtttcaaccctctggaagattattatgtctccaagtctgcagtggtgtttgggggcttttatcttttctttttcacagagaagatcttgaagattcttcttaagcagaaaaatgagcatcatcatggacacagccattatgcctctgagtcgcttccctccaagaaggaccaggaggagggggtgatggagaagctgcagaacggggacctggaccacatgattcctcagcactgcagcagtgagctggacggcaaggcgcccatggtggacgagaaggtcattgtgggctcgctctctgtgcaggacctgcaggcttcccagagtgcttgctactggctgaaaggtgtccgctactctgatatcggcactctggcctggatgatcactctgagcgacggcctccataatttcatcgatggcctggccatcggtgcttccttcactgtgtcagttttccaaggcatcagcacctcggtggccatcctctgtgaggagttcccacatgagctaggagactttgtcatcctgctcaacgctgggatgagcatccaacaagctctcttcttcaacttcctttctgcctgctgctgctacctgggtctggcctttggcatcctggccggcagccacttctctgccaactggatttttgcgctagctggaggaatgttcttgtatatttctctggctgatatgttccctgagatgaatgaggtctgtcaagaggatgaaaggaagggcagcatcttgattccatttatcatccagaacctgggcctcctgactggattcaccatcatggtggtcctcaccatgtattcaggacagatccagattgggtagggctctgccaagagcctgtgggactggaagtcgggccctgggctgcccgatcgccagcccgaggacttaccatccacaatgcaccacggaagaggccgttctatgaaaaactgacacagactgtattcctgcattcaaatgtcagccgtttgtaaaatgctgtatcctaggaataagctgccctggtaaccagtctctagctagtgcctcttgccctctcctcacctccttttctctcagtgactctggaacctgaatgcagcttacaagacaagcctgacttttttctctgattaccttggcctcctcttggaaccagtgctgaaaggttttgaatcctttacccaacaatgcaaaaatagagccaatggttataacttggctagaaatatcaagagttgaatccatagtgtggggcccatgactctagctgggcaccttggacctccagctggccaatagaagagacaggagacaggaagccttcccattttttcaaagtctgtttaattgcctattacttctctcaaagagaacctgaagtcagaacacatgagcagggtgagaggtgaggcaaggttcatcctgaatgggagaggaagtcgaaccactgctgtgtgtcttgtcaggatgctcacttgttcctactgagatgctggatattgattttgtaacagcacctggtgtttcacggctgtccgagtgagctaacgtggcggtgtggctgcctggacctcctctttcaggttaacgctgacagaatggaggctcaggctgtctgcaagaaaacagttggtttggctgtgattttgacctcctcttccccactgccatcttctaagagactttgtagctgcctcctagaagcacattctgagcacatttgagacctctgtgttagaggggagactgcacaaactatcctcccccaggttgagacgtctgcagagtggcaagctgacttgtagaaatggggtgccatttatgctctacttagacaagggtaatcagaaatggaatcagtgcaggcaaaatttaggatttgccgcttccataaatcaaagcatgactaatagggggtctctgaaatgtaagggcacaaacttcacttagggcatcgcagatgtttgcagaatggttggcctaatgattatgctacagatgggttttaaatgacccgtctaggttactgcttccttgcaaaaaaagtcgaatcctgcattgaattgaatatgaatttctctaactctctccagaaaatggatggagataacttgtctttaaaactgtaggccagccttagccactgtggagcccttgcctccgagctctggcttcaaggggagctcttctccaggttcactaggtgaattgatttattattatcatattgataatgtgagattctttagccactttggggagcctgtctctccagaagcctttcttagtggtgcccacagttggagcccaggggccatgtttgcaaactgattcatgtgcatggctgacaggagtactggttcactaccaatgcctgagcttttctcttacatagaaaaactgtccgctctcagtaatcacaagcagcatccgttttgttttctcttcttgggagacatctgtcaaaccaggaatattcttgaaaagaacgtgagcaggaaaaactgctggtgatactttttttaagttttgtttttatcttgcctgttggcttcaatacatttgagaatacgctgaagagggaaaatttcagtgatggagattctagattaaatatcaggactgatttcctggtgggattatggtccagttttaccaaagaaccaattccttgaatgttggaatctaactttttatattgtcattattattgttgtttttaaacggttctttgtcttttctgttttatttttctcaagctgctttcaggagctagcagaaaataactcaaagttgaagactctggaagattttgctttaacctaactcgcattgatgtattaaatttataattttagcattcccaatagatcctatcattccttaaacataataccctttgtcttggagtagaatactaagttagagttagtggatttctagtttaggagaggagctcaaaactataatctttaacaaattgaaaaatgaaatagggtgttttccctttttgtgcacacctatattaccttaagaaatttccttccatagacagctgcctcaaagggaaatcctctttaaaccgtagttggcgcagaggtcagtcctagtcggagcttaggaggggcggagacgctcacatcgtctgacttgagtcgccactgattgtggcaacagctttgcctcatgagtcaaaaattggcaatttcttttgatttttagttgttgaatttgctgtttcaagcatttgtacatattagaagtctaaggagtagcaagtcagtgggaggactttttcacccctggcattagcagcttcgacctcattttccagatgcaccagctcctattaataagttagcaaggaaagtgtatgtcacgtgcaggaacagtgaggcagggacaggggttctgctccttctcacttcaccaccggcacacagcttgcccctgtctttgcccccaaaggtattttgtgtctagtgtcaaattggagctattcttcactggtccttaaccttgggttttaaaaagaaggcttctctgtttgggtagcgtaagagctgagtatagtaagtcctcttccaaagagatggcaatatgctgggcatctactttaaaacaaagttgtctgatttttgcaagagaggttaggattttattgttcttatttccctttacagttctgcagttccatcacagtatttttttaaataactcaggtgtatgagaagaaattagaaaagaaaattaacttatgtggactgtaaatgttttatttgtaagattctataaataaagctatattctgt

SEQ ID NO: 4743 - DNA, 4551 bp, Homo sapiens
tcctgctgccttacagtgcccccagagccggctaggggcatggacttcacctcctggtcctctcttcctcaggtatggcgttgacggtggatgtggccgggccagcgccctggggcttccgtatcacagggggcagggatttccacacgcccatcatggtgactaaggtggccgagcggggcaaagccaaggacgctgacctccggcctggagacataatcgtggccatcaacggggaaagcgcggagggcatgctgcatgccgaggcccagagcaagatccgccagagcccctcgcccctgcggctgcagctggaccggtctcaggctacgtctccagggcagaccaatggggacagctccttggaagtgctggcgactcgcttccagggctccgtgaggacatacactgagagtcagtcctccttaaggtcctcctactccagcccaacctccctcagcccgagggccggcagccccttctcaccaccaccctctagcagctccctcactggagaggcagccatcagccgcagcttccagagtctggcatgttccccgggcctccccgctgctgaccgcctgtcctactcaggccgccctggaagccgacaggccggcctcggccgcgctggcgactcggcggtgctggtgctgccgccttccccgggccctcgttcctccaggcccagcatggactcggaagggggaagcctcctcctggacgaggactcggaagtcttcaagatgctgcaggaaaatcgcgagggacgggcggccccccgacagtccagctcctttcggctcttgcaggaagccctggaggctgaggagagaggtggcacgccagccttcttgcccagctcactgagcccccagtcctccctgcccgcctccagggccctggccacccctcccaagctccacacttgtgagaagtgcagtaccagcatcgcgaaccaggctgtgcgcatccaggagggccggtaccgccaccccggctgctacacctgtgccgactgtgggctgaacctgaagatgcgcgggcacttctgggaggacgcttgtgctatggagggaatgagattgtcactggaagctttggaggggatggtggagggcgccaagcggagggacaggaggaagaccaggagacccatccagccaagctggtgagacaacctctgatcctgaggaccggccgcccaccaagggttgggcccccggggccaggttgatctaccgacaccttccacttctttcctgggagagactgctggcttcattggtgattgatttggaggggggaaaaagggcagggtggctcaggctttaggcccaggtactggggaggcctgaggagccctcctggagctcaggaggccgaggctgccttaagctgtgatcatgccactgcattccagcctgggagagagagaggacctgtctgttgaaaaaaacacaaaaacaaatgaatgcatgtggccagtgccaggtgagctgccctgggggttcactggagttgaggcaggggacagtagtctcccctgccagcctaggattttgggcgtcattcacccactacccctagtgctagtcccagaggatgctgcggagggggcagcctcagctctcttttcagagaagatcaaagctgggcttcccagggtgcctggctggtccctgccggcagctttgtgctctccggctctttgtgaaaggaatcttggcgcagatgtttgtgttgcctcctcaggcacctgtagatataatttacaccatgatatcattgtctcaccttttgcctgggtggctgcctgagaaaggtctttctttttatagaaaagatcaaggctgtctggcgcgggactccatgagccccaggcgctggtcagaaacggggtagtctctttggcgccacctagtgtccagtttggcccatggcggggcccattcacggggcaacactgggcttctgggcacagcgggaatacagaaagatacagcactcctcatgccttcctggaggtagaaggccagtggcagcgactgagctggcatgaatgaataagaggatgtggcactgagcgccaagggctaccttggaacgcaccgaggagcgtcccgtgagttcaaagcagtggccgtgatgcaaaaggagggctgggtcttggagacgtggagaagaggaatgctgagtgatggggtggctgctggggggatgcttagctcagagcagtggctgatggggacactgagataagatcggaggggagctgtcaatgccagaagtggtttgaacttccccttgaggctctagggacattttgttttgagacatggtcttgctctattgcccaggctggagtgcagtggtacaatcttagctcactgcagcctccacctcccaggctcaagagatcctcccacagcctcccaggtagctgggactacaggcgtgcaccaccacacccagctaatttttaagtttttttttttttttaagagatggggtctcactatgttgcccaggctggtctcgaacttcgggccccaagccatcctcccaccttggctttccaaagtgttgggattacaagcgtgagctaaccttgcccagcctctgggaacacttggaaggttttaagcagagaagtgacaggttggaaaagatggtttggattattgatatggacagattcccacctgtatgtagcacgccatgctgggccagcagtgtcataggagtggagggggataagtggggactggggacatgtgaaatgatgggcattccagtgaggcatcgaatgccttctgagggctttgtaggttccagctcaaatccccctctggctcttgttctttggtgtggcagccatctctcctcccaggggtcctgagggtttcagcaccagggttctctgcagccacacaatcagcccggctcgggagcaaactcccctggaagaacggagttatgagttggtcagcagaggaggctggggacaggcagtttttggtcttttacctctgatcttgtccccaacctaagccagctagctgcgtgctcccactccctctgccgcacgccgcccgtctatgttcccggactttgtccagtgcagtgccctcttcccttcctgcactgaggagattaactgaagtgacagattagagttagaagtggcccaaaggagcatctggtacaaccccctttggttagagaagggaaagtgacttttccaaagctgcacagctagacagtcataatggctaagctctgggggtgcttttgatgtgctagggatacttccaatgctttaactcacttaatcctcacaacccgagataggtactgttaccatcctctctgcagacgaggaaaccgaggaccaggaggttcagtaaatggtccaagtactcctagctagtaaggaatggatctacagcctgcctcccaggtttctggcttgtggggggcagagtttgtccctctgtcatcagaggcagccttccaggcacagctctggtcacctctggtcacaactggaggtcaccacagccctccccagcgctctgtaggctctcagctttgtgcttcctcccacgggtactagctccagctgagcttgcaggaaacccacttcctgaagccaggacttccccatgggaagtgcaggggccactgggcagcctgagggctgaccctgctcaggacactgtctgtctcaggaactcatggcagtggtttaccttgtcaggagtgcatggacgggctgcccctcccattccttcaagcatcactcagagagccctggcctggctctaggcttgggactgcggctgccacaggaagggggcatccccctactttgggtgttgggtcagatcctgcccccgtgcccgccagggctcaggttcctctgagctggtcctgggccaggacgcatctgcatggcggtggtggggaggaggggtgcgccatggcctggaggggagtgtgtgttggggtgtgtgtgtggaggttcttttgagtcacacacaaagcattgtgctgagacactgcattcctgctggctgggcttcctgtttccagatgcattcctgtcccagagtcaccacagagactgtttggaatcccgccccacattctccaaattcagggcgcgatctggcaaaggctccctcccccaccctcttactttggagggagtctgggctccctcctacccagggagggctggcagggctctggcacggccggggtgtgattccacacatcttcttggtcttgcataaggcagttcctggagacccagcactctggttctctctctgcctgtgagaagcggaatgggtactgtctaggaggactgggcagggtgggggcaacccagaggacccatggctagcagggaagggcctgggcttgaatgtgactctgttgagacatggccagcaattctggcacttggctgtcattcggctggcctgcgcagagattggctgtgggcctcagtttccccattttataaagttttaaaatctg

SEQ ID NO: 4744 - DNA, 973 bp, Homo sapiens
cgctgcttaggctccgcggcctccaagctgtagctatgacggcgcgcgggactccgagccgcttcttggccagcgttctccacaacggactgggtcgctatgtgcagcagctgcagcgtctgagcttcagcgtcagccgcgacggcgcctcgtctcgcggcgccagggagttcgtggagcgggaggtgatcgacttcgcccgacggaatccaggggtcgtaatatatgtaaactcgcgtccgtgctgcgtgcccagagtagtggccgaataccttaacggggctgtgcgcgaggagagcatccactgcaagtcggtcgaggagatctcgacgctggtgcagaagctggccgaccagtcgggcttggacgtgatccgcatccgcaagcccttccacaccgacaaccctagcatccagggccagtggcaccccttcaccaacaagccgaccacgttccgcgggctacgcccccgagaggttcaggatcctgccccagcccaggtgcaagcacagtgaagagttgccccaccaactgcagccccaggctttggactgttactccggtaaaggtggttcttcccctttgggattccaagcccaggcaaatggaacccatcaatgggcaagttgacagaggttctgcttgggataatgaagagctgcctgtttctttccagtgcctgcttctgggggcagtgaccttgtgaaccactcatttttatgcaagtggcatccctaaaacctgagatgaggaagacttcaagggttttacagggcccttgttttttaaatccaaattgataataatgatctcaaaacacagtgagaggtctgaaggctggcttctgaagaatccctgatgtcttattggaacaaccactgagctacggagagctctgctgtgatgggctaggcactttatatctgtgtgaatacagatttataaaacaggttaataaacttatccaaggtca

SEQ ID NO: 4745 - DNA, 1801 bp, Homo sapiens
ggacccaaccagagcctggcctgggagccaggatggccatccacaaagccttggtgatgtgcctgggactgcctctcttcctgttcccagagcaaagctaccagggggacatgtaccccacccggggcgtgggctatgagaccatcctgaaagagcagaagggtcagagcatgttcgtggagaacaaggccttttccatggatgagccggttgcagctaagaggccggtgtcaccatacagcgggtacaatgggcagctgctgaccagtgtgtaccagcccactgagatggccctgatgcacaaagttccggtccgaaggagcttacgacatcatcctcccacgggccaccgccaacagccaggtgatgggcagtgccaactcgaccctgcgggctgaagacatgtactcggcccagagccaccaggcggccacaccgccgaaagacggcaagaactctcaggtaagcgaactgacccagagaggccaggccaacaccaaccaggttttcctaagactctgacgtccagcagcctctctccgtggcccaccctgggctcagtccccacaaagtaaaacgagatggtagaagccctcttcccgggactgcacggcatcctgatcctcattcctctgtacccaggctggaccgggcccagcacctttcccatccttgtcattggagctgggaggggccggaggccaccaacctgaagcagtggaccgagtgggcccccgtgaagccctgagtgtgtgactggagcgcctagggccacctccctttcctgcccagcccatcttcctggtccccaggtggctgcagctacaaggagctgtccgcgggcccccaggctgcctccaactcccctcttgacacgcccccctccccccaaatcatagtccctgtgtccccaagctgtggttcagattgccttcttcccctctgtgaacaacaggcctcagtgccccgtcttgactctggaccttcctggccctgccatcttggtgtctggcactggcttgtcccaccctctgcctagatggatctcctccatgagtctttggagccaagccagggcagaagttggcccttgcccttctcaccagggcctcctgccaccacctggactgtggaaggccactgagatgggggcagagctcagcccgaggcttgggcacactgcttctctccacggcctgtgggtcctggatctgagcccttggggtgtttcactcaagagccactgagccgtccccatcttccacaaagcagtttccacaagcaagccagggccagccctgcctgcactctgcccgcagtgcccctcaacgtctgggatgaggatgagcctgctgagatgagggcagctctctccatccagcagtacctcatggagtgctcactaaggagttaggaatggcaggccacgctggcatctggggttcaaggtggctcctgtggcaggaacaggtgtccatgaccctgattacctggatctcacaggttctgggaatgcaataggggcctgctgtggctattccaacatctctggtcagggcctggaagtaccttaggacacatggggttggggtcaggactgcattctcagggaccagtggagagccctggaccagatgaactggagtctaggcctctctcgtgactgggacttgtgggacgtgggaggcctgtgagatccaggactaaagattatgctgtttcctaatgggcagatatgtaagtaggtaagtgggatcctcaggtaagcgggatccagaactaaagactgtgctatttcctg

SEQ ID NO: 4746 - DNA, 423 bp, Homo sapiens
gatgtcagcttccttagtctgggcaactaaaaaaactaaaaaactagaaaaactaggaaaactaaaaaaactagaaagaggaaactgcagcccaacggggctgccttcaccctgacaccctcagcagtaaacaagataaaacaacttcttaaagataagcctgagcatgtaggtgtaaacgctggtgtctgaatcaggggctgtaatggcctttcttatactgtagaatatacaaagacaaaaggagattctgatgaagaagttattcaagatggagtcagagtattcatcgaaaagaaagcccagctaacacttttaggaacagaaatggactatgttgaagacaaattatccagtgagtttttgttcaataacccaaacatcaaaggaacttgtggctgtcgagaaacctttaatatttga

SEQ ID NO: 4747 - DNA, 2744 bp, Homo sapiens
  misc_feature (2472)..(2472): n is a, c, g, or t
cctggcaaagcgccaggccccgcgtgggctcccggcgagcggttgatggcgagggggcgcggcgcggctctgtagcccgagttcccgacgctggaggcccggcccgcctcagccgcattgtcccgggccgcgcgcaccggccttgagctgcgccgccgcagcacccgccgcacccgcggggccatgcggagagccgccgggatggaggacttctccgcggaggaagaggagtcctggtacgaccagcaggacctggagcaggacttgcacctagctgcggagctggggaagactctgctggagaggaacaaggagctggaggggtccctgcagcagatgtactccaccaatgaggaacaggtgcaggagatcgagtacctaaccaagcagctggacacgctgcggcacgtgaacgagcagcacgccaaagtctatgagcagctggacctgacagcccgggacctggagctgaccaaccacaggctggtgctggagagtaaggctgcccagcagaagatccatgggctgacggagaccattgagcgcctccaggctcaggtggaggagctgcaggcccaggtggagcaactgagaggcctggaacagctgcgagtgctccgggagaagcgggaacgcaggcgtaccatccacaccttcccctgcctcaaggagctgtgcaccagcccccggtgcaaggatgctttccgcctacacagttcctccctggagctgggcccgcggcccctggagcaggagaacgagcggctgcagaccctggtgggggcgctgcgctcccaggtgagccaggagcggcagcgcaaggagcgggcggagcgcgagtacaccgcggtgctgcaggagtactcggagctggagcgccagctgtgcgagatggaggcctgtcgcctgcgtgtgcaggagctggaggccgagctgctggagctgcagcagatgaagcaggccaagacctacctactgggtccggacgaccacctggccgaggccctgctcgcacccctcacgcaggcccctgaggccgacgatccccagcccggccgcggggacgacttgggcgcccaggacggggtctcctcaccggcagcctctccaggccacgtggtgcgcaagagctgcagcgacactgcgctcaacgccatcgtggccaaagacccagccagccggcacgcgggcaacctcacactgcacgccaacagcgtgcgcaagcggggcatgtccatcctgcgggaggtggacgagcagtaccacgcgctgctggagaagtacgaggagctgctgagcaagtgccggcagcacggggccggagtgcggcacgccggcgtgcagacctcgcgccccatctcccgggacagctcgtggagggacctgcgcgggggtgaggagggccagggtgaggtcaaggcaggagagaagagcctgagccagcacgtggaggccgtggacaagcggctggaacagagccagcccgagtacaaggcgctcttcaaagagatcttctccaggatccagaagaccaaggctgacatcaacgccaccaaagtcaagacgcacagcagcaagtgacccttctccggcctgcagcctcccccagggtggaagccgtggggtccctcaggcctgggcggtgcagcttccagagagcgagcgccctttagcggcctgccaccacagcacgcggcctcctgatccggaagcacgcagcatgttccctgctgagcggaggcagcccacctgtcctgcctcccaggagcccttggccacctcgcgccagcccaaaggcgcagctctgagttcaaagccaaatgtccccactaccccagggatcccccagctcccccagcccctggcttcctgaccctgcgcctcaccctcagactggtgaccaggcttctgaaagccattctggatcagttggctttttttttttttttggttaagtttgttttttctaagagatttgcaatgcaaggtctccttgaccccttgccacaactggaaacacttgaaaggggaccccagggccagctgtttcaggggtttcctggaccacccactgcttctccccaaccctgatgcgctgacattcccttagcaccagctgtcccacctccagggtcctgaccaggtcagagatgtcccctgccatgcagagcaggaagcctcagctgggcctggagtgtccctgctccagccctgccagggacaggtttctccctggatactcttggcccaccgcagatctgtagccagtcagaggaggaggagaaggagcccctcagcagagtggtgcagtttcgctcagagcttgtctccttggcttccaaccccagaaatgcctgctgggccttaagctttccaggggccggggcagtggggagcccccatcccttcacaccgccaccaactaaccaagcttggcctctgactcccgtctctgtgcttgcccccatctcnagggaccatgatgtctcagtcactccacgctccccacaggccaaccctggcacaggtcatgtctgcagcccccagaatgttctggacatgcaccaccagccggtggtcccaatgtccacccctgcctccccttcactggggactggggttttcgccccatgctgcatcgtgttgtattgggatggggctgaggaacatgctccctccctccctcccataaaatgcctgctcttcacctcccacctttgtggggggcttttgaggacccagct

SEQ ID NO: 4748 - DNA, 2151 bp, Homo sapiens
ggttttgtgaatgattctgtgactaagtctattgtggctttgcgcttaactctggtggtgaaggtcagcacctgtgtgccgggggagagtcacgcaaatgacttggagtgttcaggaaaaggaaaatgcaccacgaagccgtcagaggcaactttttcctgtacctgtgaggagcagtacgtgggtactttctgtgaagaatacgatgcttgccagaggaaaccttgccaaaacaacgcgagctgtattgatgcaaatgaaaagcaagatgggagcaatttcacctgtgtttgccttcctggttatactggagagctttgccagtccaagattgattactgcatcctagacccatgcagaaatggagcaacatgcatttccagtctcagtggattcacctgccagtgtccagaaggatacttcggatctgcttgtgaagaaaaggtggacccctgcgcctcgtctccgtgccagaacaacggcacctgctatgtggacggggtacactttacctgcaactgcagcccgggcttcacagggccgacctgtgcccagcttattgacttctgtgccctcagcccctgtgctcatggcacgtgccgcagcgtgggcaccagctacaaatgcctctgtgatccaggaacacactgtgaattgtacaaggatccctgcgctaacgtcagctgtctgaacggagccacctgtgacagcgacggcctgaatggcacgtgcatctgtgcacccgggtttacaggtgaagagtgcgacattgacataaatgaatgtgacagtaacccctgccaccatggtgggagctgcctggaccagcccaatggttataactgccactgcccgcatggttgggtgggagcaaactgtgagatccacctccaatggaagtccgggcacatggcggagagcctcaccaacatgccacggcactccctctacatcatcattggagccctctgcgtggccttcatccttatgctgatcatcctgatcgtggggatttgccgcatcagccgcattgaataccagggttcttccaggccagcctatgaggagttctacaactgccgcagcatcgacagcgagttcagcaatgccattgcatccatccggcatgccaggtttggaaagaaatcccggcctgcaatgtatgatgtgagccccatcgcctatgaagattacagtcctgatgacaaacccttggtcacactgattaaaactaaagatttgtaatctttttttggattatttttcaaaaagatgagatactacactcatttaaatatttttaagaaaataaaaagcttaagaaatttaaaatgctagctgctcaagagttttcagtagaatatttaagaactaattttctgcagcttttagtttggaaaaaatattttaaaaacaaaatttgtgaaacctatagacgatgttttaatgtaccttcagctctctaaactgtgtgcttctactagtgtgtgctcttttcactgtagacactatcacgagacccagattaatttctgtggttgttacagaataagtctaatcaaggagaagtttctgtttgacgtttgagtgccggctttctgagtagagttaggaaaaccacgtaacgtagcatatgatgtataatagagtatacccgttacttaaaaagaagtctgaaatgttcgttttgtggaaaagaaactagttaaatttactattcctaacccgaatgaaattagcctttgccttattctgtgcatgggtaagtaacttatttctgcactgttttgttgaactttgtggaaacattctttcgagtttgtttttgtcattttcgtaacagtcgtcgaactaggcctcaaaaacatacgtaacgaaaaggcctagcgaggcaaattctgattgatttgaatctatatttttctttaaaaagtcaagggttctatattgtgagtaaattaaatttacatttgagttgtttgttgctaagaggtagtaaatgtaagagagtactggttccttcagtagtgagtatttctcatagtgcagctttatttatctccaggatgtttttgtggctgtatttgattgatatgtgcttcttctgattcttgctaatttccaaccatattgaataaatgtgatcaagtc

SEQ ID NO: 4749 - DNA, 506 bp, Homo sapiens
aactgtagcgtgaacgtgaactgtgtgaacatcagatgcccgctgcgggggctggacagcaaggcgtctcttattttgcgctcgaggttatggaacagcacatttctagaggaatattccaaactgaactacttggacattctcatgcgagccttcattgatgtgactgctgctgccgaaaatatcaggctgccaaatgcaggcactcaggttcgagtgactgtgtttccctcaaagactgtagctcagtattcgggagtaccttggtggatcatcctagtggctattctcgctgggatcttgatgcttgctttattagtgtttatactatggaagtgtggattctttaaacgctctaggtacgatgacagtgttccccgataccatgctgtaaggatccggaaagaagagcgagagatcaaagatgaaaagtatattgataaccttgaaaaaaaacagtggatcacaaagtggaacgaaaatgaaagctactcatagcgggggcc

SEQ ID NO: 4750 - DNA, 1588 bp, Homo sapiens
ccgcggagtgacaggggtccctctgggccggagccggcggcagtggtggcagcggtatcgccgccctagctcaccgcgccccttttccagcccgcgacgtcgccgcgcaagcgaggcagcggcggccgccgagaaacaagtggcccagcctggtaaccgccgagaagcccttcacaaactgcggcctggcaaaaagaaacctgactgagcggcggtgatcaggttcccctctgctgattctgggccccgaaccccggtaaaggcctccgtgttccgtttcctgccgccctcctccgtagccttgcctagtgtaggagccccgaggcctccgtcctcttcccagaggtgtcggggcttggccccagcctccatcttcgtctctcaggatggcgagtagcagcggctccaaggctgaattcattgtcggagggaaatataaactggtacggaagatcgggtctggctccttcggggacatctatttggcgatcaacatcaccaacggcgaggaagtggcagtgaagctagaatctcagaaggccaggcatccccagttgctgtacgagagcaagctctataagattcttcaaggtggggttggcatcccccacatacggtggtatggtcaggaaaaagactacaatgtactagtcatggatcttctgggacctagcctcgaagacctcttcaatttctgttcaagaaggttcacaatgaaaactgtacttatgttagctgaccagatgatcagtagaattgaatatgtgcatacaaagaattttatacacagagacattaaaccagataacttcctaatgggtattgggcgtcactgtaataagttattccttattgattttggtttggccaaaaagtacagagacaacaggacaaggcaacacataccatacagagaagataaaaacctcactggcactgcccgatatgctagcatcaatgcacatcttggtattgagcagagtcgccgagatgacatggaatcattaggatatgttttgatgtattttaatagaaccagcctgccatggcaagggctaaaggctgcaacaaagaaacaaaaatatgaaaagattagtgaaaagaagatgtccacgcctgttgaagttttatgtaaggggtttcctgcagaatttgcgatgtacttaaactattgtcgtgggctacgctttgaggaagccccagattacatgtatctgaggcagctattccgcattcttttcaggaccctgaaccatcaatatgactacacatttgattggacaatgttaaagcagaaagcagcacagcaggcagcctcttccagtgggcagggtcagcaggcccaaacccccacaggtttctaagcatgaattgaggaacagaagaagcagagcagatgatcggagcagcatttgtttctccccaaatctagaaattttagttcatatgtacactagccagtggttgtggacaaccatttacttggtgtaaagaacttaatttcagtataaactgactctgggcagcattggtgatgctgtatcctgagttgtagcctctgtaattgtgaatattaactgagatagtg

SEQ ID NO: 4751 - DNA, 1506 bp, Homo sapiens
cttccctccccgactgtgcgccgcggctggctcgggttcccgggccgacatgggcgccgccgcgtgggcacggccgctgagcgtgtctttcctgctgctgcttctgccgctcccggggatgcctgcgggctcctgggacccggccggttacctgctctactgcccctgcatggggcgctttgggaaccaggccgatcacttcttgggctctctggcatttgcaaagctgctaaaccgtaccttggctgtccctccttggattgagtaccagcatcacaagcctcctttcaccaacctccatgtgtcctaccagaagtacttcaagctggagcccctccaggcttaccatcgggtcatcagcttggaggatttcatggagaagctggcacccacccactggccccctgagaagcgggtggcatactgctttgaggtggcagcccagcgaagcccagataagaagacgtgccccatgaaggaaggaaacccctttggcccattctgggatcagtttcatgtgagtttcaacaagtcggagctttttacaggcatttccttcagtgcttcctacagagaacaatggagccagaggcgtgagaatcactcctgtgttaccttactcttcccaaggtgaaactggaagcagcttctagagaacagcttcaggtgcagaccgagaaatgacgtcatcctgataattattggacgtgtttattaattgcaccccattagcccctgtttttaaaaaatataggttagcaggacgtgggcacaggccgtgaaacatttatagggcgcctgtcacgtgtgagacatagtaatcagaggccaatggtgatgtgtgaaaatgaggatgaccagctctggttttctaggagctatggtctcataatgacaataatcagcatagtgtacttgtccttaatgttatagcatggcaggaaagaccatgggcttagaaggcagacattggttaggaggtgcagggaacatactaattcatgtgcggtcaaagcacttggcatttaatagggcaaaggtaaacagatgtagagaaatgagtctcatgcctgtaatcccagcactttgggaggccaaggtgggtggatcacttgagcctaagagatcaaggctgcagtgagccatgatggtacccctgcactccagcccaggttacagagcaagggcctgtctcagcaaaacaaaacaagcacaggccaaggagtgagatagccagcgctgatggtatctgcctcgtagtgcatgaagtgcatgtcatacactaagcagccagccagtgttggctgtcagtgttattactcacatgctttattttatttaagactttgagatagttcatgaagtgggtattattatcaatttccattttataggtgaggaaactgagcccagtgaagttaaataacttcccaaggtcattgagctgttgagtggacagctcaggtctgtttgtaaatctttaataaataacaacagctaagattc

SEQ ID NO: 4752 - DNA, 5218 bp, Homo sapiens
cttccctccccgactgtgcgccgcggctggctcgggttcccgggccgacatgggcgccgccgcgtgggcacggccgctgagcgtgtctttcctgctgctgcttctgccgctcccggggatgcctgcgggctcctgggacccggccggttacctgctctactgcccctgcatggggcgctttgggaaccaggccgatcacttcttgggctctctggcatttgcaaagctgctaaaccgtaccttggctgtccctccttggattgagtaccagcatcacaagcctcctttcaccaacctccatgtgtcctaccagaagtacttcaagctggagcccctccaggcttaccatcgggtcatcagcttggaggatttcatggagaagctggcacccacccactggccccctgagaagcgggtggcatactgctttgaggtggcagcccagcgaagcccagataagaagacgtgccccatgaaggaaggaaacccctttggcccattctgggatcagtttcatgtgagtttcaacaagtcggagctttttacaggcatttccttcagtgcttcctacagagaacaatggagccagagattttctccaaaggaacatccggtgcttgccctgccaggagccccagcccagttccccgtcctagaggaacacaggccactacagaagtacatggtatggtcagacgaaatggtgaagacgggagaggcccagattcatgcccaccttgtccggccctatgtgggcattcatctgcgcattggctctgactggaagaacgcctgtgccatgctgaaggacgggactgcaggctcgcacttcatggcctctccgcagtgtgtgggctacagccgcagcacagcggcccccctcacgatgactatgtgcctgcctgacctgaaggagatccagagggctgtgaagctctgggtgaggtcgctggatgcccagtcggtctacgttgctactgattccgagagttatgtgcctgagctccaacagctcttcaaagggaaggtgaaggtggtgagcctgaagcctgaggtggcccaggtcgacctgtacatcctcggccaagccgaccactttattggcaactgtgtctcctccttcactgcctttgtgaagcgggagcgggacctccaggggaggccgtcttctttcttcggcatggacaggccccctaagctgcgggacgagttctgattctggccggagcaccagaccctctgatcctggagggaccagagtctgagctggtccttccagccaggcctggcagccagaggtgctccgggattgcaaactcctcttctcacctgccaaagatggagaagagtgccagggacccctcaaggagggagacgctccatatcccagggcataggacttgcaggttcctaggagcaggagcatctcccatcgcacgtgctttctgctcttctgggaatttctcacactggcaaagcagtccagcctccgtcttctggtccactctgctctgagcagcctgggatgctgaactcttcagagagatttttttatagagagatttctataattttgatacaaggtcatgactatcctagaactctctgtggtttttgaaaatcattgaattctattaatgtaggtacctaaagtgaccttaactgaatgtggatgaggctggggctggtgtgggtcttttggctgcttttcaaggtgtcccccaatgtggccctcaagagccatccccactgcctggccagagccattgttgtcccctacttcctaggccatttctggggcttgggggatgaatgctgtcctgtgctgtaaacactatgcaaatggaagttatcggttgtggtgctgtgcagcgctctgtgggcgactaagtgccactcacgcagcatgttcctggcaaggagcacataccatcaagccacactatcatggtattgttctcacagtcttttggtggttgatggccactgcaaacctggcaccatcagatctcttctgatctcttgccccagtggggcctggttggtagaatgttggcattcggttgatatccaaagcctgttctcccagccgtcctcctgcagctggagccttcaggccgtattctcacgagggaacgtttgccaaggctctgacctcacagaagatgcccagggcccagaagccatcagaattatcagtggagaagcaccttttgactcttcccttccaatgtaatctctgccaacaccatgaggcttaaggtgctctaagtcatgagtgttttggtctcaaatgctgcagttttaataatctgtgactcctgagagcccatggttttttgaccttgtggttctaaaattccttgtctgacccctgtagatcttttccttgccatgtcacctcccttggcctttgatcctggaaaggtggcagagcctccactgagccaggcccagagctccttgcagtgccttcttccttgtttacctgtgggaggaaacactttttttgtcaggggcagcctggttcagagctcagaggtcacactgtatcaaagatctcaaacagcaaagtcagcatttgctgtatagagctgccacccaactctaagcaggagaaactgtacagaaagggctttgctatttttcccttttgggaaaacaatgaagtgttttaagtcctgggtggactgagagatggtttgcctgtccagacttgctctcaagcctcatccagagaaggagctgcagatgagggagcccgtacactccctgccaccactaggttgtaagcctgtagctggctggctgatttcattttggaattcatttgccatccacagccttacactaggcacacactttagagtctggggctccagtggggcccgcctaattttttttccccccaagacagggccttgctctgtctcccaggctggagtgcagtggcatgatcatggcttactgcagccttgatctcccaggctcaagcgatccttctgcctcagcctctctggtagctgagactgcatgcccagctccaaatcaccttgattcatatcagcagtaataatcacttgtgttctgaaagaaagggcaccagaagttctagcaaaattcagttgtgttctgtgagctagcactttttcctctgacccaattttcttacctataaaatggtgataaaaaccgacaggttgttcaaaggcccagatcagctaaagcatgtatataagagcacgttgtaaacttgaaagagacaaaggcacaaatgtggctgttgattaatttgactgcttctcgttgctcgtcacctccatgccaggcactgtgcttgctaattgctttatgggggcattctcttatttattccccagccctgggaaataggagctgtcattatccttctctttctgcacaaggaaaaattaatgccctgagaattgtcataattttcccaaggctgcccagctggtggtgttaagccagaatttgacctcccagagccagtttccattagctgccatgctctgctgcctctaattcacagaatgcactttctaccctgtgtgccatggagacctcctatggaaaaatgatcagccaccttaccttctactgggtacctgctgtgagtctgcctatgccagaaggattaaggaggggaggttacccaagaaacaaagcctacatgccgcttacagcccccgttggatggttgctcagtacaacagtcttgcattcagcaggtgtttgttcatcacctactatgtgtcaggctctatgctaggtactggggatacaggagagaatcaagcgtaaagtctttgttctcaaggaatttgcattctagaaagtagaagatgtaataaatgtactgtgggacatgttaataagtgctataaagaaatataaagggtttgggagcaaaaagagggagtggatctattttagatgagcccaggtaagacctctctgaagagctgtcatgaaggagggagggagcacattcctggcagagaaaacagcacgtgcaaaggccccgagactggagtgtgttcctgaagagcagccaggaggccagcatggctggagaggcaggcataggcagggaaccgagcagcaggtcagagcaggcgagctgacattctgcagcctggacggccatggcaggaagcttttagttggagagatacaggaagcctcctagggttctgagcagaagaggggcatgagctgattcacattctgaaggacctctctagctggccagtgctgaggaggttggagagagaaagggtgaaagcagagagaccagtgcagggctgttaacagggttgcaggcgagagactggggtgctgggctcccctagactaggactccagtgccctcctctcccaagagacaaaggccattgcattgaaggaggtgggaaatgattagattctgaacatatgtaattatttttcagtctttttcaaagatacaaatatttacatagttttaatcatgtaatatatacaatttaatgtcctagtgttttacttaatagtgtatcatgttttccctgttggtatgtagcctggataaatgctcttaattataaaaaattctgtcgaggagtgttccatagtttattgttttcctattatgagaatttaggccaagtgtggtggctcatgcctgtaatcccagcactttgcgaggccgaggtgggcagatcacttgaggtgaggagttcaagaccagcctggccaacatggtgaattatctctactaaaaatacaaaaaaataataataatagccaggcgtggtggcacatgcctgtattcccagctgcttgggaggctgaggcaggagaatggcttgaacctgggaggtggaggttgcagtgagccgagatggtgccactgcattccagcctgggcaacagagcgagactccatctcaaaaaaaaggagacttcatgtgcccccaatttttcactattgttatttgaaaaaatatttttatttgtaagagtttttctttatttaaaatgttcattaataaagttgttggacgggaagcaaaaaaaaaaagttgtttaagataaattcccagaagtgaatttgttagatcaaacacttaaaactttttgttatggaagaattcaaatataaataaaaaattgtgagtaataaaatgaactcacagtttcaacaatgacccac

SEQ ID NO: 4753 - DNA, 2611 bp, Homo sapiens
tgcactgagcgggacctgcgagcagcgcgggcggcagcccgggggaagcggtgagtcgcgggcggcaggcccagccagtccgggaccatgtctggagaactaccaccaaacattaacatcaaggaacctcgatgggatcaaagcactttcattggacgagccaatcatttcttcactgtaactgaccccaggaacattctgttaaccaacgaacaactcgagagtgcgagaaaaatagtacatgattacagaaaatgaattgtggagagcaaagtacatctatgattcagcttttcatcctgacactggtgagaagatgattttgataggaagaatgtcagcccaggttcccatgaacatgaccatcacaggttgtatgatgacgttttacaggactacgccggctgtgctgttctggcagtggattaaccagtccttcaatgccgtcgtcaattacaccaacagaagtggagacgcacccctcactgtcaatgagttgggaacagcttacgtttctgcaacaactggtgccgtagcaacagctctaggactcaatgcattgaccaagcatgtctcaccactgataggacgttttgttccctttgctgccgtagctgctgctaattgcattaatattccattaatgaggcaaagggaactcaaagttggcattcccgtcacggatgagaatgggaaccgcttgggggagtcggcgaacgctgcgaaacaagccatcacgcaagttgtcgtgtccaggattctcatggcagcccctggcatggccatccctccattcattatgaacactttggaaaagaaagcctttttgaagaggttcccatggatgagtgcacccattcaagttgggttagttggcttctgtttggtgtttgctacacccctgtgttgtgccctgtttcctcagaaaaggtatgtatttgttattcgtcagaatcatcatgagtattaatcctaaaaaccaattgaaggtgcaggtgccattattccatttcattggcagggaagttgagactcaaaagatactgaagccagggtctcttaaaaggaagggatggaggcagaaatcaaacccacatctgtctaatttcagatgcacccagctcttttctacccccttccattaaatttgaaaatgctttattcttttgtgagaatcagattaactctgatgcaaatttgcttttatgaaaatttaaaatatggtccaatccactggcaaatgcatctgtaatacagatatgataggatgcaagttccacccccagggacagcaattatatgcacttagcttaggtggttggtatatttgcttcctttcttcccacttagttttttgccttaaaagctttcttgtgcacgcctctcatcgcaaactgcccttgaatcctgcctttgatgtgagaacaggactaactggcgttaaatcggcattttctacatcaggtctccagcctgctcttgacctgactccaacacacaaagcagcggcattttgttgtctgtcattttctgtaagtgttaccaggccccttgccttggtaataccctttcctttgtgggccagtaggtcccgaacatatggtctttaatcccccagccttgcggagttggttttggatgaggtgttctgttctagaactaatgctgtcagatccctctacctgatcgagaactccaccttgtatctgctctcccactctgtctccgaccctgctgttcttgaatagaaatttaaacctcatggacaggagcccttcatcaccttggagcctactgaagagccccccttgaagagggcaggaccttcagaacttgctctgggagcctgattcagatgaatttcctcatctctacagtgggataatgatacctgcttaattgtacaaaccccagagtcttggggctcaacctgagaatgtccatttctgtagtatgtggcttatgaacactggtgttcagcagctggccttgatttagcagtttagactttgagcacataaaatgccaaggggtgtgcctgataccaagttgtaaaacacctaagaaatgtagctgtaattattttcagattgaaagggttttagatttgaaaacccatagagaaactttctactttggccttttttctttgagtgctgcaagaaataaaatatagcccaacatttattttttatgattcattgaaactctaggggtagaaatggaaagctttctgtaactactagtgtccttaggtcaaggccctcagaaagcgtgtggttttacatttgagaaaccaatcctcttttgttttactgtattttaaaatagcttcttactctgttttgttgtttatacattgtatgtttggcttcttgaggtctctggctcctcagtttttccttggctcataacatagtatcctcattgatccaagcatgaccctgttttgcttatttttattttacttatactaataatataatgaatatccacaaattcagtgcccaatgaggcaggagaatcgctcgaacccagtaggcagaggctgtggtgagccaagatcacgctactgcattccagcctgggcaacagtgcgagattctgtctc

SEQ ID NO: 4754 - DNA, 1876 bp, Homo sapiens
tggttgacctgccttgggcttaggtagtagagtctgcagacctgtgggcctggcccggagaggacctcgtgagtcttctgacatggactctgaagcctcaaaccaagagaggtgtctgtctagccctgatagtcgggcagcttagaggagtggggaggagaactcagcctgagttcagtcaagatgtaagtagtagcaaggggaacatggtgcattcaggtcattttgtgtgggattctatagctcctgatgaagccattctggggtaaaggagcttattctggaacatggcacccagaacctggtgcccagcaggaatttttggcctcttttgcccacttacccttgcctgctcttccctcaccattgccctgactgactgccaacccatcatccttgtgtctcccacacttagtctctggatggtcgtcagatccgtgtggatcatgcaggcaagtctgctcggggaaccagaggaggtggctttggggcccatgggcgtggtcgcagctactctagaggtggtggggaccagggctatgggagtggcaggtattatgacagtcgacctggagggtatggatatggatatggacgttccagagactataatggcagaaaccagggtggttatgaccgctactcaggaggaaattacagagacaattatgacaactgaaatgagacatgcacataatataggtgagacttggatatcggcattgagtgaacctgtttgtcacactctgtcatgaccctctcaccttttctggcaagactgctctgcatttctgctgccctcatacctcacccagccaacctaccaaacattcctagctaggccttccttgctctcaggtgcatatcagagcaagtttgctagggggtgggatctgaaaacccatctcctataatcttctactcttgtgtgggatggaggaaatgaaggtgtgtccctgttgtccaaccctcagcatcttcatcagctctaggaggtgagcatgttgtcagctgttacttcatgacatcacaattctccccctcttgctgttcccagatacacaaggaataatttctgatccaggatcgtccttccaaatggctgtatttataaaggtttttggagctgcactgaagcatcttattttatagtatatcaaccttttgtttttaaattgacctgccaaggtagctgaagaccttttagacagttccatctttttttttaaattttttctgcctatttaaagacaaattatgggacgtttgtagaacctgagtatttttctttttaccagttttttagtttgagctcttaggtttattggagctagcaataattggttctggcaagtttggccagactgacttcaaaaaattaatgtgtatccagggacattttaaaaacctgtacacagtgtttattgtggttaggaagcaatttcccaatgtacctataagaaatgtgcatcaagccagcctgaccaacatggtgaaaccccatctgtactaaacataaaaaaattagcctggcatggtggtgtacgcctgtaatcccagtgacttgggaggctgaggcaggagaatcgcttgaacccgggaggcggaggttgcagtgagctaagatcgcgccactgtactccagcctgggcaacagcgagactccatctcaaaaaaaaaggaaatgtgtatcaagaacatgattatccaggggtattttctaattcagatcatcaaactgattatatagaagagttggctttaaaatgtttgcaaatgtctttttttttttaatactggaagaaaaaatattctgttgtgtctcatacagtgcttaggatgtctttcacagagcttattaaaaagatgaaacctg

SEQ ID NO: 4755 - DNA, 1820 bp, Homo sapiens
cctgtgaggggatccgacttgccggcagaacttacgctgcgggaccccgggcactgttgctgctgcgggagactgtgggctgtttagtgccatgcaccctttacagtgtgtcctccaagtgcagaggtctctggggtggggaccattggcctctgtgtcttggctgtcgctgaggatgtgcagggcacacagcagtctctctagtaccatgtgtcccagtccagagaggcaggaggatggagctcggaaggatttcagctccaggctggctgctggaccgacttttcaacattttttaaaaagtgcctcagctcctcaggagaagctgtcttcagaagtggaagacccacctccctatctcatgatggatgaacttcttggaaggcagagaaaagtctacctcgagacctatggctgccagatgaatgtgaatgacacagagatagcctggtccatcttacagaagagtggctacctgcggaccagtaacctccaagaggcagatgtgattctccttgtcacatgctctatcagggagaaggctgagcagaccatctggaaccgtttacatcagcttaaagccttgaagacaaggcggccccgctcccgggttcctctgaggattggaattctaggctgcatggctgagaggttgaaggaggagattctcaacagagagaaaatggtagatattttggctggtcctgatgcctaccgggaccttccccggctgctggctgttgctgagtcgggccagcaagctgccaacgtgctgctctctctggacgagacctatgctgatgtcatgccagtccagacaagcgccagtgccacgtctgcctttgtgtcaatcatgcgaggctgtgacaacatgtgtagctactgcattgttcctttcacccggggcagggagaggagtcggcctattgcctccattctagaggaagtgaagaagctttctgagcaggttctgcagctgattcatgagagagataacatctgtaaacagatccacctgccagcccagagtggaagcagccgtgtgttggaggccatgcggaggggatattcaagagaagcttatgtggagttagttcaccatattagagaatctattccaggtgtgagcctcagcagcgatttcattgctggcttttgtggtgagacggaggaagatcacgtccagacagtctctttgctccgggaagttcagtacaacatgggcttcctctttgcctacagcatgagacagaagacacgggcatatcataggctgaaggatgatgtcccggaagaggtaaaattaaggcgtttggaggaactcatcactatcttccgagaagaagcaacaaaagccaatcagacctctgtgggctgtacccagttggtgctagtggaagggctcagtaaacgctctgccactgacctgtgtggcaggaatgatggaaaccttaaggtgatcttccctgatgcagagatggaggatgtcaataaccctgggctcagggtcagagcccagcctggggactatgtgctggtgaagatcacctcagccagttctcagacacttaggggacatgttctctgcaggaccactctgagggactcttctgcatattgctgacctgagaggatggcctcagagctgacttgggcaatcctccccaacaggaaggggagacattgcctgccactgaggaaacaggtcatgaaggtggagataagctgcaaggggcgaagcaactttatgtcagtggaaaacgtgtctctttaaagctgctatgtgaacagcttttacagtcattaaatttacctaaact

SEQ ID NO: 4756 - DNA, 924 bp, Homo sapiens
atggccgcgcttgcaccgctgcccccgctccccgcacagttcaagagcatacagcatcatctgaggacggctcaggagcatgacaagcgagaccctgtggtggcttattactgtcgtttatacgcaatgcagactggaatgaagatcgatagtaaaactcctgaatgtcgcaaatttttatcaaagttaatggatcagttagaagctctaaagaagcagttgggtgataatgaagctattactcaagaaatagtgggctgtgcccatttggagaattatgctttgaaaatgtttttgtatgcagacaatgaagatcgtgctggacgatttcacaaaaacatgatcaagtccttctatactgcaagtcttttgatagatgtcataacagtatttggagaactcactgatgaaaatgtgaaacacaggaagtatgccagatggaaggcaacatacatccataattgtttaaagaatggggagactcctcaagcaggccctgttggaattgaagaagataatgatattgaagaaaatgaagatgctggagcagcctctctgcccactcagccaactcagccatcatcatcttcaacttatgacccaagcaacatgccatcaggcaactatactggaatacagattcctccgggtgcacacgctccagctaatacaccagcagaagtgcctcacagcacaggtgtagcaagtaatactatccaacctactccacagactatacctgccattgatcccgcacttttcaatacaatttcccagggggatgttcgtctaaccccagaagactttgctagagctcagaagtactgcaaatatgctggcagtgctttgcagtatgaagatgtaagcactgctgtccagaatctacaaaaggctctcaagttactgacgacaggcagagaatga

SEQ ID NO: 4757 - DNA, 1202 bp, Homo sapiens
cagccggtccaggcctctggcgaacatggcgcttgtcccctgccaggtgctgcggatggcaatcctgctgtcttactgctctatcctgtgtaactacaaggccatcgaaatgccctcacaccagacctacggagggagctggaaattcctgacgttcattgatctggttatccaggctgtcttttttggcatctgtgtgctgactgatctttccagtcttctgactcgaggaagtgggaaccaggagcaagagaggcagctcaagaagctcatctctctccgggactggatgttagctgtgttggcctttcctgttggggtttttgttgtagcagtgttctggatcatttatgcctatgacagagagatgatatacccgaagctgctggataattttatcccagggtggctgaatcacggaatgcacacgacggttctgccctttatattaatcgagatgaggacatcgcaccatcagtatcccagcaggagcagcggacttaccgccatatgtaccttctctgttggctatatattatgggtgtgctgggtgcatcatgtaactggcatgtgggtgtaccctttcctggaacacattggcccaggagccagaatcatcttctttgggtctacaaccatcttaatgaacttcctgtacctgctgggagaagttctgaacaactatatctgggatacacagaaaaagcctccatcttggcaagatatgaaaattaagtttatgtacctaggaccatctagttagttccacaaagacagatgttttgtgccaagtaagtatcatcctcatttacaagaggggtcacaaactgctggcctcccccaacttctacctatcaagttctgttaggcctacatcgtggaatttttgtttttgaatcagtattttaaaattgggtgattttggctgggcgcagtggctcatgcctgtaatcccggcactttgggagactgaggcaggtggatcacgaggtcaagagatggagaccatcctggccaacatggtgaaatcccatctctactaaaaatacaaaaattagccaggcatggtggcgtgtgcctgtagtcccaggtactcgggaggctgaggcaggagaactgcttgaacccaggaggcagaggttgcagtgagctgagatcatgccactgcaccccagcctggcaacagaacaagactccatctc

SEQ ID NO: 4758 - DNA, 2235 bp, Homo sapiens
gtctgcgagaccgacttggacggagccgagctgaggctcggcttcctgctgatggtcagggttttggcaactccccggtgtgagaggggtagggagtgctcccggcggcgacggggccgagttcaccagccgccggggcagtagtcgaaggcccggcgcggcatgtcctgggtgccgcggtgcgggcagtgaacgcgcgccgggcgggatgggccggcgccgggcgccagagctgtaccgggctccgttcccgttgtacgcgcttcaggtcgaccccagcactgggctgctcatcgctgcgggcggaggaggcgccgccaagacaggcataaagaatggcgtggtgagagcgcagggccactggggctgggtcttgctgcgggctggcggcgattccagggtggccggggggtcgcggggcgggccacactccagcttcgggccctgcccacttctgttgggaagacccgcttgcctgacgcccaggggcgaatttcagtcgagaactcagcgggcggaggagaggcttttaaggtaaagtgaaaactgcacacagctgcagagtcgccaggaacgcttcagctccgcctcagagcagctccaggggtcttatactggccttttccgggaggtcttgcctgccctctagcagcggcgagagtggtgcatttgggtttaggctaagttccttccctctcctgagcttcaccctgttctgtaaaatagaggtaataatcccagtcctgctcactgtgtagatttgtgaggcccaaatgagagaaaaaagactcgagaaacccttgtgaactagaacgtgcagaaagcaaaggggtaagacatcagactcttccctaaacgtgctctctgggcacccctgaacttgctcatccgggttccccctcccacagcactttctgcagctagagctgattaatgggcgcttgagtgcctccttgctgcactcccatgacacagagacacgggccaccatgaacttggcactggctggtgacatccttgctgcagggcaggatgcccactgtcagctcctgcgcttccaggcacatcaacagcagggcaacaaggcagagaaggccggtgaggagctccctctctacccccttggggaaagggttgaacgagtaaggtcactcttggtgtctctaaagaagtgggtctggaagtagggttttggtagcaagctagaagttgtatgggcacctgccatggagagaggggccagtactccttactgtagaagcctggaacctggccaagtgtttgtgttacaggttccaaggagcaggggcctcgacaaaggaagggagcagccccagcagagaagaaatgtggagcggaaacccagcacgaggggctagaactcagggtagagaatttgcaggcggtgcagacagactttagctccgatccactgcagaaagttgtgtgcttcaaccacgataataccctgcttgccactggaggaacagatggctacgtccgtgtctggaaggtgcccagcctggagaaggttctggagttcaaagcccacgaaggggagattgaagacctggctttagcttccctgcttcctgggaatcaggagcctggacactgccatctctagagcagagtggaggcctggactccctttgctcactccattcgggtccacagctgaggttgccgctgacaagatgaatgggcactgcctgcccttctagtgaaaaggcttggctatggccctgtgtgactccaggtcccaggaaccttgccttcgtcatctgtggatccatccagaacagcggtatctgaagcccaggccatactccctgcctcctttcttctgcctaccagaggctccagagttgagcttgtccttatctagaaacatgtgaagatgcccaagagcctggaggcactgctgtccttcctgcagaaacagtttctcctcctcccctcagccttgtggccagttcctcttcacatgaagcccctggcatttgctggggaagggactggcctggtacttgctgttagggcaggaaggggcaaaaggaagacttgggtagtaatctgggggttcagatgggtagcactaagccagctggcctaaagatgcaataagttcctaggtagtctacccttaccttgaggaatgggaaaatgaacctcagcccattaggcaggaaaagttgatatttaataaacaaggaaagagtgaactgagacccc

SEQ ID NO: 4759 - DNA, 1966 bp, Homo sapiens
aggtgcgcatgcgcagtgcgcgtctgcgagaccgacttggacggagccgagctgaggctcggcttcctgctgatggtcagggttttggcaactccccggtgtgagaggggtagggagtgctcccggcggcgacggggccgagttcaccagccgccggggcagtagtcgaaggcccggcgcggcatgtcctgggtgccgcggtgcgggcagtgaacgcgcgccgggcgggatgggccggcgccgggcgccagagctgtaccgggctccgttcccgttgtacgcgcttcaggtcgaccccagcactgggctgctcatcgctgcgggcggaggaggcgccgccaagacaggcataaagaatggcgtgcactttctgcagctagagctgattaatgggcgcttgagtgcctccttgctgcactcccatgacacagagacacgggccaccatgaacttggcactggctggtgacatccttgctgcagggcaggatgcccactgtcagctcctgcgcttccaggcacatcaacagcagggcaacaaggcagagaaggccggttccaaggagcaggggcctcgacaaaggaagggagcagccccagcagagaagaaatgtggagcggaaacccagcacgaggggctagaactcagggtagagaatttgcaggcggtgcagacagactttagctccgatccactgcagaaagttgtgtgcttcaaccacgataataccctgcttgccactggaggaacagatggctacgtccgtgtctggaaggtgcccagcctggagaaggttctggagttcaaagcccacgaaggggagattgaagacctggctttagggcctgatggcaagttggtaaccgtgggccgggaccttaaggccccctccctgctacctcacagcctgggatggctccaacttcttgccccttcggaccaagtcctgtggccatgaagtcgtctcctgcctcgatgtcagtgaatccggcaccttcctaggcctgggcacagtcactggctctgttgccatctacatagctttctctctccagtgcctctactacgtgagggaggcccatggcattgtggtgacggatgtggcctttctacctgagaagggtcgtggtccagagctccttgggtcccatgaaactgccctgttctctgtggctgtggacagtcgttgccagctgcatctgttgccctcacggcgggagtgttcctgtgtggctcctgctcctgctgtgtgtcgggcttattattgtgaccatcctgctgctccagagtgcctttccaggtttcctttagcttccctgcttcctgggaatcaggagcctggacactgccatctctagagcagagtggaggcctggactccctttgctcactccattcgggtccacagctgaggttgccgctgacaagatgaatgggcactgcctgcccttctagtgaaaaggcttggctatggccctgtgtgactccaggtcccaggaaccttgccttcgtcatctgtggatccatccagaacagcggtatctgaagcccaggccatactccctgcctcctttcttctgcctaccagaggctccagagttgagcttgtccttatctagaaacatgtgaagatgcccaagagcctggaggcactgctgtccttcctgcagaaacagtttctcctcctcccctcagccttgtggccagttcctcttcacatgaagcccctggcatttgctggggaagggactggcctggtacttgctgttagggcaggaaggggcaaaaggaagacttgggtagtaatctgggggttcagatgggtagcactaagccagctggcctaaagatgcaataagttcctaggtagtctacccttaccttgaggaatgggaaaatgaacctcagcccattaggcaggaaaagttgatatttaataaacaaggaaagagtgaactgagacccc

SEQ ID NO: 4760 - DNA, 1083 bp, Homo sapiens
ggacggaggccgggatacttgggaaaggatccgccggccttgaactcccgcctccgccgcccctaggcctcatggcggtccgagcttcgttcgagaacaactgtgagatcggctgctttgccaagctcaccaacacctactgtctggtagcgatcggaggctcagagaacttctacagtgtgttcgagggcgagctctccgataccatccccgtggtgcacgcgtctatcgccggctgccgcatcatcgggcgcatgtgtgtggggaacaggcacggtctcctggtacccaacaataccaccgaccaggagctgcaacacattcgcaacagcctcccagacacagtgcagattaggcgggtggaggagcggctctcagccttgggcaatgtcaccacctgcaatgactacgtggccttggtccacccagacttggacaggagacagaagaaattctggcagatgtgctcaaggtggaagtcttcagacagacagtggccgaccaggtgctagtaggaagctactgtgtcttcagcaatcagggagggctggtgcatcccaagacttcaattgaagaccaggatgagctgtcctctcttcttcaagtcccccttgtggcggggactgtgaaccgaggcagtgaggtgattgctgctgggatggtggtgaatgactggtgtgccttctgtggcctggacacaaccagcacagagctgtcagtggtggagagtgtcttcaagctgaatgaagcccagcctagcaccattgccaccagcatgcgggattccctcattgacagcctcacctgagtcaccttccaagttgttccatgggctcctggctctggactgtggccaaccttctccacattccgcccaatctgtaccggatgctggcagggaggtggcagagagctcactgggactgaggggctgggcacccaacccttttccacctgtgcttatcgcctggatctatcattactgcaaaaacctgctctgttgtgctggctggcaggccctgtggctgctggctgagggttctgctgtcctgtgccaccccattaaagtgcagttccctccgg

SEQ ID NO: 4761 - DNA, 1633 bp, Homo sapiens
ggctggcgtcccctttccggccggtccccatggaggcgctggggaagctgaagcagttcgatgcctaccccaagactttggaggacttccgggtcaagacctgcgggggcgccaccgtgaccattgtcagtggccttctcatgctgctactgttcctgtccgagctgcagtattacctcaccacggaggtgcatcctgagctctacgtggacaagtcgcggggagataaactgaagatcaacatcgatgtactttttccgcacatgccttgtgcctatctgagtattgatgccatggatgtggccggagaacagcagctggatgtggaacacaacctgttcaagcaacgactagataaagatggcatccccgtgagctcagaggctgagcggcatgagcttgggaaagtcgaggtgacggtgtttgaccctgactccctggaccctgatcgctgtgagagctgctatggtgctgaggcagaagatatcaagtgctgtaacacctgtgaagatgtgcgggaggcatatcgccgtagaggctgggccttcaagaacccagatactattgagcagtgccggcgagagggcttcagccagaagatgcaggagcagaagaatgaaggctgccaggtgtatggcttcttggaagtcaataaggtggccggaaacttccactttgcccctgggaagagcttccagcagtcccatgtgcacggtgagtgatctgcactagctggggagatttagatgctggccaccttcttggtgagcttgagtggtcctcttctgcctgctgctcatttgtcttgggcaaccatttggccagagcaggccttcatctcagggcagcagtttggcacagtggctaagagcacaggccgaggagccagactgcctgcattcagataccagtttcagaccttactggctgtgtgactttgagaaggtttcttaatctttttgactcctgttttctactttataaaatgttgatgagggcacttatctcacagggtgtgtgtgcaggttaaagatgatagcacggagcctggcttgtggtaggtacttgttgaaatggtagccccccgtgtccgatgatgacctgtgcatgaggctttgggagaagcagagctaggttggagcacaggttctgccacacctgggctatgtcatatttgggccctatttagttgcttcttctgtaaaatggggatgatgataatagtacccactcacagggctgttggggtgaacaaatgagatttattctcattcatttgttcattcatgcattcacaaaatatttagtaatcacctactagtctagttgctaagggtacagtagtgaacaatctgtgccctcagaacattctagtaaagaaatagacaataagtatataaaatataaatagtccccaattaacaatggttcagcttgcaatttttaacttcatgatgggtattacatgcatttttcacttaacgatattttctttttcttttttgagacagagtctcactctgtcgcccaggctggagtgcagtggcatgatcttgactcactgcaacctccacctcctggattcaagtgattctcctacctcagcctcttgagtagctgggtgtacaggtgc

SEQ ID NO: 4762 - DNA, 828 bp, Homo sapiens
ggggaagctgaagcagttcgatgcctaccccaagactttggaggacttccgggtcaagacctgcgggggcgccaccgtgaccattgtcagtggccttctcatgctgctatggtgctgaggcagaagatatcaagtgctgtaacacctgtgaagatgtgcgggaggcatatcgccgtagaggctgggccttcaagaacccagatactattgagcagtgccggcgagagggcttcagccagaagatgcaggagcagaagaatgaaggctgccaggtgtatggcttcttggaagtcaataaggtggccggaaacttccactttgcccctgggaagagcttccagcagtcccatgtgcacgtccatgacttgcagagctttggccttgacaacatcaacatgacccactacatccagcacctgtcatttggggaggactatccaggcattgtgaaccccctggaccacaccaatgtcactgcgccccaagcctccatgatgttccagtactttgtgaaggtggtgcccactgtgtacatgaaggtggacggagaggtactgaggacaaatcagttctctgtgaccagacatgagaaggttgccaatgggctgttgggcgaccaaggccttcccggagtcttcgctcatctaccactcagcacgagccatccagaagaaaattgatctagggaagacaacgtagtcaccctcggtgcttcctctgtctcctctttctccctggcctgtggttgtcccccagcctctgccaccctccacctcctcggtcagccccagccccaggttgataaatctattgattgattgtgatagt

SEQ ID NO: 4763 - DNA, 2131 bp, Homo sapiens
cgaaggaggtggtggctgcgttgggctccgggaagccgttcgggctggggctgtcggccgcggggcggaggcactcgcgcggggggtaattcggggtctgggttctggtgccgcgcagctttccccggattgacttggcctctacttcttgttaaggaaattcatctcttgttttatcaggtgtgtgtggtttcagcgcagcatggctgtggtcatccgtttgcaaggtctcccaattgtggcggggaccatggacattcgccacttcttctctggattgaccattcctgatgggggcgtgcatattgtagggggtgaactggatggcccactgcgtgaccttggttcagctgtccatttcctgtgaccatctcattgacaaggacatcggctccaagtctgacccactctgcgtccttttacaggatgtgggagggggcagctgggctgagcttggccggactgaacgggtgcggaactgctcaagccctgagttctccaagactctacagcttgagtaccgctttgagacagtccagaagctacgctttggaatctatgacatagacaacaagacgccagagctgagggatgatgacttcctagggggtgctgagtgttccctaggacagattgtgtccagccaggtactgactctccccttgatgctgaagcctggaaaacctgctgggcgggggaccatcacggtctcagctcaggaattaaaggacaatcgtgtagtaaccatggaggtagaggccagaaacctagataagaaggacttcctgggaaaatcagatccatttctggagttcttccgccagggtgatgggaaatggcacctggtgtacagatctgaggtcatcaagaacaacctgaaccctacatggaagcgtttctcagtccccgttcagcatttctgtggtgggaaccccagcacacccatccaggtgcaatgctccgattatgacagtgacgggtcacatgatctcatcggtaccttccacaccagcttggcccagctgcaggcagtcccgctgagtttgaatgcatccaccctgagaagcagcagaaaaagaaaagctacaagaactctggaactatccgtgtcaagatttgtcgggtagaaacagagtactcctttctggactatgtgatgggaggctgtcagatcaacttcactgtgggcgtggacttcactggctccaatggagacccctcctcacctgactccctacactacctgagtccaacaggggtcaatgagtacctgatggcactgtggagtgtgggcagcgtggttcaggactatgactcagacaagctgttccctgcatttggatttggggcccaggttccccctgactggcaggtctcgcatgaatttgccttgaatttcaaccccagtaacccctactgtgcaggcatccagggcattgtggatgcctaccgccaagccctgccccaagttcgcctctatggccctaccaactttgcacccatcatcaaccatgtggccaggtttgcagcccaggctgcacatcaggggactgcctcgcaatacttcatgctgttgctgctgactgatggtgctgtgacggatgtggaagccacacgtgaggctgtggtgcgtgcctcgaacctgcccatgtcagtgatcattgtgggtgtgggtggtgctgactttgaggccatggagcagctggacgctgatggtggacccctgcatacacgttctgggcaggctgctgcccgcgacattgtgcagtttgtaccctaccgccggttccagaatgcccctcgggaggcattggcacagaccgtgctcgcagaagtgcccacacaactggtctcatacttcagggcccagggttgggccccgctcaagccacttccaccctcagccaaggatcctgcacaggccccccaggcctaggttcccttggaggctgtggcaagtcctcaatcctgtgtcccagaggtccctctgggccacaacccaacccttctcactctcctcagtgctagcactttgtattttttgatacttttatacttgtttctgcttttgctgctcttgatcccacctttgctcctgacaaccctcattcaataaagaccagtgaagacc

SEQ ID NO: 4764 - DNA, 1593 bp, Homo sapiens
gtgcgcagccggggctggcgggcggcggggtccgcggggccgcaggagatgacggccggcggccaggccgaggccgagggcgctggcggggagcccggcgcggcgcggctgccctcgcgggtggcccggctgctgtcggcgctcttctacgggacctgctccttcctcatcgtgcttgtcaacaaggcgctgctgaccacctacggtttcccgtcaccaattttccttggaattggacagatggcagccaccataatgatactatatgtgtccaagctaaacaaaatcattcacttccctgattttgataagaaaattcctgtaaagctgtttcctctgcctctcctctacgttggaaaccacataagtggattatcaagcacaagtaaattaagcctaccgatgttcaccgtgctcaggaaattcaccattccacttaccttacttctggaaaccatcatacttgggaagcagtattcactcaacatcatcctcagtgtctttgccattattctcggggctttcatagcagctgggtctgaccttgcttttaacttagaaggctatatttttgtattcctgaatgatatcttcacagcagcaaatggagtttataccaaacagaaaatggacccaaaggagctagggaaatacggagtacttttctacaatgcctgcttcatgattatcccaactcttattattagtgtctccactggagacctgcaacaggctactgaattcaaccaatggaagaatgttgtgtttatcctacagtttcttctttcctgttttttggggtttctgctgatgtactccacggttctgtgcagctattacaattcagccctgacgacagcagtggttggagccatcaagaatgtatccgttgcctacattgggatattaatcggtggagactacattttctctttgttaaactttgtagggttaaatatttgcatggcagggggcttgagatattcctttttaacactgagcagccagttaaaacctaaacctgtgggtgaagaaaacatctgtttggatttgaagagctaaagagtctgcagcaggattggagactgacttgtgactgcgggctgggggggcattcccagtaggaatgtgaagccagaggtttcggattcgtgacatccaccccctgggcaagtgagagcatctgcaaaatgcaaagagaactacctcatatgcaggatgagccaatggcagtctcaagaaatgtactcgggcgacaccttacctgtggaaagcaaatcttttcaaaataagccactgggactcggtaggtggagccccagctgctcttctagggacctatggggccttcgtggcatctctgtgctgtgtgctggggaggaggttgatgtaatggtgactcttttctgatcagcaccttggccgtgattcccaaggtcccagccaaagcaaagggccagttgtttcagtttaaacagacatgtctttagtctaataaaattagttaactgccagtaaagttatttgttagctttgatgaaagctatgttggtatctttccctaatcatcaaagtaaataaaaaatcatttct

SEQ ID NO: 4765 - DNA, 1772 bp, Homo sapiens
tttaacactgagcagccagttaaaacctaaacctgtgggtgaagaaaacatctgtttggatttgaagagctaaagagtctgcagcaggattggagactgacttgtgactgcgggctgggggggcattcccagtaggaatgtgaagccagaggtttcggattcgtgacatccaccccctgggcaagtgagagcatctgcaaaatgcaaagagaactacctcatatgcaggatgagccaatggcagtctcaagaaatgtactcgggcgacaccttacctgtggaaagcaaatcttttcaaaataagccactgggactcgctcgacttggtggaagttctgcctcaggtgggcatagccaaaaaggggtcattctcttctcggttcctggggaattggatccaactgggagaagaccacctgaattctcatcccatctaagttgaagatgctattttttaaaaatttaatttgtaattttaagttctgggatacatgtgcaggatgtgcaggtttgttacataggtaaatgtgtgccctggtggtttgctgcacctatcaacctatcacctaggtattaagccccacatgcattagctatttatcctgatgctccctctcccgcacccccctaacaggccccagtgtgtgttgttcccctccctgtgtccatgtattctcattgttcagctcccacttataagtgaaaacatgcagtgtttggttttctgttcctgtgttagtttgctgaggataatggcttctagctccatccatgtccctgcaatggacatgatctcgttccttttgatggctgcatagtattccgtggtgtgtatgtaccatgttttctttatccagtctatcatagatgggcatttgggttgattccatgtttttgctgttgtgaatagtgctgcagtgaacatacacatgcttgtatctttatttttaaaaatctttttttttgaagacagggtctggctctgttgcccaggcaggagtacagtggcattatctcagctcactgcaaccactgcctcccaggctcaagtgatctgccctcctcagcctcctaagtagctgagaccacagggacacaccattacacctggctaattgttgtattttagtagagatgggatctttctatgttgcctaggctggcctcaagtgatcctcctgccttggcctcccaaagtgctgtgattacaggtgtgaaccaccatgcccagccagagatgctcaattcctggtgagtgcagctgaggggctagggccctctctaccaagcccctacccattagatgcaggctctacctcaagtacagcaggccacaaatactggggtccccattacccttgccccagctcacttggaaggctgttccacactggggagagatgatctgacaagaccagaggctaccaccctgtccagcacccagacgagtggctcagagaggctgcccagggaggacgcagcctgtgcagtaaagaatttaatcttgcccaaaaagatgtctggtctttgccctaagcttcttggaatatcatgccaaagaggagtgtctttgtttgcctggggaccttgggttacattagatagtctaacaatgtgatttcagatgggggctggctacaccagaaagaccaacagggtggtttagggtgaaggctttgggtgatacctggggagtctggagacagagatcagccatgtgggcaatcagtgaagtttatgtaatgaagccctaataaaaactctgaacactg

SEQ ID NO: 4766 - DNA, 5533 bp, Homo sapiens
ctccgccagcccgtgccaccgctgctaatgagagcagtcattaagtaaatgagacgtcgcctttagctggcttaggagttcgcacactaaggggagaagatatttaattgaaacccgcacgcaggcttccccacatgtgaccgctgtacgggaggcagctgccttccctctcctcccccagtccaccctgcaccccccatgtaaatttcatgattgctttccgtgatgtcattttgaaagaggacagacaatagctgtggggaaagaaaatgagttccgaggtgagctgttaaatcagaggtggacacacggaggcaaggccagcagctgcaggacctcaagacacctgggcagacactgcaagatgagcttagaaaatgaagacaagcgagctcgcacccgatccaaggccctgcgaggacccccagagaccacagctgcagacctcagctgccccaccccaggatgcacaggctcagggcacgtccggggcaagtactccaggcaccgaagtttacagagctgccccctggccaagaagaggaagctggagggcgctgaggctgagcacctggtgtccaagaggaagtcacaccccctgaagctggctctggacgagggctatggtgtggacagcgacggcagtgaggacactgaggtgaaggacgcctctgtttcggatgaatcggaaggaactctggagggggccgaggctgagacgtcaggacaggacgagattcatcgccccgagacagctgaaggaaggagccccgtcaagtcccattttggatccaaccccatcggcagcgccactgcctcctccaagggcagctacagcagctaccagggaatcatcgcaacttctctcctgaacttgggtcaaattgctgaagagaccctggtggaagaggacttgggccaggcggccaagccaggtcctggcattgtgcacctgcttcaggaggctgcagagggagctgccagcgaggagggtgaaaagggcctcttcatccagccagaggatgccgaggaggtcgtcgaagtcaccaccgagcgctcccaggacctgtgtccccagtccctggaggatgcagccagtgaggagtccagcaagcagaaaggcatcctgagtcacgaagaggaggacgaggaggaggaggaggaggaagaggaggaggaggaggatgaagaagaggaagaggaagaggaggaggaagaggaagaggaggaggaggaagaggaagaggaggaggaagaggaagaggaagaggaggaggaggaggcagctcctgatgtgatctttcaggaagacacctctcacacctctgcccagaaggcccctgagctccggggcccagaatcacccagtcccaagcctgagtactctgttattgtggaggtccgctcggatgatgacaaggacgaggacacccactcccggaagtcaacagtcactgacgagtcggagatgcaggacatgatgacccggggaaacctgggcctcctggagcaggccatcgccctgaaggctgaacaggtgcgcacagtctgcgagccgggctgcccgcctgccgagcagagccagctgggcctgggagagccagggaaggcagcaaagcccctggacactgtgcggaagagttactacagtaaagatccttcaagagctgagaagcgtgagatcaagtgtccaacaccaggctgtgatggcactggccacgttaccgggttgtaccctcaccaccgcagcctttctggctgtccccacaaggataggatccccccagagatcttagccatgcatgagaacgtgctgaagtgccccactcctggctgcacaggccagggtcacgtgaacagcaaccgcaacacgcacagaagtttgtctgggtgtcccattgctgccgccgaaaaattagccaaatcccatgagaagcagcagccgcagacaggagatccttccaagagtagctccaattccgatcggatcctcaggcccatgtgcttcgtgaagcagctcgaggtccctccatatgggagctaccggcccaacgtggcccccgccacacccagggccaacttggccaaggagctggagaagttctccaaggtcacctttgactacgcaagtttcgatgctcaggtttttggcaaacgcatgcttgccccaaagattcagaccagcgaaacctcacctaaagcctttcaatgctttgactactcgcaggacgccgaggctgcacacatggctgccactgccatcctgaacctctccacgcgctgctgggagatgcctgagaacctcagcacgaagccacaggacctccccagcaagtctgtggatatcgaggtagacgaaaatggaaccctggacttgagcatgcacaaacaccgcaaacgagaaaatgctttccccagcagcagcagctgcagcagcagccccggtgtgaagtctcccgacgcctcccagcgccacagcagcaccagcgcccccagcagctccatgacctctccccagtccagccaggcctcccgccaggacgagtgggaccggcccctggactacaccaagcctagccgcctgagagaggaggaacctgaggagtcagagccagcagcccattcttttgcttcttctgaagcagatgaccaggaagtgtcggaagagaattttgaggagcggaagtatccgggggaagtcaccctgaccaactttaagctgaagtttctctccaaggacataaagaaggagctgctcacctgtcccacccctggctgtgacggcagcggccacatcaccgggaactacgcctcccaccgcagcctctctggttgccctcttgctgacaagagcctcagaaacctcatggctgcccactctgctgacctcaagtgccccacgcccggctgtgacggctctggccacatcacagggaactacgcttcacaccggagcttgtccggctgccctcgtgcaaagaaaagtggagtcaaggtggcacccaccaaggacgacaaggaggaccccgagctgatgaagtgcccagttccaggctgtgtggggctcggtcacatcagcgggaaatacgcctctcacaggagcgcatccggctgcccactggccgcccgcaggcagaaggaagggtccctcaatggctcgtcattctcctggaagtccctgaagaatgaaggaccgacctgccccaccccgggctgtgacggctctggccacgccaatgggagtttcctcacccaccggagtttgtcaggctgtcccagagcaacctttgctggaaagaagggaaaactgtcaggggatgaggtcctcagtccaaagttcaagactagcgacgtgttggagaatgatgaggagatcaagcagctgaaccaggagatccgagacctgaacgagtccaactcggagatggaggctgccatggtgcagctgcagtcccagatctcctccatggagaagaacctgaagaacatcgaggaggagaacaagctcattgaggagcagaatgaagccctgtttctggagctgtccggcctgagccaggccctcatccaaagtctcgccaatatccgccttccgcacatggagccaatatgcgaacagaatttcgatgcctatgtgagcaccctcaccgacatgtactccaaccaggacccggagaacaaggacctcctggagagcatcaagcaggctgtgaggggcatccaggtctaggccgtgtggtacccagaagtgtcccagcccaccacaccgtttacctccctcgccctgccccgcaccgtggggatgcccaactcacagtgacttcccgtttggggcccggtgtggccgcgggcgggtttatccaaagggatggctggaaattggccgctcccacgaggctccctccaggcttggggccgtggtggccctatctgtgtgcataggggcactgaagaattacaaagtgatttatttttgttttctgaaagaaatctgaagagcagctcaaagtctccagtggaagctcatggacaaggttctcagggaagttttggagtttgcaaccacagtattcctttgtctgtcgaggctgggagggtagccgtgagcgtggtgggtgggtggtgtgagtggcatcttggcctggaggacacgcctggggcagcgtgtctgtgctcagtgagggccgatgaagaaagtgcgttttctgttttcatttaattcagttttgtgttaagggtggaacaaagctctgttctagagggaaagttaggaataggcctcccagaggatactccagacagttgacaagcatcgcagcccctgtcaggtcaaggaattttaacctgggagactcctgaaaatcagcctaatgtctgggggcagctggcgctgaggctgtgcagatgtgtatggccttgggtcacagctccctactggggctgcagcctttagaccctgggtctgggatccacgtctagggaccactctggcttctgtgcatccacccaggcccccgacccatcactgccacattctccgggtcatggccgagcttgacctctgcatccatggtgacggaggtggcaatgacatcatcaaggtcagagggtaaattcctaacaggagaccacaaaggtttcacttcttttagatccatccaatatgcgaaaaaagggtacattttaatttaatgtgttaaaaacacaatgtccctaccgtgtaaatagaatccaagtcaattgtgactgcaattccaagttagtatttaaaaatagagaaattgcacttcctggaaaaaattaaaaagtagttagtttaattattctgtaaattatttaattttgtcaagatgtaagtatttatattcacagcctcttatgttaacgtttgctatttatttaacatttttatttattaattttatactatttcaactagaccccacaccagggcaccctaagaggggaaaaaagtgaattcaaagcaaaaataactatttgactataatataggccacaaaaaatcttgatataactcctagttataattttgatgcaaccaagttattttttatatattttgttatttattcttttaataatggaatttttttaaaaagtattttgtaactgaggaattttgataatttggggattttgttttcccttggtctaatggagagaaagacattttggttttctttttccattttgggttccttttgtttcaggcacggataacagcaaatggaattctgtatttattattatttaagtgtagcgcagatgtgtgtgcttgggcgtgtttctcgtgtcgcgtttgcgtgtcggctcttgcggtggagtcctgttgctgtgagggagtgctggccgcaggcagcctcgagtcaccgccaggctcacaggctgtgccacccgtccctccgacagctccaatactgtgaccctccttcctcaggaagcgcgttgaacccacagcactccgtggtgtgtttgcagggtgatttcctaataaaagtccactctgactgtg

SEQ ID NO: 4767 - DNA, 2626 bp, Homo sapiens
cggaagagttactacagtaaagatccttcaagagctgagaagcgtgagatcaagtgtccaacaccaggctgtgatggcactggccacgttaccgggttgtaccctcaccaccgcagcctttctggctgtccccacaaggataggatccccccagagatcttagccatgcatgagaacgtgctgaagtgccccactcctggctgcacaggccagggtcacgtgaacagcaaccgcaacacgcacagaagtttgtctgggtgtcccattgctgccgccgaaaaattagccaaatcccatgagaagcagcagccgcagacaggagatccttccaagagtagctccaattccgatcggatcctcaggcccatgtgcttcgtgaagcagctcgaggtccctccatatgggagctaccggcccaacgtggcccccgccacacccagggccaacttggccaaggagctggagaagttctccaaggtcacctttgactacgcaagtttcgatgctcaggtttttggcaaacgcatgcttgccccaaagattcagaccagcgaaacctcacctaaagcctttcaatccaaacctttcccaaaggcctcttcccccaggcacagcccctccagtagttatgtgaggagcacttcatcctcttctgcaggctttgactactcgcaggacgccgaggctgcacacatggctgccactgccatcctgaacctctccacgcgctgctgggagatgcctgagaacctcagcacgaagccacaggacctccccagcaagtctgtggatatcgaggtagacgaaaatggaaccctggacttgagcatgcacaaacaccgcaaacgagaaaatgctttccccagcagcagcagctgcagcagcagccccggtgtgaagtctcccgacgcctcccagcgccacagcagcaccagcgcccccagcagctccatgacctctccccagtccagccaggcctcccgccaggacgagtgggaccggcccctggactacaccaagcctagccgcctgagagaggaggaacctgaggagtcagagccagcagcccattcttttgcttcttctgaagcagatgaccaggaagtgtcggaagagaattttgaggagcggaagtatccgggggaagtcaccctgaccaactttaagctgaagtttctctccaaggacataaagaaggagctgctcacctgtcccacccctggctgtgacggcagcggccacatcaccgggaactacgcctcccaccgcagcctctctggttgccctcttgctgacaagagcctcagaaacctcatggctgcccactctgctgacctcaagtgccccacgcccggctgtgacggctctggccacatcacagggaactacgcttcacaccggagcttgtccggctgccctcgtgcaaagaaaagtggagtcaaggtggcacccaccaaggacgacaaggaggaccccgagctgatgaagtgcccagttccaggctgtgtggggctcggtcacatcagcgggaaatacgcctctcacaggagcgcatccggctgcccactggccgcccgcaggcagaaggaagggtccctcaatggctcgtcattctcctggaagtccctgaagaatgaaggaccgacctgccccaccccgggctgtgacggctctggccacgccaatgggagtttcctcacccaccggagtttgtcaggctgtcccagagcaacctttgctggaaagaagggaaaactgtcaggggatgaggtcctcagtccaaagttcaagactagcgacgtgttggagaatgatgaggagatcaagcagctgaaccaggagatccgagacctgaacgagtccaactcggagatggaggctgccatggtgcagctgcagtcccagatctcctccatggagaagaacctgaagaacatcgaggaggagaacaagctcattgaggagcagaatgaagccctgtttctggagctgtccggcctgagccaggccctcatccaaagtctcgccaatatccgccttccgcacatggagccaatatgcgaacagaatttcgatgcctatgtgagcaccctcaccgacatgtactccaaccaggacccggagaacaaggacctcctggagagcatcaagcaggctgtgaggggcatccaggtctaggccgtgtggtacccagaagtgtcccagcccaccacaccgtttacctccctcgccctgccccgcaccgtggggatgcccaactcacagtgacttcccgtttggggcccggtgtggccgcgggcgggtttatccaaagggatggctggaaattggccgctcccacgaggctccctccaggcttggggccgtggtggccctatctgtgtgcataggggcactgaagaattacaaagtgatttatttttgttttctgaaagaaatctgaagagcagctcaaagtctccagtggaagctcatggacaaggttctcagggaagttttggagtttgcaaccacagtattcctttgtctgtcgaggctgggagggtagccgtgagcgtggtgggtgggtggtgtgagtggcatcttggcctggaggacacgcctggggcagcgtgtctgtgctcag

SEQ ID NO: 4768 - DNA, 1975 bp, Homo sapiens
cccatgggcttccaacccaacactgctggctccgagtgcgaggatgtggatgagtgtgagaaccacctcgcatgccctgggcaggagtgtgtgaactcgcccggctccttccagtgcaggacctgtccttctggccaccacctgcaccgtggcagatgcactgatgtggacgaatgcagttcgggtgcccctccctgtggtccccacggccactgcactaacaccgaaggctccttccgctgcagctgcgcgccaggctaccgggcgccgtcgggtcggcccgggccctgcgcagacgtgaacgagtgcctggagggcgatttctgcttccctcacggcgagtgcctcaacactgacggctcctttgcctgtacttgtgcccctggctaccgacccggaccccgcggagcctcttgcctcgacgttgacgagtgcagcgaggaggacctttgccagagcggcatctgtaccaacaccgacggctccttcgagtgcatctgtcctccgggacaccgcgctggcccggacctcgcctcctgcctcggacgtggacgaatgtcgcgagcgaggcccagccctgtgcgggtcgcagcgctgtgagaactctcccggctcctaccgctgtgtccgggactgcgatcctgggtaccacgcgggccccgagggcacctgtgacgatgtgaacgagtgtgaaacactacagggtgtatgtggagctgccctgtgtgaaaatgtcgaaggctccttcctctgtgtctgccccaacagcccggaagagtttgaccccatgactggacgctgtgttcccccacgaacttctgctggcacgttcccaggctcgcagccccaggcacctgctagccccgttctgcccgccaggccacctccgccacccctgccccgccgacccagcacacctaggcagggccctgtggggagtgggcgccgggagtgctactttgacacagcggccccggatgcatgtgacaacatcctggctcggaatgtgacatggcaggagtgctgctgtactgtgggtgagggctggggcagcggctgccgcatccagcagtgcccgggcaccgagacagctgagtaccagtcattgtgccctcacggccggggctacctggcgcccagtggagacctgagcctccggagagacgtggacgaatgtcagctcttccgagaccaggtgtgcaagagtggcgtgtgtgtgaacacggccccgggctactcatgctattgcagcaacggctactactaccacacacagcggctggagtgcatcgacaatgacgagtgcgccgatgaggaaccggcctgtgagggcggccgctgtgtcaacactgtgggctcttatcactgtacctgcgagcccccactggtgctggatggctcgcagcgccgctgcgtctccaacgagagccagagcctcgatgacaatctgggagtgtgctggcaggaagtgggggctgacctcgtgtgcagccaccctcggctggaccgtcaggccacctacacagagtgctgctgcctgtatggagaggcctggggcatggactgcgccctctgccctgcgcaggactcagatgacttcgaggccctgtgcaatgtgctacgcccccccgcatatagccccccgcgaccaggtggctttggactcccctacgagtacggcccagacttaggtccaccttaccagggcctcccatatgggcctgagttgtacccaccacctgcgctaccctacgacccctacccaccgccacctgggcccttcgcccgccgggaggctccttatggggcaccccgcttcgacatgccagactttgaggacgatggtggcccctatggcgaatctgaggctcctgcgccacctggcccgggcacccgctggccctatcggtcccgggacacccgccgctccttcccagagcccgaggagcctcctgaaggtggaagctatgctggt

SEQ ID NO: 4769 - DNA, 1246 bp, Homo sapiens
agatgaatattgaagctcttcgggagaatctttattttcagtccaaagagaacctttctgtgacattggaagtcatcttggagcgtatggaggactttactgattctgcctacaccagccatgagcacagagaacgcatcttggaactgtcaactcaggcgagaatggaactgcagcagttaatttctgtgtggattcaagctcaaagcaagaaaacaaaaagcatcgctgaagaactggaactcagtattttgaaaatcagtcacagtcttaatgaacttaagaaagaaataatttctgctgctgaaacattgacattgcatccatctagtaaaattgctaaagaaaacctagatgtattttgtgaagcttgggaatcccaaattagtgacatgtcaacactgctgagagaaatcaatgacgtgtttgaaggaagacgaggagagaagtatggctacctttcacttccaaagccaatgaagaataatgcaaacctgaaatcattaaagccagacaagcctgactctgaggagcaagccaagatagcaaagcttggacttaagctgggtttgctcacctctgacgctgactgcgaaattgagaagtgggaagatcaggagaatgagattgttcaatatggacggaacatgtccagtatggcctattctctgtatttatttactagaggagaggggccactgaaaacttcccaggatttaattcatcaactagaggtttttgctgcagagggtttaaagcttacttccagtgttcaagctttttcaaaacagctgaaagacgatgacaagcttatgcttctcctggaaataaacaagctaattcctctatgccaccagctccagacagtaactaagacttctttgcagaataaagtatttctaaaggttgacaagtgtattacgaagacaagatccatgatggctctcttagtccaacttctttcactttgttataaactgctgaagaagcttcagatggaaaataacggatgggtctcagttacaaataaggacactatggatagtaaaacttgagaagcttttggggtcagatctctggaacatcatgtgatgaagctgacatttttaaaaatcaaatgatcctttatcttttcagaaattcatcaattttataaagaaaacaatattgaaattttgctctattttctgatcatgaaactgattgtaaagctttttgacaactaataaatgtcttggtaattgct

SEQ ID NO: 4770 - DNA, 2481 bp, Homo sapiens
cgccgcggcgcggagtcccggctgcgggatagaccgagggccatggccgcctctcccggacccgccggcgttggcggcgccggagcagtctacggctccggctcttcgggcttcgccctcgactcgggactggagatcaaaactcgctcggtggagcagacgctactcccgctggtttctcagatcaccacgcttattaatcataaagataataccaaaaagtctgataaaactctgcaagcaattcagcgtgtaggacaagctgtcaacttggcagttggaagatttgttaaagtaggagaagctatagccaatgaaaactgggatttgaaagaagaaataaatattgcttgtattgaagctaaacaagcaggagaaacaattgcagcacttacagacataaccaacttgaaccatctggaatctgatgggcagatcacaatttttacagacaaaacaggagtgataaaggctgcaagattacttctttcttcagtgacaaaagtgttgttgctggcagaccgagtagtcattaaacagataataacatcaagaaataaggttctcgcaactatggaaagactagagaaagtgaatagctttcaagagtttgtccaaatattcagtcaatttggaaatgaaatggtggagtttgcacatctgagtggagatagacaaaatgatttgaaagatgaaaagaaaaaggcaaaaatggcagcagctagggcagttcttgaaaagtgtacaatgatgcttctcacagcttcaaagacatgtctgaggcatcctaactgcgaatcagcccataaaaacaaagaaggagtatttgaccgtatgaaagtggcattggataaggtcattgaaattgtgactgactgtaaaccgaatggagagactgacatttcatctatcagtatttttactggaattaaggaattcaagatgaatattgaagctcttcgggagaatctttattttcagtccaaagagaacctttctgtgacattggaagtcatcttggagcgtatggaggactttactgattctgcctacaccagccatgagcacagagaacgcatcttggaactgtcaactcaggcgagaatggaactgcagcagttaatttctgtgtggattcaagctcaaagcaagaaaacaaaaagcatcgctgaagaactggaactcagtattttgaaaatcagtcacagtcttaatgaacttaagaaagaacttcatagtacagcgacacagctggcagcagatctattaaaataccatgctgatcatgtggttctaaaagcattaaaacttactggagtagaaggaaatttagaagctttggctgaatatgcctgtaaactctctgaacagaaagagcagcttgttgagacctgtcgattgttacgacacatatctgggacagaacctctggaaataacctgtatacatgcagaggagacatttcaggtgactggccaacagataatttctgctgctgaaacattgacattgcatccatctagtaaaattgctaaagaaaacctagatgtattttgtgaagcttgggaatcccaaattagtgacatgtcaacactgctgagagaaatcaatgacgtgtttgaaggaagacgaggagagaagtatggctacctttcacttccaaagccaatgaagaataatgcaaacctgaaatcattaaagccagacaagcctgactctgaggagcaagccaagatagcaaagcttggacttaagctgggtttgctcacctctgacgctgactgcgaaattgagaagtgggaagatcaggagaatgagattgttcaatatggacggaacatgtccagtatggcctattctctgtatttatttactagaggagaggggccactgaaaacttcccaggatttaattcatcaactagaggtttttgctgcagagggtttaaagcttacttccagtgttcaagctttttcaaaacagctgaaagacgatgacaagcttatgcttctcctggaaataaacaagctaattcctctatgccaccagctccagacagtaactaagacttctttgcagaataaagtatttctaaaggttgacaagtgtattacgaagacaagatccatgatggctctcttagtccaacttctttcactttgttataaactgctgaagaaggtgaaaccagatactaattgtcttaactctttccagcttcagatggaaaataacggatgggtctcagttacaaataaggacactatggatagtaaaacttgagaagcttttggggtcagatctctggaacatcatgtgatgaagctgacatttttaaaaatcaaatgatcctttatcttttcagaaattcatcaattttataaagaaaacaatattgaaattttgctctattttctgatcatgaaactgattgtaaagctttttgacaactaataaatgtcttggtaattgctagattct

SEQ ID NO: 4771 - DNA, 1701 bp, Homo sapiens
gcttaaacttgataaaagataaaaacttgtataacgaagctctgaagttatattcaccaagctcacaacagtaccaggatatcagcattgcttatggggagcacctgatgcaggagcacatgtatgagccagcggggctcatgtttgcccgttgcggtgcccacgagaaagctctctcagcctttctgacatgtggcaactggaagcaagccctctgtgtggcagcccagcttaactttaccaaagaccagctggtgggcctcggcagaactctggcaggaaagctggttgagcagaggaagcacattgatgcggccatggttttggaagagtgtgcccaggattatgaagaagctgtgctcttgctgttagaaggagctgcctgggaagaagctttgaggctggtatacaaatataacagactggatattatagaaaccaacgtaaagccttccattttagaagcccagaaaaattatatggcatttctggactctcagacagccacattcagtcgccacaagaaacgtttattggtagttcgagagctcaaggagcaagcccagcaggcaggtctggatgatgaggtaccccacgggcaagagtcagacctcttctctgaaactagcagtgtcgtgagtggcagtgagatgagtggcaaatactcccatagtaactccaggatatcagcgagatcatccaagaatcgccgaaaagcggagcggaagaagcacagcctcaaagaaggcagtccgctggaggacctggccctcctggaggcactgagtgaagtggtgcagaacactgaaaacctgaaagatgaagtataccatattttaaaggtactctttctctttgagtttgatgaacaaggaagggaattacagaaggcctttgaagatacgctgcagttgatggaaaggtcacttccagaaatttggactcttacttaccagcagaattcagctaccccgacatggggagagggagtcttgctgtgttgcccaagctggtcttgaactcctggcctcaagtgatcctcctgccttggcctcccaaagtgctgagattacaggtgttctaggtcccaattctactgcaaatagtatcatggcatcttatcagcaacagaagacttcggttcctgttcttgatgctgagctttttataccaccaaagatcaacagaagaacccagtggaagctgagcctgctagactgagtgactgcagttaggagggatccgacagagaagaccatttccactcattcctgttgtcctaccaccccttgctctttgagggctggctattgagaactggaaagagtaaaatgataacttaccttagcattgccaagaacttcagcagacaacaagcaattctatttattttatgttgtgtatacatcttgatcattagcaagacattaagctttaaccattatggcaccattttgtgagaatgattgttctttcacttgggctgtttgagagcataattatggtaatcatgagattaatgtttcatgatttctacctccaaagtgtgaagacaagtaaaacaatgtttctaaattgtcttattttgttggcggagaagattacaatggctattagtgctacatttggtcaaatgtaatcacttaaatagcttcttgtcaccttaaactaaagcagaataaaaagtatcctttgaaatta

SEQ ID NO: 4772 - DNA, 1726 bp, Homo sapiens
ctccagacgtcgtggtcgttcggtcctatgtcgcgccgggccctccggaggctgaggggggaacagcgcggccaggagcccctcgggcccggcgccttgcatttcgatctccgtgatgacgatgacgcggaagaagaagggcccaagcgggagcttggtgtccggcgtcccgggggcgcagggaaggagggcgtccgagtcaacaaccgcttcgagctgataaacattgacgatcttgaggatgaccctgtggtgaacggggagaggtctggctgtgcgctcacagacgctgtggcaccagggaacaaaggaaggggtcagcgtggaaacacagagagcaagacggatggagatgacaccgagacagtgccctcagagcagtctcatgcaagtggcaaactccggaagaagaaaaaaaaacagaaaaacaagaaaagcagcacgggagaagcatcggaaaacggactagaagatatcgatcgcatcctagagaggattgaggacagcactgggttgaaccgtcccggcccagctcccctgagctccaggaagcacgttctctacgtggagcacagacacttgaatccagacacagaactgaaaaggtattttggtgcccgggcaatcctgggggagcaaagagacagggtcttgctgggttgtccagtctggttttgaactcgtggcctcaagtgatcctcccatctcagtctcccaaatagctgggactaccggcacatgccaccgctaatttattttattttattttttatagaaacaaggtcttactttgttgcccagggtgatgtcaaactcctggcttcaagcgattctcctccctctacctcctaaagtgctaggattacaggcatgagccaccacgcccagccagacacatcctgttttattggaccatggagagtattgctggtctataacatgccctgggtttgcacgtctgagttcttttttttttttttcgagacagaattttgctcttgttgcccaggctggagtgcaatggctcaatcttggctcaccacaacctccgcctcccgggttcaagtgattctcctgcctcagcctcctgagtagctgggattacaggcatgtgccaccatgtccagctaattttgtgtttttagtagagatggggtttctccatgttggtcaggctcgtctcgaactcccaacctcaggtgatccacccgcctcagcctcccgaagtgctgggattacaggtgtgagccactgcgcccggcctcccaaagtgctgggattacaggcgtgagccaccacacccagcctaagtgttgtttctgcaccatggtatacccaggtcatttcctcaccccaatggtagcatgtgtccagatgttggctacagtccccggtgtctgcaggcatttctgtgaaactgcccaagaatgagtatatatcctgcatgctgccagtgccttcagtagagttacgtggctcacactgagtgtctgcccaggtccttcaccttcttactcgtagtcgacggtagtggtttggaaacctgccgtcgtgtgtgggcagaagtgttggggttttgattgtgggtagatcaaggatgttttcatatgctgttgttcacgccttccctggatttctaacaggttttgctttatattttactttacatttttggtgttgatgggtttcttcgggaatattaattaaaaatagactttaaaatgtc

SEQ ID NO: 4773 - DNA, 1206 bp, Homo sapiens
tttccggtgctatgccccggaagcggaagtgcgatcttcgggctgtcagagttggtctgttactcggtggtggcggagtctacggaagccgttttcgcttcacttttcctggctgtagagcgctttccccctggcgggtgagagtgcagagacgaaggtgcgagatgagcactatgttcgcggacactctcctcatcgtttttatctctgtgtgcacggctctgctcgcagagggcataacctgggtcctggtttacaggacagacaagtacaagagactgaaggcagaagtggaaaaacagagtaaaaaattggaaaagaagaaggaaacaataacagagtcagctggtcgtctatcaatggttcgaatgaaatccatgtttgctattggcttttgttttactgccctaatgggaatgttcaattccatatttgatggtagagtggtggcaaagcttccttttacccctctttcttacatccaaggactgtctcatcgaaatctgctgggagatgacaccacagactgttccttcattttcctgtatattctctgtactatgtcgattcgacagaacattcagaagattctcggccttgccccttcacgagccgccaccaagcaggcaggtggatttcttggcccaccacctccttctgggaagttctcttgaactcaagaactctttattttctatcattctttctagacacacacacatcagactggcaactgttttgtagcaagagccataggtagccttactacttgggcctctttctagttttgaattatttctaagccttttgggtatgattagagtgaaaatggcagccagcaaacttgatagtgcttttggtcctagatgatttttatcaaataagtggattgattagttaagttcaggtaatgtttatgtaatgaaaaacaaatagcatccttcttgtttcatttacataagtattttctgtgggaccgactctcaaggcactgtgtatgccctgcaagttggctgtctatgagcatttagagatttagaagaaaaatttacaagccaaatacatgacataagatcaataaagaggccaaatttttagctgttttatgtacaaggagagatctgtttcattttgttttgccgtatttctagatataagttttagcatgggccaggaaggactaaaataaaagtttttaaggtactg

SEQ ID NO: 4774 - DNA, 1186 bp, Homo sapiens
aagtgcgatcttcgggctgtcagagttggtctgttactcggtggtggcggagtctacggaagccgttttcgcttcacttttcctggctgtagagcgctttccccctggcgggtgagagtgcagagacgaaggtgcgagatgagcactatgttcgcggacactctcctcatcgtttttatctctgtgtgcacggctctgctcgcagagggcataacctgggtcctggtttacaggacagacaagtacaagagactgaaggcagaagtggaaaaacagagtaaaaaattggaaaagaagaaggaaacaataacagagtcagctggtcgacaacagaaaaagaaaatagagagacaagaagagaaactgaagaataacaacagagatctatcaatggttcgaatgaaatccatgtttgctattggcttttgttttactgccctaatgggaatgttcaattccatatttgatggtagagtggtggcaaagcttccttttacccctctttcttacatccaaggactgtctcatcgaaatctgctgggagatgacaccacagactgttccttcattttcctgtatattctctgtactatgtcgattcgacagaacattcagaagattctcggccttgccccttcacgagccgccaccaagcaggcaggtggatttcttggcccaccacctccttctgggaagttctcttgaactcaagaactctttattttctatcattctttctagacacacacacatcagactggcaactgttttgtagcaagagccataggtagccttactacttgggcctctttctagttttgaattatttctaagccttttgggtatgattagagtgaaaatggcagccagcaaacttgatagtgcttttggtcctagatgatttttatcaaataagtggattgattagttaagttcaggtaatgtttatgtaatgaaaaacaaatagcatccttcttgtttcatttacataagtattttctgtgggaccgactctcaaggcactgtgtatgccctgcaagttggctgtctatgagcatttagagatttagaagaaaaatttagtttgtttaacccttgtaactgtttgttttgttgttgtttttttttcaagccaaatacatgacataagatcaataaagaggccaaatttttagctgttttatgt

SEQ ID NO: 4775 - DNA, 2781 bp, Homo sapiens
  misc_feature (636)..(661): n is a, c, g, or t
ggtgcaggagaactccccagcccagcaggcgggcctggagccctactttgacttcatcatcaccattgggcactcgaggctgaacaaggagaatgacaccctgaaggcactactgaaagccaatgtggagaagcccgtgaagctggaggtgttcaatatgaagaccatgagggtgcgcgaggtggaggtggtgcccagcaacatgtggggcggccagggcctactgggtgccagtgtgcgcttctgcagcttccgcagggccagtgagcaggtgtggcatgtgctggatgtggaaccatcttcacctgctgcccttgccggcctgcgcccctacacagactatgtggttggttcggaccagattctccaggagtccgaggacttctttacgctcatcgagtctcatgaggggaagcccttgaagctgatggtgtataactccaagtcagactcctgccgggagtctgggatgtggcattggctatgggtatctacaccggatcccaactcagccccccagctaccacaagaagccacctggcaccccaccaccttctgctctaccacttgtgccccaccacctgatgctctaccacctggacccacccccgaggactctccttccctggagacagnnnnnnnnnnnnnnnnnnnnnnnnnngccctgctgcaggcacctggctcctccatggaggatccccttcctgggcctgggagtcccagccacagtgctccagaccctgatggacttccccatttcatggagactcctcttcagcccccacctccagtgcagcgagttatggacccaggcttcctggacgtgtcgggaatttctctcttggacaacagcaatgccagtgtgtggcccagcctgccctcttccacagaactgaccaccacagctgtctcaacctcagggccagaggacatctgctccagcagcagttctcatgagcggggtggtgaggctacatggtctgggtcagagtttgaggtctccttcctggacagcccaggtgcccaagcccaggcggaccacctgcctcagctgactcttcctgacagtctcacctctgcagcctcaccagaagatggctgtccgccgagctgcttgaagctcaggctgaggaggaaccagcaagcacagagggcctagatactgggacggaggctgaggggctggacagccaggcccagatctctaccacagaataacaccctgggctgtgacaaggcccatgatgacatttcatgaggcccagatgtgggcagcagcccgggctgcactatgcggtcaggattccttgctgctttggtgggacatgaggcctcagtgggtggtgagagggcgcatgggccttgtgggaggatatcttttggccgtgtaccctcaggtccagtgcttggtcctgctctggtcactggggcttcccaggaggcagcagggtctggtcataatccagtgtgaagatgaggtgaggaaggaaggggttgctgtccagtgttggcctggtcgctttgattcttcctgcacagctcagcccaccccatctgtactggaagggaccctggagccctgggaccaccccctttcaagtcccaaacactgagtcctctgtcatgtgtccttgtccctaggctacaatgctacacttggctcaggctgatcaccatgctagtcacaggagggagagagaggcagtgtacttgcccccatctcctggagggaggtgcgttggaaattctaggcccttcagcagagacccatttgtgcccagaccacaatatttcttcttcctcagggactacatgccacagacctgtatccccagtggcaactcctgttagctcccaaacttaaacagtgatctcttctaaatatacaaggcatctacccagccccaatagtgaataaaagtcacaaatttaagttcaacaccctaagcaatttctcaaagccagtctacctgactaggtctatccacgcacggttcccaacccaagggggaattaggggattagattaagagtaggtaaagacccttttgttctttcctgttgtaggggaggaagctgttctccccacacccaggtgcctttggaggttaaggctaggttagccctgcactccacctggggacggccctcatcacctgaagtcctctgctgtgttgactggacccgcagttcccacactgctaagtactatgaaagctgctctggcctcgtcttctagcttgtgcctagttgaaagtctcacctttacaggatcatttgtaatgctggtgtacatgcagggaactcacaagctgtgtcaggtatgcaggacaaggaatgtctgctctgggggcacaggccaactatatggagggagggtcccaaattagcaaacccttcatttaaagcaaacccttgtcaagcctaccagagcagctgatacgtgtgcataacagtgaggcattgtgtcctggatcgtctgggagcccagtgtcaagtctgctggaatgcaggaagtagaacagaatcgccacaggactgttctggggccagcttcccttaactctgtagcctggcagtctgacccaaagttgccctcacccaaaggttctggctcttccctccctcacttttactttcccttcccccataagttggaggataaaatgggtatcaatgctaatatttccagggagaacatgaaaccagaggtttctttctttctctgtaatctgctatgaaagaaaataacaaatgaaaataaatgtgtactacactttg

SEQ ID NO: 4776 - DNA, 3071 bp, Homo sapiens
  misc_feature (917)..(942): n is a, c, g, or t
ggtgcaggagaactccccagcccagcaggcgggcctggagccctactttgacttcatcatcaccattgggcactcgaggctgaacaaggagaatgacaccctgaaggcactactgaaagccaatgtggagaagcccgtgaagctggaggtgttcaatatgaagaccatgagggtgcgcgaggtggaggtggtgcccagcaacatgtggggcggccagggcctactgggtgccagtgtgcgcttctgcagcttccgcagggccagtgagcaggtgtggcatgtgctggatgtggaaccatcttcacctgctgcccttgccggcctgcgcccctacacagactatgtggttggttcggaccagattctccaggagtccgaggacttctttacgctcatcgagtctcatgaggggaagcccttgaagctgatggtgtataactccaagtcagactcctgccgggaggtgactgtaactcccaacgcagcctggggtggagagggcaggtacttcgtggggttggagggctgcagggccaggtgggtggggcctgaccattgggcatggacctcagagttctatggtggagatggaggagggttgccctgggcccagggatcctgaggctgaccggtatttcagaagtacccttttcagcccccttattgctggtagtaggtggggatagcaaaggtagggagggccgtggacaagcccctggattgaatgtttctggccttcggcagtctgggatgtggcattggctatgggtatctacaccggatcccaactcagccccccagctaccacaagaagccacctggcaccccaccaccttctgctctaccacttgtgccccaccacctgatgctctaccacctggacccacccccgaggactctccttccctggagacagnnnnnnnnnnnnnnnnnnnnnnnnnngccctgctgcaggcacctggctcctccatggaggatccccttcctgggcctgggagtcccagccacagtgctccagaccctgatggacttccccatttcatggagactcctcttcagcccccacctccagtgcagcgagttatggacccaggcttcctggacgtgtcgggaatttctctcttggacaacagcaatgccagtgtgtggcccagcctgccctcttccacagaactgaccaccacagctgtctcaacctcagggccagaggacatctgctccagcagcagttctcatgagcggggtggtgaggctacatggtctgggtcagagtttgaggtctccttcctggacagcccaggtgcccaagcccaggcggaccacctgcctcagctgactcttcctgacagtctcacctctgcagcctcaccagaagatggctgtccgccgagctgcttgaagctcaggctgaggaggaaccagcaagcacagagggcctagatactgggacggaggctgaggggctggacagccaggcccagatctctaccacagaataacaccctgggctgtgacaaggcccatgatgacatttcatgaggcccagatgtgggcagcagcccgggctgcactatgcggtcaggattccttgctgctttggtgggacatgaggcctcagtgggtggtgagagggcgcatgggccttgtgggaggatatcttttggccgtgtaccctcaggtccagtgcttggtcctgctctggtcactggggcttcccaggaggcagcagggtctggtcataatccagtgtgaagatgaggtgaggaaggaaggggttgctgtccagtgttggcctggtcgctttgattcttcctgcacagctcagcccaccccatctgtactggaagggaccctggagccctgggaccaccccctttcaagtcccaaacactgagtcctctgtcatgtgtccttgtccctaggctacaatgctacacttggctcaggctgatcaccatgctagtcacaggagggagagagaggcagtgtacttgcccccatctcctggagggaggtgcgttggaaattctaggcccttcagcagagacccatttgtgcccagaccacaatatttcttcttcctcagggactacatgccacagacctgtatccccagtggcaactcctgttagctcccaaacttaaacagtgatctcttctaaatatacaaggcatctacccagccccaatagtgaataaaagtcacaaatttaagttcaacaccctaagcaatttctcaaagccagtctacctgactaggtctatccacgcacggttcccaacccaagggggaattaggggattagattaagagtaggtaaagacccttttgttctttcctgttgtaggggaggaagctgttctccccacacccaggtgcctttggaggttaaggctaggttagccctgcactccacctggggacggccctcatcacctgaagtcctctgctgtgttgactggacccgcagttcccacactgctaagtactatgaaagctgctctggcctcgtcttctagcttgtgcctagttgaaagtctcacctttacaggatcatttgtaatgctggtgtacatgcagggaactcacaagctgtgtcaggtatgcaggacaaggaatgtctgctctgggggcacaggccaactatatggagggagggtcccaaattagcaaacccttcatttaaagcaaacccttgtcaagcctaccagagcagctgatacgtgtgcataacagtgaggcattgtgtcctggatcgtctgggagcccagtgtcaagtctgctggaatgcaggaagtagaacagaatcgccacaggactgttctggggccagcttcccttaactctgtagcctggcagtctgacccaaagttgccctcacccaaaggttctggctcttccctccctcacttttactttcccttcccccataagttggaggataaaatgggtatcaatgctaatatttccagggagaacatgaaaccagaggtttctttctttctctgtaatctgctatgaaagaaaataacaaatgaaaataaatgtgtactacactttgaaatatttt

SEQ ID NO: 4777 - DNA, 3201 bp, Homo sapiens
gagactgtagggtgggcggtgcgagcggcggttagctcccagttcggcctctgaggaaaacgggcgttcgcctgcggttggtccgactgttagcaacatgagcggcctggatggggtcaagaggaccactcccctccaaacccacagcatcattatttctgaccaagtcccgagcgaccaggacgcacaccagtacctgaggctccgcgaccaaagcgaggcgacacaggtgatggcggagccgggtgagggaggctcggagaccgtcgcgctcccgcctccaccgccttcagaggaggggggcgtaccccaggatgccgcgggccgtggcggtactccccagatccgagttgttgggggtcgcggtcatgtggcgatcaaagccgggcaggaagagggccagcctcccgccgaaggcctggcagccgcttctgtggtgatggcagccgaccgcagcctgaaaaagggcgttcagggtggagagaaggccctagaaatctgtggcgcccagagatccgcgtctgagctgacggcgggggcggaggctgaggcggaggaggtgaagacaggaaagtgcgccaccgtctcagcagccgtggctgagagggagagcgctgaggtggtgaaggaaggcctggcggagaaggaggtaatggaggagcagatggaggtagaggagcagccgccagaaggtgaagaaatagaagtggcggaggaggatagattggaggaggaggcgagggaggaagaagggccctggcctttgcatgaggctctccgcatggaccctctggaggccatccagctggaactggacactgtgaatgctcaggccgacagggccttccaacagctggagcacaagtttgggcggatgcgtcgacactacctggagcggaggaactacatcattcagaatatcccgggcttctggatgactgcttttcgaaaccacccccagttgtccgccatgattaggggccaagatgcagagatgttaaggtacataaccaatttagaggtgaaggaactcagacaccctagaaccggttgcaagttcaagttcttctttagaagaaacccctacttcagaaacaagctgattgtcaaggaatatgaggtaagatcctccggccgagtggtgtctctttctactccaattatatggcgcagggggcatgaaccccagtccttcattcgcagaaaccaagacctcatctgcagcttcttcacttggttttcagaccacagccttccagagtccgacaaaattgctgagattattaaagaggatctgtggccaaatccactgcaatactacctgttgcgtgaaggagtccgtagagcccgacgtcgcccgctaagggagcctgtagagatccccaggccctttgggttccagtctggttaacatttgcccttgggaatactcctgcacaaggtctcctaccaccttctgctggacctgtgcttgggcatcagcaatgagtatgccttctattgtgctttgtttttgctgacttttctgcaccctgtttcctttggatattcagttctctcaacctcaagattgagacggtggtgggtatgcttctccacttccatatgaccttcatgctgttctggaatatcacatgctacgaggtcatccttcacactacttgtaagccaagcaaatgatactgtagattgtactgcctttatctgcactgcttggaccctgtttattcccagggcctctgaactggttgctgtcacttggatttctagctttgggagcctgttccacctactcagctctgcattgagcagtatgggcacatgccctgtggacagttactggacgttaatgaactcagaggagaaaagcagtgagccacttgttctgtgtgatttatggtacttcattgctcttccttcacctctagtcactttctattgctacctgccctacattggctcctgccaaggtccctctctctccctgttttccttttttttttttttttttttttttttgagacggaggacggagtcttgctctgtcgcccaggttggagtgcagtggcgcgatctcggctcactgcaacctccacctcccgggttcaagcgattctcctgcctcagcctcccgagtagctgggactacaggcgcgcgccgccacgcccggctaatttttatatttttagtagagacggggtttcaccatgctggccaggctggtctcgaaccccgatctcgtgatccgccctccttagcctcccaatcctctcttaaaaaagtgatagctcagaaacatttgtaaaagcaaggtttttatttcattttggctctgtcattttcagaggcaaagaagttggcctgtaaaatagagtgctagagctcttacgcccctccccttcttcccaacttcctacttcctagcccttttatcaactcctagaatagttaaagagagacacatctagatgggatgaaaggtgccctaagcaggagaaactgaacaaaaggctagaggcatgggccaggtaaaaattgggcctagagtgaagactgtgctgtcgttaagagctttcgaggaaggagtacttactccccaatgatgatgaatggaaaaatacttttcagggagaattgaaggggttaaagtgttaaatatgttgcctagacaagggttctttaaagaaagacagcgcaactttgaatgctttcttacttgttttgtgacctaatttatgtggaagattgttatttcattaggatttagtaaaatttttttttctgattctaaacttattgtgaaaattgagctgtacagatattcttttgatttcaattgggaacatttggaagaacaacagtcttacttgcctgtacaatatagagacatatgaatagtcataacagttttcaacttgttcttgtttctgttaaactatattcctagaaacatagtttgaacaacttggtctttgttaggcttgtcaaattgccttcatggaaaaataatctacaaaagtatggtttaattgattgtcttacatgataattttccctggtaacaacttagtaagtgatatatcttttttcctaaattgcttaaatactgtgaaattgctctgacaaattggaagtgtaccattggcatatttgtcttcctttttatgcatgatggtaaaataaaagcatgttgttctgct

SEQ ID NO: 4778 - DNA, 2591 bp, Homo sapiens
agataccagtcggtagaggagaagtcgaggttagagggaactgggaggcactttgctgtctgcaatcgaagttgagggtgcaaaaatgcagagtaataaaacttttaacttggagaagcaaaaccatactccaagaaagcatcatcaacatcaccaccagcagcagcaccaccagcagcaacagcagcagccgccaccaccgccaatacctgcaaatgggcaacaggccagcagccaaaatgaaggcttgactattgacctgaagaattttagaaaaccaggagagaagaccttcacccaacgaagccgtctttttgtgggaaatcttcctcccgacatcactgaggaagaaatgaggaaactatttgagaaatatggaaaggcaggcgaagtcttcattcataaggataaaggatttggctttatccgcttggaaacccgaaccctagcggagattgccaaagtggagctggacaatatgccactccgtggaaagcagctgcgtgtgcgctttgcctgccatagtgcatcccttacagttcgaaaccttcctcagtatgtgtccaacgaactgctggaagaagccttttctgtgtttggccaggtagagagggctgtagtcattgtggatgatcgaggaaggccctcaggaaaaggcattgttgagttctcagggaagccagctgctcggaaagctctggacagatgcagtgaaggctccttcctgctaaccacatttcctcgtcctgtgactgtggagcccatggaccagttagatgatgaagagggacttccagagaagctggttataaaaaaccagcaatttcacaaggaacgagagcagccacccagatttgcacagcctggctcctttgagtatgaatatgccatgcgctggaaggcactcattgagatggagaagcagcagcaggaccaagtggaccgcaacatcaaggaggctcgtgagaagctggagatggagatggaagctgcacgccatgagcaccaggtcatgctaatgagacaggatttgatgaggcgccaagaagaacttcggaggatggaagagctgcacaaccaagaggtgcaaaaacgaaagcaactggagctcaggcaggaggaagagcgcaggcgccgtgaagaagagatgcggcggcagcaagaagaaatgatgcggcgacagcaggaaggattcaagggaaccttccctgatgcgagagagcaggagattcggatgggtcagatggctatgggaggtgctatgggcataaacaacagaggtgccatgccccctgctcctgtgccagctggtaccccagctcctccaggacctgccactatgatgccggatggaactttgggattgaccccaccaacaactgaacgctttggtcaggctgctacaatggaaggaattggggcaattggtggaactcctcctgcattcaaccgtgcagctcctggagctgaatttgccccaaacaaacgtcgccgatactaataagttgcagtgtctagtttctcaaaacccttaaaagaaggaccctttttggactagccagaattctaccctggaaaagtgttagggattccttccaatagttagatctaccctgcctgtactactctagggagtatgctggaggcagagggcaagggaggggtggtattaaacaagtcaattctgtgtggtatattgtttaatcagttctgtgtggtgcattcctgaagtctctaatgtgactgttgagggcctggggaaaccatggcaaagtggatccagttagagcccattaatcttgatcattccggttttttttttttttgtccatcttgtttcatttgcttgccccgcccccgagacggagtcttactctgtcgcccaggctggagtgtagtggcatgatctcggctcactgcaatctctgcctcccgggttcaagcttgtccaggttgatcttgaactcctgacctcgtgatctacccacctcggcctcccaaaatgctgggattacaggggtgagccaccgtgcccaacctcacttgcttcttatccttacactcccccagccccagagaaactgccacatacaccacaaaaaccaaacatcccccaatgaccttagccccattgctccattcactcccaggtgagaattcaggcaaacgtccacaaaggtcacaggcagcgtacatacggttctgttataccccatatattaccccttcatgtcctaaagaagacattttctcttagagattttcattttagtgtatctttaaaaaaaaatcttgtgttaacttgcctccatctttttcttgggtgaggacacccaggaatgacccttttgtgtctatgatgttgctgttcacagcttttcttgataggcctagtacaatcttgggaacagggttactgtatactgaaggtctgacagtagctcttagactcgcctatcttaggtagtcatgctgtgcattttttttttcattggtgtactgtgtttgatttgtctcatatatttggagtttttctgaaaaatggagcagtaatgcagcatcaacctattaaaatacattttaagcctttt

SEQ ID NO: 4779 - DNA, 1855 bp, Homo sapiens
cttttctcgggacgggagaggccgtgtagcgtcgccgttactccgaggagataccagtcggtagaggagaagtcgaggttagagggaactgggaggcactttgctgtctgcaatcgaagttgagaggcccagtatttaggcgacagtgaatttattactctgaagagggttctgcacatatttccaaattatattggtggtcatcagaagtaggtgataggaagaaatacttctcaagggtgcaaaaatgcagagtaataaaacttttaacttggagaagcaaaaccatactccaagaaagcatcatcaacatcaccaccagcagcagcaccaccagcagcaacagcagcagccgccaccaccgccaatacctgcaaatgggcaacaggccagcagccaaaatgaaggcttgactattgacctgaagaattttagaaaaccaggagagaagaccttcacccaacgaagccgtctttttgtgggaaatcttcctcccgacatcactgaggaagaaatgaggaaactatttgagaaatatggaaaggcaggcgaagtcttcattcataaggataaaggatttggctttatccgcttggaaacccgaaccctagcggagattgccaaagtggagctggacaatatgccactccgtggaaagcagctgcgtgtgcgctttgcctgccatagtgcatcccttacagttcgaaaccttcctcagtatgtgtccaacgaactgctggaagaagccttttctgtgtttggccaggtagagagggctgtagtcattgtggatgatcgaggaaggccctcaggaaaaggcattgttgagttctcagggaagccagctgctcggaaagctctggacagatgcagtgaaggctccttcctgctaaccacatttcctcgtcctgtgactgtggagcccatggaccagttagatgatgaagagggacttccagagaagctggttataaaaaaccagcaatttcacaaggaacgagagcagccacccagatttgcacagcctggctcctttgagtatgaatatgccatgcgctggaaggcactcattgagatggagaagcagcagcaggaccaagtggaccgcaacatcaaggaggctcgtgagaagctggagatggagatggaagctgcacgccatgagcaccaggtcatgctaatgagacaggatttgatgaggcgccaagaagaacttcggaggatggaagagctgcacaaccaagaggtgcaaaaacgaaagcaactggagctcaggcaggaggaagagcgcaggcgccgtgaagaagagatgcggcggcagcaagaagaaatgatgcggcgacagcaggaaggattcaagggaaccttccctgatgcgagagagcaggagattcggatgggtcagatggctatgggaggtgctatgggcataaacaacagaggtgccatgccccctgctcctgtgccagctggtaccccagctcctccaggacctgccactatgatgccggatggaactttgggattgaccccaccaacaactgaacgctttggtcaggctgctacaatggaaggaattggggcaattggtggaactcctcctgcattcaaccgtgcagctcctggagctgaatttgccccaaacaaacgtcgccgatactaataagttgcagtgtctagtttctcaaaacccttaaaagaaggaccctttttggactagccagaattctaccctggaaaagtgttagggattccttccaatagttagatctaccctgcctgtactactctagggagtatgctggaggcagagggcaagggaggggtggtattaaacaagtcaattctgtgtggt

SEQ ID NO: 4780 - DNA, 1915 bp, Homo sapiens
agttcactcggcagcggcgccgggcggagggggagagcgcgggccgcgcgggcgggaagcgaagaggcgggcgggccagcgaggagcgcggagagaaaaggcgcgagcggccaggagggctcaggccgagacaccttgcagctgccgccgccgccaccgagccgccgctgtgctcactgatccgcctccagggccaccgccatgtcgagccgcggtgggaagaagaagtccaccaagacgtccaggtctgccaaagcaggagtcatctttcccgtggggcggatgctgcggtacatcaagaaaggccaccccaagtacaggattggagtgggggcacccgtgtacatggccgccgtcctggaatacctgacagcggagattctggagctggctggcaatgcagcgagagacaacaagaagggacgggtcacaccccggcacatcctgctggctgtggccaatgatgaagagctgaatcagctgctaaaaggagtcaccatagccagtgggggtgtgttacccaacatccaccccgagttgctagcgaagaagcggggatccaaaggaaagttggaagccatcatcacaccacccccagccaaaaaggccaagtctccatcccagaagaagcctgtatctaaaaaagcaggaggcaagaaaggggcccggaaatccaagaagaagcagggtgaagtcagtaaggcagccagcgccgacagcacaaccgagggcacacctgccgacggcttcacagtcctctccaccaagagcctcttccttggccagaagctgaaccttattcacagtgaaatcagtaatttagccggctttgaggtggaggccataatcaatcctaccaatgctgacattgaccttaaagatgacctaggaaacacgctggagaagaaaggtggcaaggagtttgtggaagctgtcctggaactccggaaaaagaacgggcccttggaagtagctggagctgctgtcagcgcaggccatggcctgcctgccaagtttgtgatccactgtaatagtccagtttggggtgcagacaagtgtgaagaacttctggaaaagacagtgaaaaactgcttggccctggctgatgataagaagctgaaatccattgcatttccatccatcggcagcggcaggaacggttttccaaagcagacagcagctcagctgattctgaaggccatctccagttacttcgtgtctacaatgtcctcttccatcaaaacggtgtacttcgtgctttttgacagcgagagtataggcatctatgtgcaggaaatggccaagctggacgccaactaggctgagcaatgacagaaccagctgcaccatgtaccccaccttcagtttaaaagaaaaaaaaaatccccttcactcctactgggaggtgggacccctttcattttcagttttgctcatctagggaaaataaggctttggtttccagtttaattgtttttgaccttctaaaatgtttttatgttagcactgatagttggcattactgttgttaagcactgtgttccagaccgtgtctgacttagtgtaacctaggagattttatagttttattttaatgaaaccctgattgacgcacagcagtggggagaacagcgtcttttacctgtcaccgaagccaggaagccccgtttgtaagcgtgtgttgtggtgctttattgtacatcctccagtggcgttctttttactctaatgttcttttggtttcccccctcagaagaatcatgaatttgcaacagacctaatttttggttactttttgtcttattgatggatttgaaaatgaaagatttaataaggcaaagcagaatctgttgtccttaattatatttgcaatttggaatttgtgtgagttgatttagtaaaatgttaaaccgtt

SEQ ID NO: 4781 - DNA, 5216 bp, Homo sapiens
aagcagcccgcggaccggcagcaaaggaacgtgcgaacgcgtgacgccgcccgactggctcgcgctctcccgtgccccggcgtcctccgcccgctcatggcccgggccgccgcggacgagcggcgctgaggcgggccgcgtggagacgtgaggcggccgccgtggccctcacagtcggcgtttcgccgcctgcccgcggtgcccgcgcacgccggccgccatcgccttcgcgcctggctggcgggggcgctgtcctcccaggccgtccgcgccgctccctggagctcggcggagcgcggcagccagggccggcggaggcgcgaggagccgggcgccaccgccgccgccgccgccgccgccgcgggggccatgaccgtggagcagaacgtgctgcagcagagcgcggcgcagaagcaccagcagacgtttttgaatcaactgagagaaattacggggattaatgacacccagatactacagcaagccttgaaggatagtaatggaaacttggaattagcagtggctttccttactgcgaagaatgctaagacccctcagcaggaggagacaacttactaccaaacagcacttcctggcaatgatagatacatcagtgtgggaagccaagcagatacaaatgtgattgatctcactggagatgataaagatgatcttcagagagcaattgccttgagtttggccgaatcaaacagggcattcagggagactggaataactgatgaggaacaagccattagcagagttcttgaagccagcatagcagagaataaagcatgtttgaagaggacacctacagaagtttggagggattctcgaaacccttatgatagaaaaagacaggacaaagctcccgttgggctaaagaatgttggcaatacttgttggtttagtgctgttattcagtcattatttaatcttttggaatttagaagattagttctgaattacaagcctccatcaaatgctcaagatttaccccgaaaccaaaaggaacatcggaatttgccttttatgcgtgagctgaggtatctatttgcacttcttgttggtaccaaaaggaagtatgttgatccatcaagagcagttgaaattcttaaggatgctttcaaatcaaatgactcacagcagcaagatgtgagtgagtttacacacaaattattagattggttagaagatgccttccaaatgaaagctgaagaggagacggatgaagagaagccaaagaaccccatggtagagttgttctatggcagattcctggctgtgggagtacttgaaggtaaaaaatttgaaaacactgaaatgtttggtcagtacccacttcaggtcaatgggttcaaagatctgcatgagtgcctagaagctgcaatgattgaaggagaaattgagtctttacattcagagaattcaggaaaatcaggccaagagcattggtttactgaattaccacctgtgttaacatttgaattgtcaagatttgaatttaatcaggcattgggaagaccagaaaaaattcacaacaaattagaatttccccaagttttatatttggacagatacatgcacagaaacagagaaataacaagaattaagagggaagagatcaagagactgaaagattacctcacggtattacaacaaaggctagaaagatatttaagctatggttccggtcccaaacgattccccttggtagatgttcttcagtatgcattggaatttgcctcaagtaaacctgtttgcacttctcctgttgacgatattgacgctagttccccacctagtggttccataccatcacagacattaccaagcacaacagaacaacagggagccctatcttcagaactgccaagcacatcaccttcatcagttgctgccatttcatcgagatcagtaatacacaaaccatttactcagtcccggatacctccagatttgcccatgcatccggcaccaaggcacataacggaggaagaactttctgtgctggaaagttgtttacatcgctggaggacagaaatagaaaatgacaccagagatttgcaggaaagcatatccagaatccatcgaacaattgaattaatgtactctgacaaatctatgatacaagttccttatcgattacatgccgttttagttcacgaaggccaagctaatgctgggcactactgggcatatatttttgatcatcgtgaaagcagatggatgaagtacaatgatattgctgtgacaaaatcatcatgggaagagctagtgagggactcttttggtggttatagaaatgccagtgcatactgtttaatgtacataaatgataaggcacagttcctaatacaagaggagtttaataaagaaactgggcagccccttgttggtatagaaacattaccaccggatttgagagattttgttgaggaagacaaccaacgatttgaaaaagaactagaagaatgggatgcacaacttgcccagaaagctttgcaggaaaagcttttagcgtctcagaaattgagagagtcagagacttctgtgacaacagcacaagcagcaggagacccagaatatctagagcagccatcaagaagtgatttctcaaagcacttgaaagaagaaactattcaaataattaccaaggcatcacatgagcatgaagataaaagtcctgaaacagttttgcagtcgatcatgatgacaccgaacatgcaaggtattatcatggcgataggtaaatccaggagtgtatatgacaggtgtggccctgaagcagggttctttaaggcaattaagttggaatatgcaaggttggttaagttggcccaagaagacaccccaccagaaaccgattatcgtttacatcatgtagtggtctactttatccagaaccaggcaccaaagaaaattattgagaaaacattactagaacaatttggagatagaaatttgagttttgatgaaaggtgtcacaacataatgaaagttgctcaagccaaactggaaatgataaaacctgaagaagtaaacttggaggaatatgaggagtggcatcaggattataggaaattcagggaaacaactatgtatctcataattgggctagaaaattttcaaagagaaagttatatagattccttgctgttcctcatctgtgcttatcagaataacaaagaactcttgtctaaaggcttatacagaggacatgatgaagaattgatatcacattatagaagagaatgtttgctaaaattaaatgagcaagccgcagaactcttcgaatctggagaggatcgagaagtaaacaatggtttgattatcatgaatgagtttattgtcccatttttgccattattactggtggatgaaatggaagaaaaggatatactagctgtagaagatatgagaaatcgatggtgttcctaccttggtcaagaaatggaaccacacctccaagaaaagctgacagattttttgccaaaactgcttgattgttctatggagattaaaagtttccatgagccaccgaagttaccttcatattccacgcatgaactctgtgagcgatttgcccgaatcatgttgtccctcagtcgaactcctgctgatggaagataaactgcacactttccctgaacacactgtataaactctttttagttcttaacccttgccttcctgtcacagggtttgcttgttgctgctatagtttttaacttttttttattttaataactgcaaaagacaaaatgactatacagactttagtcagactgcagacaataaagctgaaaatcgcatggcgctcagacattttaaccggaactgatgtataatcacaaatctaattgattttattatggcaaaactatgcttttgccaccttcctgttgcagtattactttgcttttatcttttctttctcaacagctttccattcagtctggatccttccatgactacagccatttaagtgttcagcactgtgtacgatacataatatttggtagcttgtaaatgaaataaagaataaagttttatttatggctacctatgtgtttgtaagcaggtatattgtatattagtgtattagtaatactagataaatgaattttgtctggggattaagattggatagttaatagattaatacaatcttttaattctgctctaatgctagcaaattggaaaatgtttaagtctttgacacttaaatttatctatatttttaacaaagttcttgaacttagtatggcaccggaacctgttttgaattcagtcaggtttttactcaagtaagtggttgattttttttaagtcaaactacactgaaacttttatccttttcttagattaatcttactttttaaatgtatttacaatatacagcaaggtgattatttcaagagaatcccaaagtacttgaataagggctattgtaaaatttaaaagaaatatttatatatacacatatatacacatacacacatgtatatatatattcttcataatggaggacaatgttttgcaatatataaatcattctatttttgtaaattgtatatcactttaattgaaaatgttctctactaattaatactgtgaaacaaaattgatgttgtttaactagaagttatgagtatcttaactgcctttattccttttcaaaaaggaaaaagctgtagaacattttgtagatgaaactactgtttaagattaatgaattaatattgtgaatgaaaatcaaaatccatactttaaaggtaatcatgttactaacaacctatttttgaattcataaaaatttctttataaatgatgttttgtgaacatagtaaaatagaccattatactatgtgtatgtttgatacagcgtcgccaaaactagtgttctttattagtgcctctcacaaaagatcctggatggaggagtaagatgaaatattatgctattatatgatgctgtttgtaaaggtattaatgtactagtaaggtgttaatgacaaggaattagtactattcctgttgtaaagttagattttgcatattgtatctatcaaaatatgtttgggtttagattttaagttgtctactgagcagatttctgcattggttttccagtcctgttaaaagtttagaaacttcatatgtgtcatcacagcttttgtaaagaaagtatccttaatattttatgacattct

SEQ ID NO: 4782 - DNA, 3142 bp, Homo sapiens
cgcggaggagcgtgcgcgggggccccgggagacggcggcggtggcggcgcgggcagagcaaggacgcggcggatcccactcgcacagcagcgcactcggtgccccgcgcagggtcgcgatgctgcccggtttggcactgctcctgctggccgcctggacggctcgggcgctggaggtacccactgatggtaatgctggcctgctggctgaaccccagattgccatgttctgtggcagactgaacatgcacatgaatgtccagaatgggaagtgggattcagatccatcagggaccaaaacctgcattgataccaaggaaggcatcctgcagtattgccaagaagtctaccctgaactgcagatcaccaatgtggtagaagccaaccaaccagtgaccatccagaactggtgcaagcggggccgcaagcagtgcaagacccatccccactttgtgattccctaccgctgcttagttggtgagtttgtaagtgatgcccttctcgttcctgacaagtgcaaattcttacaccaggagaggatggatgtttgcgaaactcatcttcactggcacaccgtcgccaaagagacatgcagtgagaagagtaccaacttgcatgactacggcatgttgctgccctgcggaattgacaagttccgaggggtagagtttgtgtgttgcccactggctgaagaaagtgacaatgtggattctgctgatgcggaggaggatgactcggatgtctggtggggcggagcagacacagactatgcagatgggagtgaagacaaagtagtagaagtagcagaggaggaagaagtggctgaggtggaagaagaagaagccgatgatgacgaggacgatgaggatggtgatgaggtagaggaagaggctgaggaaccctacgaagaagccacagagagaaccaccagcattgccaccaccaccaccaccaccacagagtctgtggaagaggtggttcgagaggtgtgctctgaacaagccgagacggggccgtgccgagcaatgatctcccgctggtactttgatgtgactgaagggaagtgtgccccattcttttacggcggatgtggcggcaaccggaacaactttgacacagaagagtactgcatggccgtgtgtggcagcgccattcctacaacagcagccagtacccctgatgccgttgacaagtatctcgagacacctggggatgagaatgaacatgcccatttccagaaagccaaagagaggcttgaggccaagcaccgagagagaatgtcccaggtcatgagagaatgggaagaggcagaacgtcaagcaaagaacttgcctaaagctgataagaaggcagttatccagcatttccaggagaaagtggaatctttggaacaggaagcagccaacgagagacagcagctggtggagacacacatggccagagtggaagccatgctcaatgaccgccgccgcctggccctggagaactacatcaccgctctgcaggctgttcctcctcggcctcgtcacgtgttcaatatgctaaagaagtatgtccgcgcagaacagaaggacagacagcacaccctaaagcatttcgagcatgtgcgcatggtggatcccaagaaagccgctcagatccggtcccaggttatgacacacctccgtgtgatttatgagcgcatgaatcagtctctctccctgctctacaacgtgcctgcagtggccgaggagattcaggatgaagttgatgagctgcttcagaaagagcaaaactattcagatgacgtcttggccaacatgattagtgaaccaaggatcagttacggaaacgatgctctcatgccatctttgaccgaaacgaaaaccaccgtggagctccttcccgtgaatggagagttcagcctggacgatctccagccgtggcattcttttggggctgactctgtgccagccaacacagaaaacgaagttgagcctgttgatgcccgccctgctgccgaccgaggactgaccactcgaccaggttctgggttgacaaatatcaagacggaggagatctctgaagtgaagatggatgcagaattccgacatgactcaggatatgaagttcatcatcaaaaattggtgttctttgcagaagatgtgggttcaaacaaaggtgcaatcattggactcatggtgggcggtgttgtcatagcgacagtgatcgtcatcaccttggtgatgctgaagaagaaacagtacacatccattcatcatggtgtggtggaggttgacgccgctgtcaccccagaggagcgccacctgtccaagatgcagcagaacggctacgaaaatccaacctacaagttctttgagcagatgcagaactagacccccgccacagcagcctctgaagttggacagcaaaaccattgcttcactacccatcggtgtccatttatagaataatgtgggaagaaacaaacccgttttatgatttactcattatcgccttttgacagctgtgctgtaacacaagtagatgcctgaacttgaattaatccacacatcagtaatgtattctatctctctttacattttggtctctatactacattattaatgggttttgtgtactgtaaagaatttagctgtatcaaactagtgcatgaatagattctctcctgattatttatcacatagccccttagccagttgtatattattcttgtggtttgtgacccaattaagtcctactttacatatgctttaagaatcgatgggggatgcttcatgtgaacgtgggagttcagctgcttctcttgcctaagtattcctttcctgatcactatgcattttaaagttaaacatttttaagtatttcagatgctttagagagattttttttccatgactgcattttactgtacagattgctgcttctgctatatttgtgatataggaattaagaggatacacacgtttgtttcttcgtgcctgttttatgtgcacacattaggcattgagacttcaagcttttctttttttgtccacgtatctttgggtctttgataaagaaaagaatccctgttcattgtaagcacttttacggggcgggtggggaggggtgctctgctggtcttcaattaccaagaattc

SEQ ID NO: 4783 - DNA, 1845 bp, Homo sapiens
ctgcagatcaccaatgtggtagaagccaaccaaccagtgaccatccagaactggtgcaagcggggccgcaagcagtgcaagacccatccccactttgtgattccctaccgctgcttagttggtgagtttgtaagtgatgcccttctcgttcctgacaagtgcaaattcttacaccaggagaggatggatgtttgcgaaactcatcttcactggcacaccgtcgccaaagagacatgcagtgagaagagtaccaacttgcatgactacggcatgttgctgccctgcggaattgacaagttccgaggggtagagtttgtgtgttgcccactggctgaagaaagtgacaatgtggattctgctgatgcggaggaggatgactcggatgtctggtggggcggagcagacacagactatgcagatgggagtgaagacaaagtagtagaagtagcagaggaggaagaagtggctgaggtggaagaagaagaagccgatgatgacgaggacgatgaggatggtgatgaggtagaggaagaggctgaggaaccctacgaagaagccacagagagaaccaccagcattgccaccaccaccaccaccaccacagagtctgtggaagaggtggttcgagaggtgtgctctgaacaagccgagacggggccgtgccgagcaatgatctcccgctggtactttgatgtgactgaagggaagtgtgccccattcttttacggcggatgtggcggcaaccggaacaactttgacacagaagagtactgcatggccgtgtgtggcagcgccattcctacaacagcagccagtacccctgatgccgttgacaagtatctcgagacacctggggatgagaatgaacatgcccatttccagaaagccaaagagaggcttgaggccaagcaccgagagagaatgtcccaggtcatgagagaatgggaagaggcagaacgtcaagcaaagaacttgcctaaagctgataagaaggcagttatccagcatttccaggagaaagtggaatctttggaacaggaagcagccaacgagagacagcagctggtggagacacacatggccagagtggaagccatgctcaatgaccgccgccgcctggccctggagaactacatcaccgctctgcaggctgttcctcctcggcctcgtcacgtgttcaatatgctaaagaagtatgtccgcgcagaacagaaggacagacagcacaccctaaagcatttcgagcatgtgcgcatggtggatcccaagaaagccgctcagatccggtcccaggttatgacacacctccgtgtgatttatgagcgcatgaatcagtctctctccctgctctacaacgtgcctgcagtggccgaggagattcaggatgaagttggtgcagtggctcatgcctgtaattccagcattttgggaggccaaggtgggcagatgacttgagcccagaagttcaagaccagaatgggaaacatggcaagaccacatttctacaaaaaaattatccaggcatgataacatctatttgtagtcccagctactcaggaggctgtggtgggaggatctcctgagcctggggtggctgaggctgcagtgagccttgatcacgccacctgggcaatagagcaagaccctgtctcaaaaaaaggaagaaaaagactattatttcccccattgaatggtcttggcactattacacaaaatcaattgtccatagataatatgggtttatttcttaattcttagttcttttctttgatctgtgtgcctgtgcttactgtagtaccacactgttttgattattgtagctttgtagtaaattttgaaatcagc

SEQ ID NO: 4784 - DNA, 1296 bp, Homo sapiens
cgagagcacgcggaggagcgtgcgcgggggccccgggagacggcggcggtggcggcgcgggcagagcaaggacgcggcggatcccactcgcacagcagcgcactcggtgccccgcgcagggtcgcgatgctgcccggtttggcactgctcctgctggccgcctggacggctcgggcgctggaggtacccactgatggtaatgctggcctgctggctgaaccccagattgccatgttctgtggcagactgaacatgcacatgaatgtccagaatgggaagtgggattcagatccatcagggaccaaaacctgcattgataccaaggaaggcatcctgcagtattgccaagaagtctaccctgaactgcagatcaccaatgtggtagaagccaaccaaccagtgaccatccagaactggtgcaagcggggccgcaagcagtgcaagacccatccccactttgtgattccctaccgctgcttagttggtgagtttgtaagtgatgcccttctcgttcctgacaagtgcaaattcttacaccaggagaggatggatgtttgcgaaactcatcttcactggcacaccgtcgccaaagagacatgcagtgagaagagtaccaacttgcatgactacggcatgttgctgccctgcggaattgacaagttccgaggggtagagtttgtgtgttgcccactggctgaagaaagtgacaatgtggattctgctgatgcggaggaggatgactcggatgtctggtggggcggagcagacacagactatgcagatgggagtgaagacaaagtagtagaagtagcagaggaggaagaagtggctgaggtggaagaagaagaagccgatgatgacgaggacgatgaggatggtgatgaggtagaggaagaggctgaggaaccctacgaagaagccacagagagaaccaccagcattgccaccaccaccaccaccaccacagagtctgtggaagaggtggttcgagagaagtggtataaggaagtacattctggccaggcacgatggctcatgctgtaatcccagcactttgggaggccgaggtgggtgcatcacctgaggtcaggagtttgagaccagcctggccaacatggtgaaacccctcgctactaaaaatacaaaaattagccgggcgtggtggcacacacctgtggtcccagctactcgggaggctgaagcaggagaatcgcttgaacccgggagacggaggttgcagtaagccgagttcactccattgtactctagcctgggtgacagagcgagattcgtctc

SEQ ID NO: 4785 - DNA, 2739 bp, Homo sapiens
ggcacagaaaatgaggattattaaaggtcagttgctcgcagtgctacagctagaatgaagcacatcaacctatcatttgcagcgtgtggatttctgggcatttaccacttgggggcagcatctgcactttgcagacatggcaaaaaacttgtgaaggatgtcaaagccttcgctggggcgtctgcgggatcgttggttgcttctgttctgctaacagcaccagaaaaaatagaggaatgtaaccaatttacctacaagtttgccgaagaaatcagaaggcagtctttcggggcagtaacgcccggttatgacttcatggcccgactaagaagtgggatggagtcgattcttcctcccagcgctcacgagctggcccagaaccgactgcacgtatccatcaccaacgccaaaaccagagaaaatcacttagtctccactttttcctccagggaggacctcattaaggtcctcctagccagcagttttgtgcccatttatgcaggactgaagctagtggaatacaaaggacagaagtgggtggacggaggcctcaccaacgctcttcccatcctgcccgtcggccggacagtaaccatctcccccttcagtggacgactggacatctccccgcaggacaaagggcagctagatctgtatgttaatatcgccaagcaggatatcatgttgtccctggcaaacctggtgagactcaaccaagccctttttcccccaagcaagaggaaaatggaatctttgtatcagtgtggttttgatgacactgttaagtttttacttaaagaaaattggtttgaataaaatgcataaaagtttataatgcaaaacacgttttagatagtttttgatggaagtttctaatcaaatcctttttagaaaatctatcatgactcaattgtattactccttgtaatatttgtgtttatttttaatatttgaattattacttagcacatggatataagaggcactttattagaatttgacaacgtcattaagaaggatacacttaggtgataaggaatcatttttggtgaactgttgtgtcctttaaaaaatggaggaggataggttctttgggtaaattgaggaacatggaaaatggagggccaccacttaggttccatggagaatatgtggcatgatcttgacgtgaagcatgggtgtttccgtgacttagctgtgtccctgtagctctggaactgaaggaactaggtaggagaggaaggatttgagaaataggcaactcatggttaaagacctttgatcaggactggaggaacaaaggtttgtgtattagtccattttcacactgctgagaaagacatacccaagactgggcaatttacaaaagaaaggtttaatgggctcacagttccacatgactgaggaggcctcacaattgtggtggaaggtgaaaggcatgtctcacatggcagcagacaagagaagaaaacttgtgcagggaaactcccctttataaaaccatcggatctcttgagactcgttcactatcatgagaatagcatgggaaagacctgcctccatgattcagttacctcccactgggtccctcccacaacgtgtggcaattgtgggagctacatacacttcaagatgagatttgggtggggacacagccaaaccataacagtttgctttccacaggtgtgtgcagttgctcccagtgcagttaggggcagatatccagaagcctaggagattttgaagaggcttatcccctctcatcttcctcccctaaaccccaccccagtttaggagattatcaagctggttgtcattcattctctctctctctctctctctctctctctctctctctctctctctctctctctcgccatacctctctgagtatttagctattgttctatatactggatacatctattatgggaacttaaatagataaaatactactaaacacaaagaaccaagtagcctagtaaataagaattaaatccagaataatcattcacttctcatttttaaatcacgttgtactgatcccaggttttttactttctgagtagttgtccatcactttgaggacttgtgtatgggcttgtaccaatttactgacactgtcttaaatcctaaatctgtttttatgaggttttgccaagcaagaactcttgattactaagaggcagttagagacaaaccaatttaattccatgtcttcaattgtcacgcatttcttcttttactctttgaaactattctttgagtcaattttatggttctcagaagccaaaatacacaacttttagcacataaacaccaacgatggcctctttttgaggagttatgcatagacccactctagagtaatgatggtccctgtggtatatactttctcctactctagcaaacatgtagtttaatcttaatgtgttgtttccataagtgacatgaagtggatagattctcaattgttatgtccacttattcactaggtaaattttcagttttaatacttttctccttaccccttcctttgatcatttcatgtgaatattctatttgtatgatacactgtatttcaataaattccttgttgatgtacccttaaattgaagaaatttaagctgcaaaaccaaatctcattgtataagacttttttgaagtatcttgtatcgactacatatgtatttgaccctgtgggaggatggtacttttctttttaacttttattttaag

SEQ ID NO: 4786 - DNA, 3549 bp, Homo sapiens
ctgctcgcggcgccgcctcctgctcctcccgctgctgctgccgctgccgccctgagtcactgcctgcgcagctccggccgcctggctccccatactagtcgccgatatttggagttcttacaacatggcagacattgacaacaaagaacagtctgaacttgatcaagatttggatgatgttgaagaagtagaagaagaggaaactggtgaagaaacaaaactcaaagcacgtcagctaactgttcagatgatgcaaaatcctcagattcttgcagcccttcaagaaagacttgatggtctggtagaaacaccaacaggatacattgaaagcctgcctagggtagttaaaagacgagtgaatgctctcaaaaacctgcaagttaaatgtgcacagatagaagccaaattctatgaggaagttcacgatcttgaaaggaagtatgctgttctctatcagcctctatttgataagcgatttgaaattattaatgcaatttatgaacctacggaagaagaatgtgaatggaaaccagatgaagaagatgagatttcggaggaattgaaagaaaaggccaagattgaagatgagaaaaaagatgaagaaaaagaagaccccaaaggaattcctgaattttggttaactgtttttaagaatgttgacttgctcagtgatatggttcaggaacacgatgaacctattctgaagcacttgaaagatattaaagtgaagttctcagatgctggccagcctatgagttttgtcttagaatttcactttgaacccaatgaatattttacaaatgaagtgctgacaaagacatacaggatgaggtcagaaccagatgattctgatcccttttcttttgatggaccagaaattatgggttgtacagggtgccagatagattggaaaaaaggaaagaatgtcactttgaaaactattaagaagaagcagaaacacaagggacgtgggacagttcgtactgtgactaaaacagtttccaatgactctttctttaacttttttgcccctcctgaagttcctgagagtggagatctggatgatgatgctgaagctatccttgctgcagacttcgaaattggtcactttttacgtgagcgtataatcccaagatcagtgttatattttactggagaagctattgaagatgatgatgatgattatgatgaagaaggtgaagaagcggatgaggaaggggaagaagaaggagatgaggaaaatgatccagactatgacccaaagaaggatcaaaacccagcagagtgcaagcagcagtgaagcaggatgtatgtggccttgaggataacctgcactgtaatagcctaaacacaactcttatttacttacagccttatgtttttgtattttcttggtagactaggtaatttttttttaaaggacaggaaactgatattttaaagaccaatttgttctacctagcattttaactagtttttctgccagctatgttgaatgcacaaattctgtcacgcatgttcattcattgctacataatttggttcttctggaatatttttatgtagctcttggagtacagctatgaaaattaacaactgttaaaggaaataccttttttttttttttgtaattttttccttgaagaaccaaagtattttttcagctggttgttgaatagggttaagtccgcttggattagctgtgcctttcattactttgttacagaaatgcagtgacttatactaagacaatttattgtttaaaaaaaaaattggcaagacaactatatggttaagaatttccagtatgaccacacccaataactgttattagagtgttaatggattattgtgttttaggtgacatagttaactgtaaagtaacctgactcagtatagttactggtaccacagtgaggtgaataaaacgggattttcagaagttagcctgaatttaactgtatttttaaatttaacctccattaactaagcatcttttctttgtggtagggtctaccttctgcttccctggaaaggatgaatttacatcatttgacaagcctattttcaagttatttgttgtttgtttgcttgtttttgtttttgcagctaaaataaaaatttcaaatacaattttagttcttacaagataatgtcttaattttgtaccaattcaggtagaagtagaggcctaccttgaattaagggttatactcagtttttaacacattgttgaagaaaaggtaccagctttggaacgagatgctatactaataagcaagtgtaaaaaaaaaaaaaaaagaggaagaaaatcttaagtgattgatgctgttttcttttaaaaaaaaaaaaaaaaattcattttctttgggttagagctagagagaaggccccaagcttctatggtttcttctaattcttattgcttaaagtatgagtatgtcacttacccgtgcttctgtttactgtgtaattaaaatgggtagtactgtttacctaactacctcatggatgtgttaaggcatattgagttaaatctcatataatgtttctcaatcttgttaaaagctcaaaattttgggcctatttgtaatgccagtgtgacactaagcattttgttcacaccacgctttgataactaaactggaaaacaaaggtgttaagtacctctgttctggatctgggcagtcagcactctttttagatctttgtgtggctcctatttttatagaagtggagggatgcactatttcacaaggtccaagatttgttttcagatatttttgatgactgtattgtaaatactacagggatagcactatagtattgtagtcatgagacttaaagtggaaataagactatttttgacaaaagatgccattaaatttcagactgtagagccacatttacaatacctcaggctaattactgttaattttggggttgaacttttttttgacagtgagggtggattattggattgtcattagaggaaggtctagatttcctgctcttaataaaattacattgaattgatttttagaggtaatgaaaacttcctttctgagaagttagtgttaaggtcttggaatgtgaacacattgtttgtagtgctatccattcctctcctgagattttaacttactactggaaatccttaaccaattataatagctttttttctttattttcaaaatgatttcctttgctttgattagacactatgtgctttttttttttaaccatagttcatcgaaatgcagctttttctgaacttcaaagatagaatcccatttttaatgaactgaagtagcaaaatcatctttttcattctttaggaaatagctattgccaaagtgaaggtgtagataatacctagtcttgttacataaaggggatgtggtttgcagaagaattttctttataaaattgaagttttaagggacgtcagtgtttatgccatttttccagttccaaaatgattccattccattctagaaatttgaagtatgtaacctgaaatccttaataaaatttggatttaatttt

SEQ ID NO: 4787 - DNA, 6578 bp, Homo sapiens
ggtgaacagctcaaatccattttttacatcacagaccaaagccaatgggaatcctgcttgttcggcccagttgcagcatgtctcgccacccatttttccagctcatttagcaagtgtgtcaactccattgttgtcctcaatggaaagtgtcataaatccaaatataacttctcaggataaaaatgaacaaggtggtatgttatgttcccaaatggaaaatttacctagtactgccttgccagcacaaatggaagatctaaccaaaacagttctgcctttgaatattgacagtggctcagatcctttccttcctttacctgcagaaagtagttcaatgtctctcttcccttcaccagcagatagtgggactaattctgttttttcccaactggaaaataatacaaatcattattcctcacagattgaaggaaacactaattcctcctttctaaaggggggtaatggtgaaaatgcagtttttccttcacaagtgaatgttgcaaataacttcagtagcaccaatgcccaacagtctgcacctgaaaaagttaaaaaagaccgtgggcggggcccaaatgggaaggaaagaaaacctaagcacaacaaaagggctaaatggcctgcaattatcagagatgggaaatttatctgtagcaggtgttacagggcttttactaatcccagatcactgggtgggcacttatccaagcgatcttactgtaaaccactggatggagccgaaattgctcaagaacttctacagagtaatggacagccttctcttcttgccagcatgattctctccacaaatgcagtaaatttgcagcagccacaacaatctaccttcaatccagaagcatgttttaaagatccatcatttctacagcttcttgctgaaaatcgctcgccagcatttttaccaaatacatttcctcgatctggtgtgactaactttaataccagtgtcagtcaagaaggtagtgaaattattaaacaggctttggaaactgctggcattcccagtacatttgagggtgccgaaatgctttctcatgtttcaacaggttgtgtctctgatgcatcacaagtaaatgcaacggtgatgccaaatccaactgtaccacccctgttgcacactgtatgccatccaaacaccttgctgaccaaccagaataggacgtcaaactccaaaacttcctccattgaggaatgtagcagcttgcctgtttttccaacgaatgacttactactgaagactgttgaaaatggtttgtgctctagttcatttcctaattctggtgggccatcacaaaattttaccagtaacagttctcgtgtttctgttataagtggtcctcagaacacaagatccagtcatttaaataaaaagggaaacagtgcttctaagagaagaaagaaagttgctcctccactaattgcacctaacgcttcccaaaacttggtaacaagtgacttaacaacaatgggactcatagcaaagagtgttgaaatcccaactactaaccttcattcaaatgtaattccaacttgtgaacctcagagtttggtggaaaatctaacacagaaattaaataatgttaacaatcagttatttatgactgatgtaaaagagaatttcaaaaccagtcttgagtcccatacagtgttagcccctttaacattaaaaactgaaaatggtgattcccaaatgatggctttgaattcatgcacaacttcaataaattctgatttgcagatttctgaagacaatgttatacaaaactttgaaaagactcttgaaattattaaaactgctatgaattctcaaatacttgaggtaaaaagtggatctcagggtgctggtgaaacttcacaaaatgctcaaataaattataacattcagcttccttcagtaaacactgtgcaaaataacaaattacccgattcttctccgttttcctcctttataagtgtcatgccaacaaaaagtaacattcctcagtctgaagtatcacataaggaggatcaaatacaggaaattttagaaggcttacagaaattaaaattagaaaatgacctatccactccagcatcccaatgtgtactgataaatacatcagtgacactgactcccacgcctgttaaatcaactgcagatatcacagttattcagccagtttctgaaatgataaacattcaatttaatgacaaagttaataaaccctttgtgtgtcaaaaccaaggctgtaactacagtgctatgacaaaggatgcactatttaagcactatggtaaaattcatcaatacactccagaaatgattcttgaaattaagaagaatcaattgaaatttgctccctttaaatgtgtagtacctacatgtacaaaaacatttacaagaaattctaacctccgggcacactgtcagttggtgcatcattttacaactgaagaaatggtaaagttaaaaattaaaaggccttatggaagaaaatctcagagtgaaaatgtgccggcctcacgaagtacacaagtgaaaaaacagctagctatgacagaggaaaataaaaaggaatctcagcctgctttagaattgagagcagagacccaaaatacccacagtaatgtagcagtgatcccagaaaaacaacttgtagaaaaaaaaagtcctgacaaaacagaaagttctttacaagtgattacagttacttcagaacaatgtaatacaaatgcactcacaaacacacaaaccaaaggacggaagattaggaggcataaaaaagaaaaggaggagaaaaaacgaaagaagccagtttcccaatcccttgagtttccaacaagatacagtccttacagaccttatcgatgtgttcaccagggatgctttgctgcctttacgatacagcaaaacttgattctccattaccaggctgtacacaaatcagatctacctgcattttcagcagaggtcgaagaggaaagtgaagctggtaaagaaagtgaagaaactgaaactaaacaaactttgaaagaatttcgatgtcaggtaagtgactgttctcgaattttccaagcaattactggcctaatacaacactacatgaaacttcatgaaatgactcctgaagaaattgaaagtatgactgcttcagtggatgttgggaagtttccatgtgaccagttagagtgtaaatcttcatttactacatatttgaactatgttgttcatctagaggcagaccacgggattggactaagggcaagtaaaacagaagaagatggtgtatacaaatgtgattgtgaaggctgtgaccgtatatatgcaacccggtcgaatctcctccgacacatttttaataagcataatgacaaacataaggctcatttgattcgtccaagaagattaacaccaggccaggaaaatatgtcaagcaaggcaaaccaagaaaaatcaaagtctaaacatcgggggaccaagcacagcagatgtggaaaggaaggaataaaaatgcccaagaccaaacgaaagaaaaaaaataatttagaaaacaagaatgcaaagattgtgcagattgaagaaaataagccttattctctgaaacgtgggaagcatgtatattctataaaggctagaaatgatgccctgtctgagtgtacaagcagatttgtaacccagtatccatgtatgataaagggatgtacttcagttgttacaagtgaaagcaatataattagacattataagtgccataaattatctaaggcatttacatcacaacaccgaaatcttcttattgtattcaaacggtgttgcaactcacaagtaaaggaaacgtctgagcaagaaggtgctaagaatgatgtgaaagattctgacacgtgtgtatcagagagcaatgataattcaagaacaacagctacagtttcacaaaaggaagttgaaaaaaatgaaaaagatgaaatggatgaactaacagaattgtttattacaaaattaataaatgaagatagcacaagtgtagagacccaagctaatacttcttcaaatgtaagtaatgattttcaggaagataacctctgccagtcagaaagacaaaaagcaagtaatttgaagagagttaataaggaaaaaaatgtctcacaaaataaaaaaaggaaagttgaaaaagctgaaccagcatcagcagctgagttaagtagcgtgcgtaaagaagaagaaactgctgttgccattcaaaccattgaggagcatcctgcatcttttgactggagctcttttaagccaatgggatttgaagtatcatttctgaagtttcttgaggagtctgcagtgaagcagaagaaaaatactgacaaagaccatccgaatactggaaacaaaaaaggatcccattcaaattcaagaaaaaatattgataagactgctgtgactagtggaaatcatgtatgtccttgtaaagaaagcgaaacgtttgtacagtttgccaatccatcacagcttcagtgcagtgataatgtaaaaattgttttagacaagaatcttaaagattgcactgagcttgtcttaaagcaacttcaggaaatgaaacctaccgtcagtctgaaaaaacttgaagtacattcaaatgatccagatatgtctgttatgaaagatatcagtataggtaaagccacaggcagaggtcagtactgataattaatgtagtataaatacatcatttaccattttattttaaataggaagccatcaagcatgctagaattgtgaaactttcattatatttttttgttgttgacatgaattaacctggccaaaaacaaaaaagaaaaaaaaaacatgacatttgtcatgtaaaacttttttttatccctatgggacttgaggaacagaatcagtacttcagttattgtaaatagtgagctaaacctcaaatttctatcacccagttgcccttttcatgaactaaacaattatctgtgtgattggtatgtttcaccaggtcactgctcatgtataacagtactctttatttgtagataccttttttgtatatatttattattgtaaatcatgtgctgccaccagcagtctgtaagtctaaactattaaatgacacatttatatttggaattttaatttttaactaagcgatcaagttttttaaattgttcttttattgttttaaattaagaactttttgaactaaaaccagaaactctgccatagttcattgatttttacatgaaacatttatttacaagatgatatcaagattacttttcacaaaataggcacattatatcaacactttgctctgctttgtaaatttgccatccaggattttggggtggtattcatgtgaaattaaagcagattctctagcagtttcctatagctacagtttttttttttcattgcttctaattggatatagttactatgagtccatgaaatacaatggaaatgtgaataaagaatttactacattgaagattttaaacatttggtattaaaaaaaaatcctttgtgaatgtgatagaaaactagtagtgtggagcagtgtaaatatttgaggtggtgatttgtgaagtagcccagtattgccttaaataaaatcacatttcatttcttgttttatacatgtgatcttataaagattttttgttttgttttgttttccattttctgagatttatagattggtgtatagctttaaactgtataaagttttgtggaaagatttttttaaacatttttataaatcttaaaattgatatcatcaaagtgagcccatcttgtgtttataaaatacaagagtccttaacatttataattacatagataaaacactttctataaggaagttggatgttttgattttactgtttatagatgttagattgtacagatttgtctgtatttctcaccatatctaatgatacttttttcattagattggtcttcaagaacagtattagttataattattttggttattcagtatatagttagctcttacagtttagctttattcaccatatttatactgtggattcacagcgagaggtagaggttattccaggagagttgatgaccttcatttaaagtccaactaaaatcagtagtagaaacataagaaaacatctttgcaatatttacttttgtttctgtttgccgtaaatagtaacattgtttttttttattttgtgtttgttataaaacagttgcattcacaatattattggcctgagatattgatgatattgtgatggtatgaaaatgtgtacattccctgtgcaacatcagatttgcaggaaaaatgaagcacttactgaaatcgctggtactctgaataaataagcatggtcaaggagtgaactattttcttttggaaatttctttttaatttttattattaaagtattttatttttagggccttttgggttttattgaatagttcatttcacctgtttaagacttactaccaataagcataaaacctgacacgttaaaatccctgccctttggtgagcccactgttatttattaaaataaaagttattttatgggtgatt

SEQ ID NO: 4788 - DNA, 5959 bp, Homo sapiens
cgcagtcgtccttccgccccagagaccgatgatagtcgagttgggggcattatgagaggagagaaaaactactacttccgtggagctgcgggggaccacggttcctgccccactacaacttcgcctctggcctcggccctcttgatgccctcggaggcagtctcaagcagctggtctgagtctggaggcggtttgtcagggggagatgaagaggacactcggctccttcaactcctccgcactgcccgggatccttctgaggccttccaggctttgcaagctgctttgccgcggcggggcggtcgacttggcttcccccgacgcaaggaagctttgtatcgggcactgggccgagtgcttgtggaaggaggtagtgatgagaagcggctctgcttgcaacttctctcggacgttctccggggtcagggggaggcaggccagcttgaagaggcctttagcttagcacttttgcctcaactagttgtctcgttacgggaagagaatccagccctgcggaaagatgcgctgcagatccttcatatatgtctgaaacgtagtcctggagaggtgctgagaacgcttatacaacaaggactggaaagtaccgatgcccgacttagagcttccacagcactactgcttcccatcttgcttactactgaggacttgttgcttggtctggatctcaccgaggtgataatatccctagcccgaaagcttggtgatcaggagacagaagaagaatctgagacagctttctccgcacttcaacaaattggggagcgacttggccaagacaggtttcaatcttacatttctcgtctgccctctgccctgaggagacactacaatcgccgcctggagtcccagtttggaagtcaggttccttattatttggaacttgaagcctctggatttcctgaagatccccttccctgtgcagtgactctttccaacagcaatcttaaatttgggattattcctcaggagctgcattcacgattattggatcaggaagactataagaaccggacccaggccgtcgaagaactaaagcaggtgctgggaaaatttaaccctagttctactcctcattctagtcttgttggcttcattagtttgctatataatttgttagacgattctaacttcaaagtggtgcatggcacacttgaagtcctgcatttactggttattcgccttggagagcaggtacagcagttcttgggaccagttatagcagcttctgtcaaagtgctggcggacaacaagttggtgatcaaacaagaatacatgaaaatcttcctcaagctaatgaaggaagtaggacctcagcaggtgctttgtttactcctggaacatctcaaacataagcattccagagtgagagaggaggtggtgaacatttgcatctgctccctgctgacctatcctagtgaggattttgacttgcccaaactgtcctttgatcttgccccagctcttgtagatagcaaacgcagggtacgccaagcagctttagaagcttttgccgtattggcatcatcaatgggctcaggtaaaaccagcatcctttttaaagctgtggatacagttgaactgcaagataatggagatggagtgatgaatgctgtgcaggccagattggctaggaaaaccttaccaaggctcacagagcagggatttgtggaatatgcagtactgatgccatcttctgccgggggtaggtcaaaccatttggcacatggagcagatacggactggcttttggctggtaacagaactcagagtgcacactgtcactgtggtgaccacgtgagggatagcatgcacatttatggatcttacagcccaactatctgtacccgaagggtattaagtgcaggaaaaggaaaaaataaattaccatgggaaaatgagcaacctggaatcatgggagaaaaccagacctccacttccaaggatatagagcagttttcaacatatgatttcatcccatctgcaaaattaaagctttctcaaggaatgccagtcaatgatgatttatgttttagcagaaaaagagtatcaagaaacttatttcagaatagtcgggattttaacccagattgtcttcctttatgtgctgctggtactactgggactcatcaaacaaatctttctgggaaatgtgcacaacttggattttcacaaatatgtggtaaaactggcagtgtgggttctgacttacaattcctagggacaactagcagtcatcaagaaaaaggtatgctagcctcaattttggcagtaagacacagcaaacatttggtagtcaaacagagtgtacttcctcaaatggtcaaaatccaagtccaggagcttacatccttccatcctatcctgtctcatcacctcgaactagtccaaagcatacatctcctcttattatatctccaaagaagtctcaagataattctgttaatttctcaaattcctggcctcttaaaagcttcgaaggactatcaaagccaagtccacagaagaagcttgtcagccaaaaatcgtctgatcctacgggtagaaatcatggagaaaattctcaagaaaaacctccagttcagcttacacctgccttggtgagatcgccatcttcccgacgaggtctaaatgggacaaagcctgttcctcccataccaaggggaataagccttttgcctgataaagctgatttaagcacagtgggacacaaaaagaaagagcctgatgatatttggaagtgtgaaaaagatagtcttccaattgatctttcagaattaaatttcaaggataaagatttggatcaagaagagatgcatagctctcttaggtcccttcgtaatagtgcagctaagaaaagagcaaaactgagtggcagtacttcagatcttgaaagccctgattctgcaatgaagctcgacttgacgatggactccccgtctctgtcttcctcaccaaacatcaattcttacagtgaaagtggagtttacagccaagaatcattgacttcttctctgtctacaactccccaggggaagagaataatgtcagacatatttccaacatttgggtcaaaaccttgtccaacaagactttcttctgcaaagaaaaaaatttctcatattgctgaacaaagccccagtgcagggtcatcatcaaatccacagcaaatttccagttttgacttcacaaccacaaaggctttatcagaagactcagtagtagttgttggaaaaggcgtatttggaagtttaagttcagcaccagcaacctgcagccaatcagtgatatcttctgtggaaaatggggatacattttcaattaaacaaagtattgaaccaccatcagggatttatggaagatcagtccagcaaaatatttcatcatatcttgatgttgagaatgaaaaagatgctaaagtttctatttctaaatctacttataacaagatgagacaaaagagaaaagaagagaaagaactgtttcacaataaagattgtgaaaagaaggaaaaaaattcctgggaacgaatgagacatacaggaactgagaaaatggcatctgaaagtgaaacacctactggagctatttcacagtataaagaaaggatgccttctgtcactcatagtccagaaataatggatctgtcagaactacgaccattctctaaaccagaaatagcactgacagaagccctgaggcttttggctgatgaggattgggagaagaaaattgagggactgaattttattagatgcttagctgcttttcattctgagatactgaacacaaagttgcatgaaacaaattttgcagttgttcaagaggtgaaaaatttacgttctggagtttctcgtgctgctgtggtctgtttaagtgatcttttcacttatttgaaaaagagcatggatcaagagctagataccacagtaaaagttttgttgcacaaggctggtgaatcaaatacatttataagagaagatgttgacaaagcattgagagctatggttaataatgtaactcctgcacgtgcagttgtttctcttatcaatggtggacaaaggtattatggtcgaaagatgctgttcttcatgatgtgtcatcctaactttgaaaaaatgcttgaaaagtatgtcccatctaaagatttgccatatattaaggactctgttagaaacttacagcaaaagggtttgggggagataccattagatactccttcagcaaaaggaagacgatctcatactggcagtgttggaaatacaagatcatcatctgtttctagagatgctttcaattcagctgaaagagctgtaactgaagttcgtgaagtcaccagaaaatcagtccctcgtaattccttagaaagtgctgagtaccttaaactcataactggcttattaaatgcaaaagactttcgtgatcgtattaatgggattaagcagcttttatcagatacagaaaataatcaagaccttgttgttggaaacattgtgaagatttttgatgcttttaaatctcgacttcatgattctaatagtaaagtaaatctggtggctctggaaacaatgcacaaaatgattcctctacttagagaccacttatctcctataatcaacatgctaattccagcaatagtggataacaatctgaattccaagaatccaggcatctatgcggctgctacaaatgttgttcaggcactgagtcagcatgtagacaattacttacttctacagccattttgcacaaaagctcagtttttaaatggaaaagcaaaacaggacatgacggaaaagcttgctgatattgttacggaactttatcaaaggaagccgcatgccacagagcagaaagtgttggttgttttatggcatctcttaggaaatatgacaaatagtggctctctgcctggagctggaggaaatatacgaacagccacagctaaattatcaaaagcactctttgcacagatgggtcagaatctgttaaatcaggctgcatctcaaccaccacatatcaaaaagagtttggaggaattactcgatatgacaattttaaatgaattatgaatcttcgataaaatactgtatgatgaacaaaagtgtttacatgatgacaaatggaactttctaaaagttatgttatcagtgcctgcacttcacatccagcaaattaagtcaatggctatttttatttgcagcctatgagtacacatctgtcctatatcaaccttaccacttatattcatcacataaaaacctaaaatattcatgaataattcatgaaatctgagtcacatgggatgaattcaattttaatatttttgagaaaagtcctgctcatttgcactattctatagaaactacaatttgttgccctatatgtaaaattagaattgtaattaaaaatacacattttattatgtaatcatgttctggtatgtctcatttctcagccttattttataacgtggaagtcattgaactatgttatcagaaactaagtttgtatattatttgtgaaaaacatgtatttctgaatcagtccgctaatatgattgtgcagtattagcttgcttttgctgctgtgttaatgtcatatatttgcttaccttttgggttcaattatctacataattgtgaaatttaacaagttataataaagcatgacaaccaaagttttagaaaacattaaacattttaaatgcacgtttaaaaaacgtgttgaatgtaacccccctatttttgtgtgcaaacactaaattttattgctttatgttttgacctttataaaggtgttattctgctgcccagttttgtaattctcaaaaatagtgccaggtcttctatagcttttttcagaattcatgggcttacaagtactgtatgcatctttaaaaagaaaaggaatgttataaaataaaaggatttatttcttt

SEQ ID NO: 4789 - DNA, 3337 bp, Homo sapiens
agggctggctatttgcctcagaatattcctctggagattatcagatacctgtctgaggagaaggattttcttccttggcatgctgccagccgagctctttatcctctagataaattactggaccgcatggaaaactacaacattttcaatgaatatattttaaagcaagttgcaacaacatatatcaagcttgggtggccgaaaaataattttaatggatctcttgttcaagcatcctaccaacatgaagaactacgtagagaagttataatgctggcctgcagttttggcaacaagcactgtcaccaacaggcatcaacacttatttcagattggatttccagcaacaggaacagaataccactaaatgttagagacatcgtatactgtacaggagtgtcactactggatgaggatgtctgggaattcatatggatgaaattccattccaccacagcagtttctgagaagaaaatattattggaagccttaacttgcagtgatgacaggaatttattaaacaggcttctaaatctgtcactgaattctgaggtggtgctggatcaagatgcaattgatgtcataatccatgtagctcgaaatccacatggtcgagaccttgcctggaagtttttcagggataaatggaagatattaaataccaggtatggagaagcattgtttatgaattccaaactcatcagtggtgtcacagaatttcttaatactgaaggtgaactcaaagagctcaagaacttcatgaaaaactatgatggggtagctgctgcttctttctcacgagctgtggaaactgtcgaagccaatgtgcgctggaaaatgctttaccaagacgagcttttccaatggttaggaaaagctctaagacactaatatatgtatcttataaacaaacaattcaactcagaagtttatgagaagacacgctttttgtggaatgaggaaaatgtactacctagaaaatggccagattttcagtgttaacgtgtgggaggaattttttttttagtttttattttttggttttgggggatattttttatttgtttcattcattctgttctgtttctctactgggtgttcctctctaaagaaactcttgcaagtgaaactagccatgattgcttcagctgtacattccttgctgtacaggaccaaatatgatagtgatgcatgttgatgttacagtcaatttggaaaaacatattcagaatatctgtgcatggatatattgtcctgcctgtgttccagcatgcttatttcaaacgtccagtgttgtgtgtgaatatgtgttacacctaggatgggcattatgcaaaagcacaaagattatatatgacaatcagtattgcaatgaaagaaaaactaaaaacagaaatgatattctcaattttgggcaatgtgagaggtaaaatagcccttgacatgatgaacatcacttatttcagcacttggattgtctggcaatgattactgtgttgctaactcattttctttgagttaaagctgtgtatacattttaaaaggcatatagatagtgtatgcatatgtatatgtacatagggaagccccatatgtatatagtatgttgtacactgcacatgtacaaagaatgtcttcagatcaaagaaaatttatctctttttataaacttaaggacagttgcaaaaggcttcaaggaatttatctcaacattattctttctatgtcctaactaaatttctcaactgttatgaatttttcatctacttcttgaacagtggtctattctgctacatgaagatgaatacaaacaaaatttttgtataaactactattccagttctcctgtgtcagtcttgcctatagattttgccatcgttttctgtcaaagttccttttgcatgaaacaattatgcaaacttataattattagtgctgaaaaagagtttattttccatcttgtttgttttcctaccttatgctgagtagtccagagagttaaaaaaattctctgcatgttggtcttttaagtctgttttgctctaatcctccattaagcgagcatacctcaagtgggtctattagcatttaatgaccttttgtgccagttgtgccatcccttaagatgaaaagttccttttcttgtgttaatgtacaaagcttttcttttggcactgacaactgtgttctacctgggaattttgaatagccattttcatggctgtgtgttgtgtaacacaaatgtttttaaatggtattctcacccagtaggccagctctccaaacgttgcttagatgcttcaaaattagcatattttaagtttaccagtataaaataccaatgcaactactctacatagccaaatgtttgtaaatcacgtcttattttcctgaggtttttcactccaccaaatcttacaaatcattgaaagaaatatattctaacagtacgcactgaatagtgaaaataattagacattttaagaaccagagccatagaattattttaaattagtagaaaagaggagctatttccgaatctatagaataaagtaccacctaaaactgaattttatcatataagcaagtaatacctattagtcatacctaaatttttcagcacttcattcaattaaaatacatgaattttaaatattttacatgatgtgaataggcatgataatacttttagtataaaatctaaactttttccatttatcagaaatgataaaatccagttaccacatatcacgtttataaaatccttaattaaatgagtaacttctaaaatataacaatactaaatatcacactgcgatggaggtcccaaatatgtggtctatcaccactgaattcatgtaatagataagaaaaaaattagaggtggatgtcttgttttgtgtcatgaattactaaaatctcttagtagttgtggtatatttttgagtaaaattaccatttccagatttgagtttgaagggcttttatagttgtattttcctcctcactgttaataatcataatcctttttcagtattttagtggccttgaacaactggtttatctacaatctcaaatcctaagtgtataattatgtgcaatgttcaatacctcatataatacttgctcaacagtatagtggtaccaatggcattaagatggtgtttttgttctacatatttttcaataatttattctttctaatgttgaaattatatcaggctttaccggtttttttagttgtttaaataagtaatattttcaaaagaataaaataaccaatgatatctcttggaataatctgtaaaacgtagttataaaattctattttctactt

SEQ ID NO: 4790 - DNA, 737 bp, Homo sapiens
caagtccctgcgcattgccgagtatgccttcaagctggcgcaggagagcgggcgcaagaaagtgacggccgtgcacaaggccaacatcatgaaactgggcgatgggcttttcctccagtgctgcagggaggtggcagcccgctaccctcagatcaccttcgagaacatgattgtggataacaccaccatgcagctggtgtcccggccccagcagtttgatgtcatggtgatgcccaatctctatggcaacatcgtcaacaatgtctgcgcgggactggtcgggggcccaggccttgtggctggggccaactatggccatgtgtacgcggtgtttgaaacagctacgaggaacaccggcaagagtatcgccaataagaacatcgccaaccccacggccaccctgctggccagctgcatgatgctggaccacctcaagctgcactcctatgccacctccatccgtaaggctgtcctggcatccatggacaatgagaatggcctggtgtgtgccgagcctgcctgtgtcctacagatgcacactccggacatcgggggccagggcacaacatctgaagccatccaggacgtcatccgccacatccgcgtcatcaacggccgggccgtggaggcctaggctggccctaggaccttcttggtttgctccttggattccccttcccactccagcaccccagccagcctggtacgcagatcccagaataaagcaccttctccct

SEQ ID NO: 4791 - DNA, 1270 bp, Homo sapiens
gactttgaagaggtgcacgtgagttccaatgctgatgaagaggacattcgcaatgccatcatggccatccgccggaaccgcgtggccctgaagggcaacatcgaaaccaaccataacctgccaccgtcgcacaaatctcgaaacaacatccttcgcaccagcctggacctctatgccaacgtcatccactgtaagagccttccaggcgtggtgacccggcacaaggacatagacatcctcattgtccgggagaacacagagggcgagtacagcagcctggagcatgaggtgtggcgggagtggtggagagcctgaagatcatcaccaaggccaagtccctgcgcattgccgagtatgccttcaagctggcgcaggagagcgggcgcaagaaagtgacggccgtgcacaaggccaacatcatgaaactgggcgatgggcttttcctccagtgctgcagggaggtggcagcccgctaccctcagatcaccttcgagaacatgattgtggataacaccaccatgcagctggtgtcccggccccagcagtttgatgtcatggtgatgcccaatctctatggcaacatcgtcaacaatgtctgcgcgggactggtcgggggcccaggccttgtggctggggccaactatggccatgtgtacgcggtgtttgaaacagctacgaggaacaccggcaagagtatcgccaataagaacatcgccaaccccacggccaccctgctggccagctgcatgatgctggaccacctcaagctgcactcctatgccacctccatccgtaaggctgtcctggcatccatggacaatgagaatgtgaggttcccctcgcaccctaccctgctgccccgcccagtctccccctgcagcctcctgtagcccgcctcatgcactgaccacagcccccaggggaggatggtactggatctggccccatcttctggcccttagctggtgccacttccctcctgtggcaatcccagtcctgcacgtcacaggagacagcggggggtggcagggcctggtgtgtgccgagcctgcctgtgtcctacagatgcacactccggacatcgggggccagggcacaacatctgaagccatccaggacgtcatccgccacatccgcgtcatcaacggccgggccgtggaggcctaggctggccctaggaccttcttggtttgctccttggattccccttcccactccagcaccccagccagcctggtacgcagatcccagaataaagcaccttctccct

SEQ ID NO: 4792 - DNA, 2230 bp, Homo sapiens
gcacaaagtgctggtagtgtctgtgtgtcctcaatctttgccttattttgctgctaaattcaacctcagtgtaactgatgcatccagaagactctgtggtttcctcaaaagtcttggggtgcactatgtatttgatacgacgatagctgcggattttagtatcctggagagtcaaaaagaattcgtgcgtctatcgccagcacagtgaggaggaacgcaccctgcccatgctgacctctgcctgtcctggctgggtccgatacgccgagcgggtgctgggtcgccccatcactgcccacctctgcaccgccaagtccccccagcaggtcatgggctctttggtgaaggattatttcgccagacagcagaacctgtctccagagaagattttccacgtcattgtggccccttgttatgacaagaagctggaggctcttcaggaaagccttccccctgctttgcatggctcccggggcgctgactgcgtgttaacatcaggtgaaattgctcaaataatggagcaaggtgacctctcagtgagagatgctgccgtcgacactctgtaagtggcttctctggggagagtcctctggggggcaggacctctcgtcagccctgccagccacctgccaggcccagggctgccctgctttatgacgaggccatgtgaagcactgcgatgcagtcccccaggcccctgccacaaccctcagccaccctatagctgttgaatgggataccattcaccagggctgccagggagttgaaggtttggcgggcttccatggtgtgattgccaccctaaacccttgaggaaggacaaaatgcacaaacagctttgtcctcgctggcgcagggctgttcatgtgtgcaccagcccccttcttcctgagtgccgtctgtgcctcacattccgtgtggtctatggggcagtggggcagctccctcaggcccctttgcaccaagagtggcagtctgggttctgctgggggcggtgacctcgatacccagcaaggcccagggctcctgctgcaccccaggcactgggcagagagcaccacaaaggcagcagcgtgtgtcctcgccaacagtccgcatcccaggtgctgcattcgtgcccttttgggggaaggtaagatagaagtttacagaatttaagcatctgtggggccaggcgtggtggctcacacctataatcacagtactttgggaggctgaggtaggaggatcacttgagtccaggaggctggggctgtagtgagctatgattgtgccactgcactccagcctgagagacagaacaagaccctgtctccaaaagaaaaagaccataagcatctggagcacctgcaagagcctgtgcatgggctcggcgtgactgagagtcctccgccttgcccgagcatcaggcaggccctcccaagacccctcaagatgctagaatgggactttctgcaaagtttaaacatctgtacaggatttagcttctttggtggcgaacttggattgtgatgccctcaggaagtctggtttcactctttctgtcactgtacgtcagcattcatgaaggacttgtattttctctgccttgtgaggtttggagacttgaaggaggacaaagtgacgcgtcatgatggagccagctcagacgggcacctggcacacatcttcagacatgcggccaaggagctgttcaacgaggatgtggaggaggtcacttaccgagccctgagaaacaaagacttccaagaggtcacccttgagaagaacggagaggtggtgttacgctttgctgcagcctatggctttcgaaacatccagaacatgatcctgaagcttaagaagggcaagttcccattccactttgtggaggtcctcgcctgtgctggaggatgcttaaatggcagaggcaagcccagactccagacggacatgcggataaggccctgctgcggcagatggaaggcatttacgctgacatccctgtgcggcgtccggagtccagtgcacacgtgcaggagctgtaccaggagtggctggaggggatcaactcccccaaggcccgagaggtgctgcataccacgtaccagagccaggagcgtggcacacacagcctggacatcaagtggtgaagtcaggccagggccttccagctgctcttggggccagagccaagagcctctcagtagagggaggggctgccctgagtggagtattaaagacacttaag

SEQ ID NO: 4793 - DNA, 2212 bp, Homo sapiens
gcgcagttgtcgtctcttgcggtgccgttgctggttctcacaccttttaggtctgttctcgtcttccgttccgactctctctttttcgttgcagccactgaagatcctggtgtcgccatgggccgccgccccgcccgttggtgagtcttgaatccgtgtactttcactgctgggaaacgggcggggaaagaagtgcctatggcccgctgaaaacaattgtggggtggagcctcccccgtgcggcggccctgtcttgggaactgaccctatgttttacacctcccggctattttttagtctgcaatattactgtctgttccttcgttcccgtgtcggtgtggaagcgacggttccctcgtatctctgcctgtgtcctgcaagctcaccgcattttcgggcgctagatacgctcttggggcctttgtgtgcgttctctgtcttatttccgggcgacgtgccgcgtgcgttgtcggacgtgaagggcagtccgggaaaaacgggtgcggccgcctcctgtgtcctacagggggcgccagacgcatttccactcggcttggaggtggatttagtgccacgtgcccgaaagtcttaaattgggtgacctgagctgtgcaatgataatgcggcgattttgtagtacgcagtgtcttgaagagagaatttttaactaggaaagtttgttgcaaagtgtttataggaagcgtaagacaaagtaacggaagatggtgtctgttgtttctagtcttgggtgttgtctgtgttgcagcagccaactgttgctttgtagtttatttccccgaatggaaacggtttagaagtggacgtgcattccccacccttttcccgtccctcgtttgggttgttccttgaggggcaaagtgcctgttgggctttctgtgaacctcacctaacctgtgttttttcactcccctgcagttaccggtattgtaagaacaagccgtacccaaagtctcgcttctgccgaggtgtccctgatgccaagattcgcatttttgacctggggcggaaaaaggcaaaagtggatgagtttccgctttgtggccacatggtgtcagatgaatatgagcagctgtcctctgaagccctggaggctgcccgaatttgtgccaataagtacatggtaaaaagttgtggcaaagatggcttccatatccgggtgcggctccaccccttccacgtcatccgcatcaacaagatgttgtcctgtgctggggctgacaggtgagcttggtctgggccttttaaggcagttggagtctctacattattaggcttgcattattttatcagagcatagaggtggccccagtgactcagccactatggctactagaaaagccaggctggcaagtgactttcagtggtcactcaggaccccttcctgcagatacaaacaaagcatgagtaagtcttagcaagctcttccccacaggttaggggaaacactggtgatgggagtagctcttcttgcttttagctgaatgacaaccatcttgccagcaggtagctgaagctggcagaggagcccagtggcgccttttcagtggttcttgggatctccgcagccaattaagccgactgagttcctttcctcatggggacccagtgtgcgatggctgcacacagcagcttccttggtagtgtacgcagcctgttggttgtatgggttgctctaagggaccttggagacaggcctttcaggtggatgttcatgtttctgaccttgcactaccccaatgtaggctccaaacaggcatgcgaggtgcctttggaaagccccagggcactgtggccagggttcacattggccaagttatcatgtccatccgcaccaagctgcagaacaaggagcatgtgattgaggccctgcgcagggccaagttcaagtttcctggccgccagaaggtatgtagtgctgcagcccccttctcccacctttgccccaggcctcctgactcagttctttccattgctccttagatccacatctcaaagaagtggggcttcaccaagttcaatgctgatgaatttgaagacatggtggctgaaaagcggctcatcccagatggctgtggggtcaagtacatccccagtcgtggccctctggacaagtggcgggccctgcactcatgagggcttccaatgtgctgcccccctcttaatactcaccaataaattctacttcctgtcc

SEQ ID NO: 4794 - DNA, 1436 bp, Homo sapiens
acagcttcaagtgaagttaatctgaggtgaagcaaacagaaaattgtggaggttttgttggtgtgcaatggaggaacatggctcaagaaactaatcacagccaagtacctatgctttgttccactggctgcggattttatggaaaccctcgtacaaatggcacgtgttcagtatgctataaagaacatcttcaaagactgaatagtagtaatggtagaataagccaacctgcaacctctgaatctttaccagttcaatgcacagatggcagtgtcccagaagcccagtcaacattagactctacatcttcatctatgcagccaagccctgtatcaaatcagtcacttttatcagaatctgtagcatcttctcaattggacagtacatctgtggacaagcagtacctgaaacagaagatctgcaggcttcagtatcagacatggcacagcagccatctgaagagcaaagcaagtctcttgaaaaaccaaaacaaaaaaagaatctctgtttcatgtgcaggaagaaagtgggacttactaggtttgaatgcggtgtagaaatgtttactgtggtgtacactgttactcagatctacacaattgctcttaaaattacaaagctgatgccgctgagaaaatcagaaaagaaaatccagtagttgttggcgagaagatccaaaagatttgaactcctgctggaatacaaaattcttgatcatctgcaaactaaaaattgacttgaggtttttttttccctagtcattgggaaagtagagcagtgtatcttgcatgtcatcggatgaatagatttttgttttgattttgttttgaaaatgactctgaacatttatttccattgcaatttctgtggctgagaagacttaaactttacaagtattatccttataagatcattttaattttagttgagtgcagagggcttttataacaaacgtgcagaaattttggtggactgtgatttttccagtattaaatatgcatgcattaatcttgcagtttattttctcattgtgtacatatatattgcttttctttgcagcacgatttctcttttgataatgccctttggggcacaactagttatcggtaactgaatgtatcttaatcattatggctgcttctgttttttcattaacaaaggttattcatatgttagcatatagtttctttgcacccactatttatgtctgaatcatttgtcacgagagtgtgtgctgatgagattctaagtttgtgtgtttaaacttttttttgagcgagggaagaaaaagctgtatgcatttcattgctgtctacaggtttctttcagattatgttcatgggtttgtgtgtatacgatatgaagaatgatctgaagtaattgtgctgtatttatgtttattcaccagtctttgattaaataaaaaggaaaaccag

SEQ ID NO: 4795 - DNA, 2414 bp, Homo sapiens
aaaacaaattgataaggagccaaagattcagagttgcaattctggggttaaatctgtgaaaaaccaagctcattctgtactgaaaaaaacattacaggatcaaactttagtacaaattttcaagcccttaactcattctttgagtgataagtcacacgctcatcctggttgcttgaaagaacctcatcatcctgcacaaactggacatgtatcacattctagccagaaacagtgtcataagcctcagcaacaggccccagcaatgaaaaccaatagtcacgtgaaggaagagcttgaacacccaggcgttgagcattttaaggaagaggataaactgaaactgaaaaaacctggagaatcaacctactactctggaattagcaaataaacctcttcctgtggatgatatacttcaaagccttttgggcaccactggtcaagtatatgaccaggcccagtcagtgatggaacaaaacactgttaaagaaattccatttttaaatgagcagaccaactcaaaaatagagaaaacagataatgtggaagtaactgatggtgaaaacaaggagataaaagttaaagtagataatatttcagaatctacagataagtcagcagaaatagaaacatcagtagtagggtcctcttccatttctgcagggtctttgacgagtcttagtctcagaggtaagccaccagatgtttctacagaagcatttttaacaaatttatcaattcagtcaaaacaagaggaaactgtggagagtaaagagaaaacattaaaaagacagcttcaggaagatcaagagaataatttgcaagataaccagacttcaaatagttctccatgcagatctaatgtaggaaaaggaaacatagatggtaatgtgagctgtagtgaaaaccttgttgctaatacagcgaggtctccacagtttatcaacctgaaaagggatcctaggcaagcagcaggacgaagtcagcctgtaactacttcagaaagcaaagatggagatagttgccggaatggagaaaaacacatgctgcctggcctgtcacacaacaaggagcacttaacagaacaaatcaatgtagaggaaaagttgtgttctgcagagaaaaactcgtgtgttcagcagagtgacaatttaaaagttgcacaaaactcaccatcagtagaaaacatacagacttctcaagcagaacaagcaaaacccttacaggaggatattttaatgcaaaatattgaaactgtgcacccatttcgaagaggatcagcagtagcgacatctcattttgaagttggaaacacatgtccatcagaatttccttctaaaagcatcacctttacttccagaagcaccagccccagaacaagtacaaacttttcacccatgaggccacagcagcccaaccttcagcatctcaagtctagcccacctggatttccatttccagggcctcctaattttcccccacaaagcatgtttggatttccaccacatttgccacctccattacttccccctccaggctttggctttgctcaaaatcccatggttccctggccacctgttgttcatctcccaggtcagccacagcgtatgatgggtcctctctcacaagcatcaaggtatataggcccgcagaatttttaccaggttaaagacattcggaggccagaaaggcgccatagtgacccttggggtaggcaagaccaacagcaactggataggccatttaataggggtaaaggggaccgccagagattttatagtgattcacaccatttgaaaagagagcgacatgaaaaggaatgggagcaagaatctgaaaggcatagacgcagagacagaagccaagacaaggacagagacagaaaaagcagggaggaagggcacaaagataaagagagggcacggttatcacatggtgatcgaggaacagatggaaaagcaagcagagatagtaggaatgtagacaagaagccagataaacctaaaagtgaagactatgagaaggacaaagaacgagagaaaagtaaacacagagaaggagaaaaggacagggataggtaccacaaagatagggaccacactgacagaactaaaagcaaaaggtaaaatttgcaggctgcttcaggattacatttaaataactgttaaaatgttgtatcttgtaaacaaaagaaagattgcctgctaggattgtgccatctttaaaatttttactattggtcatttgcagaacagtaaattctgtgtgttggtacagagtgctctgtaccagtgctcatcatcccttcttcataccaacggtccctagttataggaatttaatatttttaaaagttttacattgctgtatattcaaagatttgttttattaatatgcaataaaggcttagaaatttt

SEQ ID NO: 4796 - DNA, 1186 bp, Homo sapiens
cccgctccgtcctcctcgcctgccaccggtgcacccagtccgctcacccagcccagtccgtccggtcctcaccgcctgccggccggcccaccccccaccgcagccatggacgccatcaagaagaagatgcagatgctgaagctggacaaggagaacgccatcgaccgcgccgagcaggccgaagccgacaagaagcaagctgaggaccgctgcaagcagctggaggaggagcagcaggccctccagaagaagctgaaggggacagaggatgaggtggaaaagtattctgaatccgtgaaggaggcccaggagaaactggagcaggccgagaagaaggccactgatctgaggcagatgtggcctccctgaaccgccgcattcagctggttgaggaggagctggaccgggcccaggagcgcctggctacagccctgcagaagctggaggaggccgagaaggcggctgatgagagcgagagaggaatgaaggtcatcgaaaaccgggccatgaaggatgaggagaagatggaactgcaggagatgcagctgaaggaggccaagcacatcgctgaggattcagaccgcaaatatgaagaggtggccaggaagctggtgatcctggaaggagagctggagcgctcggaggagagggctgaggtggccgagagtaaatgtggggacctagaggaggagctgaaaattgttaccaacaacttgaaatccctggaggcccaggcggacaagtattccaccaaagaagataaatatgaagaggagatcaaactgttggaggagaagctgaaggaggctgagacccgagcagagtttgccgagaggtctgtggcaaagttggagaaaaccatcgatgacctagaagatgaagtctatgcccagaagatgaagtacaaggccattagcgaggaactggacaacgcactcaatgacatcacctccctctgagccccacgccagcgtggccacctcagctctcttctctcctctcctttccattctctctatggggaggggagcaggcaggaggagcagaaattgccaacattgcacagccaggctgggagcagcctagggagagcccccatcatgcccaccacccactctggcactggcttcatcctttacctatccccttccaccctcctttgctgcttaataaattctgaacttgg

SEQ ID NO: 4797 - DNA, 2028 bp, Homo sapiens
tcaaaggtgaagtcctctatctcggctactaccaatcagccttcgactgggatgatgaaacagccaaggcctccaagcagcatcgtcttaaacgctaccacagccagacctatggcaatgggtccaagtgcgaccttaatgggaggccccgggaggccgaggttcggttcctctgtgacgagggtgcaggtatctctggggactacatcgatcgcgtggacgagcccttgtcctgctcttatgtgctgaccattcgcactcctcggctctgcccccaccctctcctccggcccccacccagtgctgcaccgcaggccatcctctgtcacccttccctacagcctgaggagtacatggcctacgttcagaggcaagccgactcaaagcagtatggagataaaatcatagaggagctgcaagatctaggcccccaagtgtggagtgagaccaagtctggggtggcaccccaaaagatggcaggtgcgagcccgaccaaggatgacagtaaggactcagatttctggaagatgcttaatgagccagaggaccaggccccaggaggggaggaggtgccggctgaggagcaggacccaagccctgaggcagcagattcagcttctggtgctcccaatgattttcagaacaacgtgcaggtcaaagtcattcgaagccctgcggatttgattcgattcatagaggagctgaaaggtggaacaaaaaaggggaagccaaatataggccaagagcagcctgtggatgatgctgcagaagtccctcagagggaaccagagaaggaaaggggtgatccagaacggcagagagagatggaagaagaggaggatgaggatgaggatgaggatgaagatgaggatgaacggcagttactgggagaatttgagaaggaactggaagggatcctgcttccgtcagaccgagaccggctccgttcggagacagagaaagagctggacccagatgggctgaagaaggagtcagagcgggatcgggcaatgctggctctcacatccactctcaacaaactcatcaaaagactggaggaaaaacagagtccagagctggtgaagaagcacaagaaaaagagggttgtccccaaaaagcctcccccatcaccccaacctacagggaaaattgagatcaaaattgtccgcccatgggctgaagggactgaagagggtgcacgttggctgactgatgaggacacgagaaacctcaaggagatcttcttcaatatcttggtgccgggagctgaagaggcccagaaggaacgccagcggcagaaagagctggagagcaattaccgccgggtgtggggctctccaggtggggagggcacaggggacctggacgaatttgacttctgagaccaacactacacttgacccttcacggaatccagactcttcctggactggcttgcctcctccccacctccccaccctggaacccctgagggccaaacagcagagtggagctgagctgtggacctctcgggcaactctgtgggtgtgggggccctgggtgaatgctgctgcccctgctggcagccaccttgagacctcaccgggcctgtgatatttgctctcctgaactctcactcaatcctcttcctctcctctgtggcttttcctgttattgtcccctaatgataggatattccctgctgcctacctggagattcagtaggatcttttgagtggaggtgggtagagagagcaaggagggcaggacacttagcaggcactgagcaagcaggcccccacctgcccttagtgatgtttggagtcgttttaccctcttctattgaattgccttgggatttccttctccctttccctgcccaccctgtcccctacaatttgtgcttctgagttgaggagccttcacctctgttgctgaggaaatggtagaatgctgcctatcacctccagcacaatcccagtgaaaaaggtgtgaagcacccaccatgttcttgaacaatcaggtttctaaataaacaactggaccatc

SEQ ID NO: 4798 - DNA, 3868 bp, Homo sapiens
cttatctttatggagggcaaataaggatttaaaaaatcttttaaaagggaggaatggaaagaccacaagtggaaaacagactttagagatatctctccaagtcacagaaggaaagcagccctccctccttactgaaagtctggagaattgagagtggaagtgaagggaagagaattgagtgtgtaagtagatgagaggttatgtgtcttggagccaggagactctggttccaagaaaagatgtctgcactccatccccctgattgtttattttttaattgtcagacaaaggactggtggacatatgaattctgttatggacgccacatccagcaataccacatggaagattcagagatcaaaggtgaagtcctctatctcggctactaccaatcagccttcgactgggatgatgaaacagccaaggtggcaagagtgtgggattcaggaagaaagggttctggccaccggctgagagccctgacaagaaggggagggtcaagattagctgatctgtttcttggggcttggtggccattaggacaaagtttcctggggcctgggggcacaggccattcttttgtctctttggggacgcagtgccatccttcctctttgctatctttctcatgtcccccattcctgcctcatgtcttctccaggcctccaagcagcatcgtcttaaacgctaccacagccagacctatggcaatgggtccaagtgcgaccttaatgggaggccccgggaggccgaggttcggttcctctgtgacgagggtgcaggtatctctggggactacatcgatcgcgtggacgagcccttgtcctgctcttatgtgctgaccattcgcactcctcggctctgcccccaccctctcctccggcccccacccagtgctgcaccgcaggccatcctctgtcacccttccctacagcctgaggagtacatggcctacgttcagaggcaagccggtgagtaattagagaaggaggagaagacggggagatacgggggcagggggtggcaaaagatcaagtattgaatagctggaggaatgtgttcctggcctgcttgcatgctgtttctcagtagactcaaagcagtatggagataaaatcatagaggagctgcaagatctaggcccccaagtgtggagtgagaccaagtctggggtggcaccccaaaagatggcaggtgcgagcccgaccaaggatgacagtaaggactcagatttctggaagatgcttaatgagccagaggaccaggccccaggaggggaggaggtgccggctgaggagcaggacccaagccctgaggcagcagattcagcttctggtgctcccaatgattttcagaacaacgtgcaggtcaaagtcattcgaagccctgcggatttgattcgattcatagaggagctgaaaggtggaacaaaaaaggggaagccaaatataggccaagagcagcctgtggatgatgctgcagaagtccctcagagggaaccagagaaggaaaggggtgatccagaacggcagagagagatggaagaagaggaggatgaggatgaggatgaggatgaagatgaggatgaacggcagttactgggagaatttgagaaggaactggaagggatcctgcttccgtcagaccgagaccggctccgttcggaggtgaaggctggcatggagcgggaactggaaaacatcatccaggagacagagaaagagctggacccagatgggctgaagaaggagtcagagcgggatcgggcaatgctggctctcacatccactctcaacaaactcatcaaaagactggaggaaaaacagagtccagagctggtgaagaagcacaagaaaaagagggttgtccccaaaaagcctcccccatcaccccaacctacaggtgagagcagtcagacaagaaagagtagcccagtctgttgttttcatccctcagctggttctgttcccagaggggaccctgttccttcccttctgagggtgctcattctctccccactttctggaacactgtcctcacttgcgcctgcttcccaacaccatcatccctttgcgtgtttacctcctattcatccctctgggaagcagcttttagagcatatctgctggttttctggtttgctcctgtacacccagtgcctagcactctgcctggcacacaatggatgatcagtagctagtaattgaatgcttgtgagtctatatgctgaaaaccactttaggactttgcaccaagagaggccccagctgtcagggcatgaataggagagcccagctgcacatgagccaatagcttggatagactttaaattatttcttcttcttgtatccccttgtgtccatttcatagtgtcctatgggtgtggacatcagatattctaaatggaatgttccagtttcaaaccttccattcccactctctctataaacattgaaatgtctttaaagtcccaacatatggaggaggagaccacacttttccaacctgcttcttcaaacagaactttgttggtgcaggtggcctgattttggctttagaaaacatttgttttcctataggtgacgggcagaattattgggtagggcgggaagatggaaggctgcaattggtggagggagctctacaggctgaactgggaggggcggggcacacatttttttgagccctggctcatatacatgttgagatggaagagctgccaaagccaactgatgttttagggggagatgacccccacacccctaaccctggagtcacgcctctgctttgtgtttccctgtgtgtctccccctctaagaggaggatcctgagcacagagtccgggtccgggtcaccaagctccgtctcggaggccctaatcaggatctgactgtcctcgagatgaaacgggaaaacccacagctgaaacaaatcgaggggctggtgaaggagctgctggagagggagggactcacagctgcagggaaaattgagatcaaaattgtccgcccatgggctgaagggactgaagagggtgcacgttggctgactgatgaggacacgagaaacctcaaggagatcttcttcaatatcttggtgccgggagctgaagaggcccagaaggaacgccagcggcagaaagagctggagagcaattaccgccgggtgtggggctctccaggtggggagggcacaggggacctggacgaatttgacttctgagaccaacactacacttgacccttcacggaatccagactcttcctggactggcttgcctcctccccacctccccaccctggaacccctgagggccaaacagcagagtggagctgagctgtggacctctcgggcaactctgtgggtgtgggggccctgggtgaatgctgctgcccctgctggcagccaccttgagacctcaccgggcctgtgatatttgctctcctgaactctcactcaatcctcttcctctcctctgtggcttttcctgttattgtcccctaatgataggatattccctgctgcctacctggagattcagtaggatcttttgagtggaggtgggtagagagagcaaggagggcaggacacttagcaggcactgagcaagcaggcccccacctgcccttagtgatgtttggagtcgttttaccctcttctattgaattgccttgggatttccttctccctttccctgcccaccctgtcccctacaatttgtgcttctgagttgaggagccttcacctctgttgctgaggaaatggtagaatgctgcctatcacctccagcacaatcccagtgaaaaaggtgtgaagcacccaccatgttcttgaacaatcaggtttctaaataaacaactggaccatc

SEQ ID NO: 4799 - DNA, 2497 bp, Homo sapiens
ggggaacgaaagatggcggcggaaacgctgctgtccagtttgttaggactgctgcttctgggactcctgttacccgcaagtctgaccggcggtgtcgggagcctgaacctggaggagctgagtgagatgcgttatgggatcgagatcctgccgttgcctgtcatgggagggcagagccaatcttcggacgtggtgattgtctcctctaagtacaaacagcgctatgagtgtcgcctgccagctggagctattcacttccagcgtgaaagggaggaggaaacacctgcttaccaagggcctgggatccctgagttgttgagcccaatgagagatgctccctgcttgctgaagacaaaggactggtggacatatgaattctgttatggacgccacatccagcaataccacatggaagattcagagatcaaaggtgaagtcctctatctcggctactaccaatcagccttcgactgggatgatgaaacagccaaggcctccaagcagcatcgtcttaaacgctaccacagccagacctatggcaatgggtccaagtgcgaccttaatgggaggccccgggaggccgaggttcggttcctctgtgacgagggtgcaggtatctctggggactacatcgatcgcgtggacgagcccttgtcctgctcttatgtgctgaccattcgcactcctcggctctgcccccaccctctcctccggcccccacccagtgctgcaccgcaggccatcctctgtcacccttccctacagcctgaggagtacatggcctacgttcagaggcaagccgactcaaagcagtatggagataaaatcatagaggagctgcaagatctaggcccccaagtgtggagtgagaccaagtctggggtggcaccccaaaagatggcaggtgcgagcccgaccaaggatgacagtaaggactcagatttctggaagatgcttaatgagccagaggaccaggccccaggaggggaggaggtgccggctgaggagcaggacccaagccctgaggcagcagattcagcttctggtgctcccaatgattttcagaacaacgtgcaggtcaaagtcattcgaagccctgcggatttgattcgattcatagaggagctgaaaggtggaacaaaaaaggggaagccaaatataggccaagagcagcctgtggatgatgctgcagaagtccctcagagggaaccagagaaggaaaggggtgatccagaacggcagagagagatggaagaagaggaggatgaggatgaggatgaggatgaagatgaggatgaacggcagttactgggagaatttgagaaggaactggaagggatcctgcttccgtcagaccgagaccggctccgttcggaggtgaaggctggcatggagcgggaactggaaaacatcatccaggagacagagaaagagctggacccagatgggctgaagaaggagtcagagcgggatcgggcaatgctggctctcacatccactctcaacaaactcatcaaaagactggaggaaaaacagagtccagagctggtgaagaagcacaagaaaaagagggttgtccccaaaaagcctcccccatcaccccaacctacagggaaaattgagatcaaaattgtccgcccatgggctgaagggactgaagagggtgcacgttggctgactgatgaggacacgagaaacctcaaggagatcttcttcaatatcttggtgccgggagctgaagaggcccagaaggaacgccagcggcagaaagagctggagagcaattaccgccgggtgtggggctctccaggtggggagggcacaggggacctggacgaatttgacttctgagaccaacactacacttgacccttcacggaatccagactcttcctggactggcttgcctcctccccacctccccaccctggaacccctgagggccaaacagcagagtggagctgagctgtggacctctcgggcaactctgtgggtgtgggggccctgggtgaatgctgctgcccctgctggcagccaccttgagacctcaccgggcctgtgatatttgctctcctgaactctcactcaatcctcttcctctcctctgtggcttttcctgttattgtcccctaatgataggatattccctgctgcctacctggagattcagtaggatcttttgagtggaggtgggtagagagagcaaggagggcaggacacttagcaggcactgagcaagcaggcccccacctgcccttagtgatgtttggagtcgttttaccctcttctattgaattgccttgggatttccttctccctttccctgcccaccctgtcccctacaatttgtgcttctgagttgaggagccttcacctctgttgctgaggaaatggtagaatgctgcctatcacctccagcacaatcccagtgaaaaaggtgtgaagcacccaccatgttcttgaacaatcaggtttctaaataaacaactggaccatc

SEQ ID NO: 4800 - DNA, 2545 bp, Homo sapiens
cagtcaagtagcttcccagtcccgaacgccgcccgtccccaccccgccgtggccactagcaacgacctctgtgaagttggagaggcggtaacggaggcactccccctgctgcaccccgccgtttctacggggctcagaaaccagtttgtttgtttcgtcggggtagtgtcgacctgtcttacgggcgtcgcgagacaggacggagtcaaacccgtggtatcaactgaagacgagtgtcaggtgtggagagtctcagtgccccctttcagtctggactgtgagctgctgctggttagacagtcttggtttctctttcaggatgtcattttcaaaatgcgggatggtacctctgctttattaagccccgtaggaagactgccacacctagactgatgcttattagtcatcaccgttattcctactaacgtcctgtgtcactgagttttttaaatgtctagcatatctgtaaagatgccttagaaaaagaatcatggagaagtatgttagactacagaagattggagaaggttcatttggaaaagccattcttgttaaatctacagaagatggcagacagtatgttatcaaggaaattaacatctcaagaatgtccagtaaagaaagagaagaatcaaggagagaagttgcagtattggcaaacatgaagcatccaaatattgtccagtatagagaatcatttgaagaaaatggctctctctacatagtaatggattactgtgagggaggggatctgtttaagcgaataaatgctcagaaaggcgttttgtttcaagaggatcagattttggactggtttgtacagatatgtttggccctgaaacatgtacatgatagaaaaattcttcatcgagacattaaatctcagaacatatttttaactaaagatggaacagtacaacttggagattttggaattgctagagttcttaatagtactgtagagctggctcgaacttgcatagggaccccatactacttgtcacctgaaatctgtgaaaacaaaccttacaataataaaagtgacatttgggctctggggtgtgtcctttatgagctgtgtacacttaaacatgcttttgaagctggcagtatgaaaaacctggtactgaagataatatctggatcttttccacctgtgtctttgcattattcctatgatctccgcagtttggtgtctcagttatttaaaagaaatcctagggatagaccatcagtcaactccatattggagaaaggttttatagccaaacgattgaaaagtttctctctcctcagcttattgcagaagaattttgtctaaaaacattttcgaagtttggatcacagcctataccagctaaaagaccagcttcaggacaaaactcgatttctgttatgcctgctcagaaaattacaaagcctgccgctaaatatggaatacctttagcatataagaaatatggagataaaaaattacacgaaaagaaaccactgcaaaaacataaacaggcccatcaaactccagagaagagagtgaatactggagaagaaaggaggaaaatatctgaggaagcagcaagaaagagaaggctggaatttattgaaaaagaaaagaaacaaaaggatcagattattagtttaatgaaggctgaacaaatgaaaaggcaagaaaaggaaaggttggaaagaataaatagggccagggaacaaggatggagaaatgtgctaagtgctggtggaagtggtgaagtaaaggctccttttctgggcagtggagggactatagctccatcatctttttcttctcgaggacagtatgaacattaccatgccatttttgaccaaatgcagcaacaaagagcagaagataatgaagctaaatggaaaagagaaatatatggtcgaggtcttccagaaagaggaattctgcctggagttcgtccaggatttccttatggggctgcaggtcatcaccattttcctgatgctgatgatattagaaaaactttgaaaagattgaaggcggtgtctaaacaagccaatgcaaacaggcaaaaagggcagctagctgtagaaagagctaaacaagtagaagagttcctgcagcgaaaacgggaagctatgcagaataaagctcgagccgaaggacatatggtttatctggcaagactgaggcaaataagactacagaatttcaatgagcgccaacagattaaagccaaacttcgtggtgaaaagaaagaagctaatcattctgaaggacaagaaggaagtgaagaggctgacatgaggcgcaaaaaaatcgaatcactgaaggcccatgcaaatgcacgtgctgctgtactaaaagaacaactagaacgaaagagaaaggaggcttatgagagagaaaaaaaagtgtgggaagagcatttggtggctaaaggagttaagagttctgatgtttctccacctttgggacagcatgaaacaggtggctctccatcaaagcaacagatgagatctgttatttctgtaacttcagctttgaaagaagttggcgtgg

SEQ ID NO: 4801 - DNA, 3472 bp, Homo sapiens
  misc_feature (1063)..(1063): n is a, c, g, or t
  misc_feature (1834)..(2306): n is a, c, g, or t
  misc_feature (2716)..(2815): n is a, c, g, or t
tgaacattaccatgccatttttgaccaaatgcagcaacaaagagcagaagataatgaagctaaatggaaaagagaaatatatggtcgaggtcttccagaaaggcaaaaagggcagctagctgtagaaagagctaaacaagtagaagagttcctgcagcgaaaacgggaagctatgcagaataaagctcgagccgaaggacatatggtttatctggcaagactgaggcaaataagactacagaatttcaatgagcgccaacagattaaagccaaacttcgtggtgaaaagaaagaagctaatcattctgaaggacaagaaggaagtgaagaggctgacatgaggcgcaaaaaaatcgaatcactgaaggcccatgcaaatgcacgtgctgctgtactaaaagaacaactagaacgaaagagaaaggaggcttatgagagagaaaaaaaagtgtgggaagagcatttggtggctaaaggagttaagagttctgatgtttctccacctttgggacagcatgaaacaggtggctctccatcaaagcaacagatgagatctgttatttctgtaacttcagctttgaaagaagttggcgtggacagtagtttaactgatacccgggaaacttcagaagagatgcaaaagaccaacaatgctatttcagagtaagcgagaaatacttcgtagattaaatgaaaatcttaaagctcaagaagatgaaaaaggaaagcagaatctctctgatacttttgagataaatgttcatgaagatgccaaagagcatgaaaaagaaaaatcagtttcatctgatcgcaagaagtgggaggcaggaggtcaacttgtgattcctctggatgagttaacactagatacatccttctctacaactgatagacatacagtgggagaagttattaaattaggtcctaatggatctccaagaagagcctgggggaaaagtccgacagattctgttctaaagatacttggagaagctgaactacaacttcagacagaactattagaaaatacaactattagaagtgagatttctcccgagagaantaatgtacaaacccttaattacctggagaaaaaaaagtacaatgtatttcacatgaaataaacccatcagctattgttgattctcctgttgagacaaaaagtcccgagttcagtgaggcatctccacagatgtcattgaaactggaaggaaatttagaagaacctgatgatttggaaacagaaattctacaagagccaagtggaacaaacaaagatgagagcttgccatgcactattactgatgtgtggattagtgaggaaaaagaaacaaaggaaactcagtcggcagataggatcaccattcaggaaaatgaagtttctgaagatggagtctcgagtactgtggaccaacttagtgacattcatatagagcctggaaccaatgattctcagcactctaaatgtgatgtagataagtctgtgcaaccggaaccatttttccataaggtggttcattctgaacacttgaacttagtccctcaagttcaatcagttcagtgttcaccagaagaatcctttgcatttcgatctcactcgcatttaccaccaaaaaataaaaacaagaattccttgctgattggactttcaactggtctgtttgatgcaaacaacccaaagatgttaaggacatgttcacttccagatctctcaaagctgttcagaacccttatggatgttcccaccgtaggagatgttcgtcaagacaatcttgaaatagatgaaattgaagatgaaaacattaaagaaggaccttctgattctgaagacatnnnnnnnnnnnnnnnnnnnnnnnnnnnnnnnnnnnnnnnnnnnnnnnnnnnnnnnnnnnnnnnnnnnnnnnnnnnnnnnnnnnnnnnnnnnnnnnnnnnnnnnnnnnnnnnnnnnnnnnnnnnnnnnnnnnnnnnnnnnnnnnnnnnnnnnnnnnnnnnnnnnnnnnnnnnnnnnnnnnnnnnnnnnnnnnnnnnnnnnnnnnnnnnnnnnnnnnnnnnnnnnnnnnnnnnnnnnnnnnnnnnnnnnnnnnnnnnnnnnnnnnnnnnnnnnnnnnnnnnnnnnnnnnnnnnnnnnnnnnnnnnnnnnnnnnnnnnnnnnnnnnnnnnnnnnnnnnnnnnnnnnnnnnnnnnnnnnnnnnnnnnnnnnnnnnnnnnnnnnnnnnnnnnnnnnnnnnnnnnnnnnnnnnnnnnnnnnnnnnnnnnnnnnnnnnnnnnnnnnnnnnnnnnnnnnnnnnnnnnnnnnnnnnnnnnnnataatgatgaataatcctcaaaatgttttttaatcctcaactatatgaaagcatttgaatttggcttatcagaataacaagcttcagtgggaaatacagcaattatttatttaaaaaatcagatttaagatggactttcttattgcatgaaaaagatggagaaacatgccatttttcaatgaagattctaatattttatctattttgttcattgaattccatggttaaatctcataaaatatatactttattaaatcatccaaccaaagcataggaaacattgacccagaacctgacttaatggttttgaagatttactatgcaatagggtaactttgagtttcagcaaatgtctttaggttgaaggaattacctatgtcatgaaggacctgtctgtggtttttcaatgnnnnnnnnnnnnnnnnnnnnnnnnnnnnnnnnnnnnnnnnnnnnnnnnnnnnnnnnnnnnnnnnnnnnnnnnnnnnnnnnnnnnnnnnnnnnnnnnnnnngtgttacgtcgctctaaggtccttagaatcttgaaagatttgattatgaaagaatagcaaaattatatttcttgacatataaaaagttggtttaatgcctttatttctctttaaggaccagaaccaggaatactatatcgaaaaattagtctgtggatttaacactgacttagcatatagcttaaagttgctcttttggtttttaacttcctccatacataagcttcaaggacaataagatgttaaaaaggaggaaataattatttttattttgacactgtgacagttttggtaactaggatcctagggagggaaatgtttgcctgttgaacttctttctgttatgagaggatttagttaggtcattaagatgttgatcacacagcttcaatcacaatatgccaagtataacctggtttcgttagaggtgtctacagtccagatgttcttcgtaataaaagcaaagtttttgaacctctgagtccaaagcaggctggttggcataatatgtaatttgaaaaataaaatcttatcttgcagcactatcagtatgttgaatttattatgtatattatttctaatatccgaaactaaatacttgattttttaatgtgtgtgtttattttatgatattgctattaaatttttattatctac

SEQ ID NO: 4802 - DNA, 5411 bp, Homo sapiens
  misc_feature (3005)..(3005): n is a, c, g, or t
  misc_feature (3776)..(4248): n is a, c, g, or t
  misc_feature (4658)..(4757): n is a, c, g, or t
cattcgctccagggttttgggaccctaggttgcggagtccttaccctaccctggcctctcgagcagttgtccccataactcggaatctagagccgctgttgcgaggcaggagcacgtggcagtcaagtagcttcccagtcccgaacgccgcccgtccccaccccgccgtggccactagcaacgacctctgtgaagttggagaggcggtaacggaggcactccccctgctgcaccccgccgtttctacggggctcagaaaccagtttgtttgtttcgtcggggtagtgtcgacctgtcttacgggcgtcgcgagacaggacggagtcaaacccgtggtatcaactgaagacgagtgtcaggatgtcattttcaaaatgcgggatggtacctctgctttattaagccccgtaggaagactgccacacctagactgatgcttattagtcatcaccgttattcctactaacgtcctgtgtcactgagttttttaaatgtctagcatatctgtaaagatgccttagaaaaagaatcatggagaagtatgttagactacagaagattggagaaggttcatttggaaaagccattcttgttaaatctacagaagatggcagacagtatgttatcaaggaaattaacatctcaagaatgtccagtaaagaaagagaagaatcaaggagagaagttgcagtattggcaaacatgaagcatccaaatattgtccagtatagagaatcatttgaagaaaatggctctctctacatagtaatggattactgtgagggaggggatctgtttaagcgaataaatgctcagaaaggcgttttgtttcaagaggatcagattttggactggtttgtacagatatgtttggccctgaaacatgtacatgatagaaaaattcttcatcgagacattaaatctcagaacatatttttaactaaagatggaacagtacaacttggagattttggaattgctagagttcttaatagtactgtagagctggctcgaacttgcatagggaccccatactacttgtcacctgaaatctgtgaaaacaaaccttacaataataaaagtgacatttgggctctggggtgtgtcctttatgagctgtgtacacttaaacatgcttttgaagctggcagtatgaaaaacctggtactgaagataatatctggatcttttccacctgtgtctttgcattattcctatgatctccgcagtttggtgtctcagttatttaaaagaaatcctagggatagaccatcagtcaactccatattggagaaaggttttatagccaaacgattgaaaagtttctctctcctcagcttattgcagaagaattttgtctaaaaacattttcgaagtttggatcacagcctataccagctaaaagaccagcttcaggacaaaactcgatttctgttatgcctgctcagaaaattacaaagcctgccgctaaatatggaatacctttagcatataagaaatatggagataaaaaattacacgaaaagaaaccactgcaaaaacataaacaggcccatcaaactccagagaagagagtgaatactggagaagaaaggaggaaaatatctgaggaagcagcaagaaagagaaggctggaatttattgaaaaagaaaagaaacaaaaggatcagattattagtttaatgaaggctgaacaaatgaaaaggcaagaaaaggaaaggttggaaagaataaatagggccagggaacaaggatggagaaatgtgctaagtgctggtggaagtggtgaagtaaaggctccttttctgggcagtggagggactatagctccatcatctttttcttctcgaggacagtatgaacattaccatgccatttttgaccaaatgcagcaacaaagagcagaagataatgaagctaaatggaaaagagaaatatatggtcgaggtcttccagaaaggcaaaaagggcagctagctgtagaaagagctaaacaagtagaagagttcctgcagcgaaaacgggaagctatgcagaataaagctcgagccgaaggacatatgggaatcctgcaaaacctggcagctatgtatggaggcaggcccagctcttcaagaggagggaagccaagaaacaaagaggaagaggtttatctggcaagactgaggcaaataagactacagaatttcaatgagcgccaacagattaaagccaaacttcgtggtgaaaagaaagaagctaatcattctgaaggacaagaaggaagtgaagaggctgacatgaggcgcaaaaaaatcgaatcactgaaggcccatgcaaatgcacgtgctgctgtactaaaagaacaactagaacgaaagagaaaggaggcttatgagagagaaaaaaaagtgtgggaagagcatttggtggctaaaggagttaagagttctgatgtttctccacctttgggacagcatgaaacaggtggctctccatcaaagcaacagatgagatctgttatttctgtaacttcagctttgaaagaagttggcgtggacagtagtttaactgatacccgggaaacttcagaagagatgcaaaagaccaacaatgctatttcagagtaagcgagaaatacttcgtagattaaatgaaaatcttaaagctcaagaagatgaaaaaggaaagcagaatctctctgatacttttgagataaatgttcatgaagatgccaaagagcatgaaaaagaaaaatcagtttcatctgatcgcaagaagtgggaggcaggaggtcaacttgtgattcctctggatgagttaacactagatacatccttctctacaactgatagacatacagtgggagaagttattaaattaggtcctaatggatctccaagaagagcctgggggaaaagtccgacagattctgttctaaagatacttggagaagctgaactacaacttcagacagaactattagaaaatacaactattagaagtgagatttctcccgagagaantaatgtacaaacccttaattacctggagaaaaaaaagtacaatgtatttcacatgaaataaacccatcagctattgttgattctcctgttgagacaaaaagtcccgagttcagtgaggcatctccacagatgtcattgaaactggaaggaaatttagaagaacctgatgatttggaaacagaaattctacaagagccaagtggaacaaacaaagatgagagcttgccatgcactattactgatgtgtggattagtgaggaaaaagaaacaaaggaaactcagtcggcagataggatcaccattcaggaaaatgaagtttctgaagatggagtctcgagtactgtggaccaacttagtgacattcatatagagcctggaaccaatgattctcagcactctaaatgtgatgtagataagtctgtgcaaccggaaccatttttccataaggtggttcattctgaacacttgaacttagtccctcaagttcaatcagttcagtgttcaccagaagaatcctttgcatttcgatctcactcgcatttaccaccaaaaaataaaaacaagaattccttgctgattggactttcaactggtctgtttgatgcaaacaacccaaagatgttaaggacatgttcacttccagatctctcaaagctgttcagaacccttatggatgttcccaccgtaggagatgttcgtcaagacaatcttgaaatagatgaaattgaagatgaaaacattaaagaaggaccttctgattctgaagacatnnnnnnnnnnnnnnnnnnnnnnnnnnnnnnnnnnnnnnnnnnnnnnnnnnnnnnnnnnnnnnnnnnnnnnnnnnnnnnnnnnnnnnnnnnnnnnnnnnnnnnnnnnnnnnnnnnnnnnnnnnnnnnnnnnnnnnnnnnnnnnnnnnnnnnnnnnnnnnnnnnnnnnnnnnnnnnnnnnnnnnnnnnnnnnnnnnnnnnnnnnnnnnnnnnnnnnnnnnnnnnnnnnnnnnnnnnnnnnnnnnnnnnnnnnnnnnnnnnnnnnnnnnnnnnnnnnnnnnnnnnnnnnnnnnnnnnnnnnnnnnnnnnnnnnnnnnnnnnnnnnnnnnnnnnnnnnnnnnnnnnnnnnnnnnnnnnnnnnnnnnnnnnnnnnnnnnnnnnnnnnnnnnnnnnnnnnnnnnnnnnnnnnnnnnnnnnnnnnnnnnnnnnnnnnnnnnnnnnnnnnnnnnnnnnnnnnnnnnnnnnnnnnnnnnnnnataatgatgaataatcctcaaaatgttttttaatcctcaactatatgaaagcatttgaatttggcttatcagaataacaagcttcagtgggaaatacagcaattatttatttaaaaaatcagatttaagatggactttcttattgcatgaaaaagatggagaaacatgccatttttcaatgaagattctaatattttatctattttgttcattgaattccatggttaaatctcataaaatatatactttattaaatcatccaaccaaagcataggaaacattgacccagaacctgacttaatggttttgaagatttactatgcaatagggtaactttgagtttcagcaaatgtctttaggttgaaggaattacctatgtcatgaaggacctgtctgtggtttttcaatgnnnnnnnnnnnnnnnnnnnnnnnnnnnnnnnnnnnnnnnnnnnnnnnnnnnnnnnnnnnnnnnnnnnnnnnnnnnnnnnnnnnnnnnnnnnnnnnnnnnngtgttacgtcgctctaaggtccttagaatcttgaaagatttgattatgaaagaatagcaaaattatatttcttgacatataaaaagttggtttaatgcctttatttctctttaaggaccagaaccaggaatactatatcgaaaaattagtctgtggatttaacactgacttagcatatagcttaaagttgctcttttggtttttaacttcctccatacataagcttcaaggacaataagatgttaaaaaggaggaaataattatttttattttgacactgtgacagttttggtaactaggatcctagggagggaaatgtttgcctgttgaacttctttctgttatgagaggatttagttaggtcattaagatgttgatcacacagcttcaatcacaatatgccaagtataacctggtttcgttagaggtgtctacagtccagatgttcttcgtaataaaagcaaagtttttgaacctctgagtccaaagcaggctggttggcataatatgtaatttgaaaaataaaatcttatcttgcagcactatcagtatgttgaatttattatgtatattatttctaatatccgaaactaaatacttgattttttaatgtgtgtgtttattttatgatattgctattaaatttttattatc

SEQ ID NO: 4803 - DNA, 2331 bp, Homo sapiens
tttttttttccccagggagtgggggctggcccttactgctttataagcaccagctcaagaaggaacctacagcctcttggaaaggaatctcactaggggcttgactgcgtgggtctgtagcgctttcactgtaagaaagcaagatgcattttagaaactttaactacagttttagctccctgattgcctgtgtggcaaacagtgatatcttcagcgaaagtgaaaccagggccaaatttgagtccctctttaggacgtatgacaaggacatcacctttcagtattttaagagcttcaaacgagtcagaataaacttcagcaaccccttctccgcagcagatgccaggctccagctgcataagactgagtttctgggaaaggaaatgaagttatattttgctcagaccttacacataggaagctcacacctggctccgccaaatccagacaagcagtttctgatctcccctcccgcctctccgccagtgggatggaaacaagtggaagatgcgaccccagtcataaactatgatctcttatatgccatctccaagctggggccaggggaaaagtatgaattgcacgcagcgactgacaccactcccagcgtggtggtccatgtatgtgagagtgatcaagagaaggaggaagaagaggaaatggaaagaatgaggagacctaagccaaaaattatccagaccaggaggccggagtacacgccgatccacctcagctgaactggcacgcgacgaggacgcattccaaatcatactcacgggaggaatcttttactgtggaggtggctggtcacgacttcttcggaggtggcagccgagatcggggtggcagaaatcccagttcatgttgctcagaagagaatcaaggccgtgtccccttgttctaatgctgcacaccagttactgttcatggcacccgggaatgacttgggccaatcactgagtttgtggtgatcgcacaaggacatttgggactgtcttgagaaaacagataatgatagtgttttgtacttgttcttttctggtaggttctgtctgtgccaagggcaggttgatcagtgagctcaggagagagcttcctgtttctaagtggcctgcaggggccactctctactggtaggaagaggtaccacaggaagccgcctagtgcagagaggttgtgaaaacagcagcaatgcaatgtggaaattgtagcgtttcctttcttccctcatgttctcatgtttgtgcatgtatattactgatttacaagactaacctttgttcgtatataaagttacaccgttgttgttttacatcttttgggaagccaggaaagcgtttggaaaacgtatcacctttcccagattctcggattctcgactctttgcaacagcacttgcttgcggaactcttcctggaatgcattcactcagcatccccaaccgtgcaacgtgtaacttgtgcttttgcaaaagaagttgatctgaaattcctctgtagaatttagcttatacaattcagagaatagcagtttcactgccaacttttagtgggtgagaaattttagtttaggtgtttgggatcggacctcagtttctgttgtttcttttatgtggtggtttctatacatgaatcatagccaaaaacttttttggaaactgttggttgagatagttggttcttttaccccacgaagacatcaagatacacttgtaaataaagctgatagcatatattcatacctgttgtacacttgggtgaaaagtatggcagtgggagactaagatgtattaacctacctgtgaatcatatgttgtaggaaaagctgttcccatgtctaacaggacttgaattcaaagcatgtcaagtggatagtagatctgtggcgatatgagagggatgcagtgcctttccccattcattcctgatggaattgttatactaggttaacatttgtaatttttttctagttgtaatgtgtatgtctggtaaataggtattatattttggccttacaataccgtaacaatgtttgtcattttgaaatacttaatgccaagtaacaatgcatgctttggaaatttggaagatggttttattctttgagaagcaaatatgtttgcattaaatgctttgattgttcatatcaagaaattgattgaacgttctcaaaccctgtttacggtacttggtaagagggagccggtttgggagagaccattgcatcgctgtccaagtgtttcttgttaagtgcttttaaactggagaggctaacctcaaaatattttttttaactgcattctataataaatgggcacagtatgctccttac

SEQ ID NO: 4804 - DNA, 1249 bp, Homo sapiens
aactctttctgctccttgcattttgacatccctgaaggggagctcttggatatcattggccatgtttcaatcgaatggagccactgggccccaacactggctttgagatttagagtcaaagggtagagtgaacaggaaagggtcacgtggtcccatgttgcaacagccccaacatcacgcatgtcattcactgccttgccactccatctccctccgtgctccagccacccctgagctgaggctcccattgtctccatcagagcctgcatgtgtatgccgtcctcccctggtccggtgtttgtgttccccacccctcacagactgcctgagctcttctgtaagctggggtagggtgatggcagtgctccgggaactgggcctgcagccttcctcttctgggactgctgtgaggcagaggaatgatggagaatctagtgtagcagcctccaggcaggattcagcacaacactggggagtcacccttccctcgggcctctgcctaccaacaactgggcttatcactgggaaaacacaaaaaattacacaacccagcaacaacaaaagaactagtcctcttagaatttcttgcgctttgatttttttagggcttgtgccctgtttcacttatagggtctagaatgcttgtgttgagtaaaaaggagatgcccaatattcaaagctgctaaatgttctctttgccataaagactccgtgtaactgtgtgaacacttgggatttttctcctctgtcccgaggtcgtcgtctgctttcttttttgggtttctttctagaagattgagaagtgcatatgacaggctgagagcacctccccaaacacacaagctctcagccacaggcagcttctccacagccccagcttcgcacaggctcctggagggctgcctgggggaggcagacatgggagtgccaaggtggccagatggttccaggactacaatgtctttatttttaactgtttgccactgctgccctcacccctgcccggctctggagtaccgtctgccccagacaagtgggagtgaaatgggggtggggggaagcactgattcccagttagggggtgcctaactgagcagtagggatagaaggtgtgaacctgggagtgcttttataaattattttccttgtagattttatttttaatttatctctgtgacctgccagggagaggggagagagagagagatgctgttgagcacatgacaaaataaaataaaatggatgatta

SEQ ID NO: 4805 - DNA, 4620 bp, Homo sapiens
cgcgatggaggagagcgggtacgagtcggtgctctgtgtcaagcctgacgtcccacgtctaccgcatcccttcgcgggctaccaaccgtggctacagggctgcggagtggcagctggaccagccatcatggagtggccggctgaggatcactgcaaagggacagatggcctacatcaagctggaggacaggacgtcaggggagctctttgctcaggccccggtggatcagtttcctggcacagctgtggagagtgtgacggattccagcaggtacttcgtgatccgcatcgaagatggaaatgggcgacgggcgtttattggaattggcttcggggaccgaggtgatgcctttgacttcaatgttgcattgcaggaccatttcaagtgggtgaaacagcagtgtgaatttgcaaaacaagcccagaacccagaccaaggccctaaactggacctgggcttcaaggagggccagaccatcaagctcaacatcgcagtgagttctacccttgcttggctgtggtgacgtgatacttgtggccacccagccccagagcccattgctcttcttacagttcagctccttcagttcagcagatgtttagtgagcatctgccttgtgccaggtcctgcatcggggtgaacaagagacctctgttctcatggagctcagagttgagctgagacaggcaggtaaaaatgtgataacaacatggcaggaaaggttccatgactaagggatgccctgggtgccgtgggctcctagaggaagggtgtgcagcccatagttgtgggaaccaaggaaggcttcctggaagaagggacctgtaggcaagggaagagtgatcaaagagtggttcacacagaggaacagcaggtgcaaagcctctgaactgagaaggagcatcagtcatttgctgccagaggtggtgtttctgtcctagctattagagtgcatcaggagggacctgtgtgctcatcccaggctgtgtcttgaataaggaagatttgggagagttctggcaggagggcgttgaggtgggcgctgggagtcctgggcagcttgtgctgatggtgttgtcctggctcctgtgtcttcgttctgagctgctctgcctctggcttccctcccgtcagctcctgttcataggaacaggttgggctgggctgggctgggctgggttgcctaaagttggcctttacctggctgcaagggtggagaggggagatgaggtcagagtcatgattgcggggacccaaggaccaagtggattggtttttgtttttgctaggaatactgtgttgagatggatttgttttttcaagaagctttgtaactctaaaataatgcttttcctctttacttactctttctcctcttttctgcttcgtgctggtgatgatttgggatccttgaagttggccagctggcccttaagagagaaatgcaagtccaatccagtggactggttgggatgtgattctttctctcgcttggaggaaactaacatttaatgagcatcagctgagggccaggtagtggtttttttttgttttgttttgttttttgttttgttttgttgttttttttttttaggcatttctcatgtgaattaaacatcctctccctttcctccatgagatgaggaaatggaggcttagggagggttggggacttgcccagggtcacagagctagaaataactggcacagctgtgctcacactgaggtctttgaggtcttttgacttcagggctggacttacgattttattaagctgctgctttccttacaagtagggaacacattatcttcatctgtgtaacttgtgctgctttctggctcatgcttggtgctcagttttttttttaaagcattttcttgaagtataatgtgcatgtaaaaaagtgtacaaatcataaatgcagaactctgtgaaatttaaaaaatctaatctataggctgggagtggtggctcacgcctgtaatcccagcactttgggaggctgaggtgggcggatcacctgaggtcgggagtccgagaccagcctgaccaacatggacaaaccctgtctctactaaaaatacaaaattagccgggcatggtggtccatggctgtaatcccagctactccgggggctgaggcaggagaattggcttgaacctgggaggtggaggttgcagtgagctgagatcgagccattcattgcactccagcctggacaacaagagcgaaactctggctcaaaaaacaaaacaaaacaaaacacccaatttataaacttgcaccttgctcaagatgcaaaagattgtcagcactctggaaacacctctcctggcccctcccagtaactgccctgagtaaccccatcctgacttcacataccctagattttgtttgttcttaactttcatgaattgaatcatacacctaatcttgatttggaatgatttctttcttttactcaatgtaatttttgtgagagtcatccatggtgttgcgtgtagtttgttcattctcattgttgtggcatgtaccattgtgagaattcacccgatttatttatgttttactgatgatggacatttgggtagtttccagtttggggcgattacaaataatgctgctgtagatgtttgagttcatgtttttggtgcatatatgtatgatttctgttggtttatatctaggagtggaactgcggagtcataagtttaagttcctatgttgagctttataatcctttcaaataatttttcaaagtagttttaccagtttacacttaagccagcagcgcgtgaatggttacttcatatcgtagtcaatacttgataatctacattttagccattctggtgagcgtgtaatggtatatcattatagctttgatctgcatttccctgatgaatgaagtgggggtgctgggttttaaaatggaccttatttgtgagagattcagaatgatgatgcactaagtatagctcatagcaatggaggtgctaggtaggaccatcttttggttacacagatgttgggggtctggggtcaccttggccctccttgtggggttttctggtagcattgggactccagcagaacgggctgatttgcattcctcttccctctttagaacatgaagaagaaggaaggagcagctgggaatccccgagtccggcctgccagcacaggagggctgagcctgcttccccctcccccaggggggaaaacctccaccctgatccctccccctggggagcagttggctgtggggggatccctcgtccagccagcagttgctcccagttcaggaggtgctcctgtaccctggccacagcccaatcctgccactgctgacatctggggagactttaccaaatctacaggatcaacttccagccagacccagccaggcacaggctgggtccagttctgacctgagcacggtttttcctcatgtgacttctgggaaggcgctccctcatctgggccaaaggaaggaggacgaagccctcctcagctggcctgtgtttggggcatgaatctctcctctcctccttgtctggctctgttgacaaaccgggcatgtttggcagtaaattggcaccgtgtcacactgtttcctgggattcaagtatgcaaccagaacacaggagaagaaaagctccaggatccctgtccccatctgtcctcttgatgtgagagagactctgagacttcttccatcgcaatgacctgtattaaacacaagccccccaagcaaaagaagaggttgagtttgctgccaggattcagatcagcccttcccagggtctgcaggtgtcacatgatcacagttcagcgggaggctttccgtacccacactggctgtagccacttcagtccatctgccctccagaggaggggtttcttcctgatttttagcaggtttagaggctgcagcttgagctacaatcaggagggaaattggaaggattagcagcttttaaaaatgtttaaatattttgctttgctaatgtgctgatccgcactaactcatctttgcaaaaggaactgctccctcggcgtgccccagctggggcctctgaagggattcctcactgtgggcagctgccctgagcttcaggcagcagtgtttatctctggccagttgtctggtttccatgtattctaggccaggtaggcaacacagagccaaggcgggtgctggaagccagacggaacagtgttggggcaggaaggtggatgctgttgtcatggagctgtgggagttggcactctgtctgctggtggccctctcggctcacatgttcacagtgcagctcctggcagacttgggttttctctttggtggtttctaaagtgccttatctgcaaacaacttcttttctccttcaggaactgtgaatggctagaagaaggagctcagtaaactagaagtccagggttgcttggtttactggtttataagaaatctgaaagcacctctgacattccttttattaactcacctctcagttgaaagatttcttctttgaaaggtcaagaccgtgaactgaaaaaagtgttggcctttttgcgggaccagatttttaagataaaataaatatttttacttctgtc

SEQ ID NO: 4806 - DNA, 4654 bp, Homo sapiens
gcagcgtagcgggctggcggtgacttacaccgggactccagagggagagaggaagcgctgcaggccacttgcattgcgtcttccaggctgcgtggacccggcgccccggcgtgtgcggttgtgggggagctcgccgtggcctcccctccctctggctttagcttcctttggggttggcgcaggtgggccaggcagcgcaccgcagatctccccgttcccacgaaggctggctcgctgtctctctccgagcgggagggaccatcctaaaaatatgtaaatatccaagcgctggctccaggctggggcagctgccaaggtccccgcgccgccgccgggtgttttacatgaaaatgagaagcctgatgggaaccgcgttctaacttaaggcagcctggtgattagcatgagactgggcggctgtcctgcttcctgcccttcaatagccgttccgcgcgctcgcgccggagcagcgctgccgccgcgcgggggtcgatcgcaggctcggcgtccttggcagccatggctccggcgccgcctcggccagtaagtaggagcatgcatgtgtagggggcacatgcgtgtcggcgcacccacccagccatccacccgcgcgcacgcacagcgcccggagcctcggcaaggggaagattgacgaggcgctgcagtcgcggggacgacgcgggctcttcctggattccgcaggagcccgcccgccgcagctgctgtctgcagagcctgctcggatcctgtgcacacgcgccccccgctcgagcctctgtgatgaagactgtctcccggggactgcagcggaggcagagccagccagcgccggggactgcgggccgtgcggctgataggcccgcggggacacgactcggacactgtcatccccacgcctcgcgctgagctgcccggcgcggagggtctgccgccgcccctccggcctcccgcacgcccgatcccgggtcagccccggaggcctcggctgcctcatttgtttgggtcttttgtgccgtggctcccagttggccaagcactcctgcgctgaatcgggccattgtctgcgctcccattgccttcacgctgcaagtctcggcgcccccaccccgcccgccccctccccgcctcctcccggccggggagcctcctaacgtgcctttccccccaggaatctggaagctataagccgggcggattgcaaatgaagtgtaatgcattgtgggacgtgtgtaaaatcggagccttcgccgtgggggtgtgggggggcgtggggagggccggacccgccgctggcggtgtagacgccgacgaggaggggctgggaaaatgtgcgcagagtccgcccgggtcgtgcccgccgtagacggatgaaggagcgcgctgcgccccggcgctgaggccccgaggatcggggcggcaggtcgccctccccaccatgaagaagacccggagcacaaccttgcggcgagcctggcctagctcggatttctcggaccgggcctcggaccgcatgaggtcccgcagcgagaaggactaccgcctgcacaagcgtttccccgcggccttcgcgccccaggcttcgcggggctacatgacatcaggtgatgtatcacccatcagtatgtctcccatcagtcagtctcagtttattccactcggggagatcctctgcttggccatctcagcaatgaactcggcaagaaagcctgtcacccaagaagcactgatggagcacctgaccacgtgcttcccaggtgttccaacgccaagccaagaaattctgcggcacacgctgaacacgctggtacgggagaggaagatctacccaactccagatggctacttcatcgtgaccccacagacttatttcataactccttccctcataagaactaacagtaaatggtaccatttggacgagaggatacctgaccggtctcagtgcacctctccgcaacccgggaccatcacgccctctgcctcaggctgtgtcagggaaaggacattgccccgaaaccactgcgactcttgccactgctgcagagaagacgtgcacagcacgcatgcacccaccctgcaaaggaagtctgccaaggactgcaaagacccttactgtcccccttctctgtgccaggtgccacccactgaaaagagcaaaagtactgtaaatttttcctataagacagaaactctctcaaaacctaaagatagtgaaaagcagtcaaaaaaattcgggctaaagttattccggttaagttttaaaaaagacaagaccaaacagctggccaatttttctgcccagtttcctcctgaagagtggcccctgcgagacgaggacacgccagctacgatccctcgggaagtagagatggaaatcattaggcgcattaacccagacctgaccgtggaaaatgtcatgcggcacaccgcgctcatgaagaaactggaagaagaaaaggcccagaggagtaaagccgggtcctctgcccatcacagcggaaggagtaaaaagagtaggactcatcggaagtcccatggaaagtctcggtctcacagcaagacacgggtgtctaaaggagacccttccgacggttcacatctggatatcccagctgaaagagagtatgacttttgtgatcctcttaccagggtgcccagggagggctgcttcatcattgaacacaaaggagataacttcatcatgcacagcaacacaaacgtgctcgagtcccacttccccatgacaccagaatgggatgtgtctggtgaattggctaaaaggagaactgagatgccttttcctgaaccttctaggggaagctcccactcaaaagtgcaccgaagccacagccatacacaggaccggaggtccaggaatgagagatccaacaaagccaaggagagatccaggtcgatggataactccaaaggccctctgggtgcttcttctctagggacgccggaagaccttgctgaaggctgcagccaagacgaccagacccccagccaatcctacattgacgacagtactttaaggcctgcacagaccgttagtctccaaagggctcacatttcgtccacaagctataaagaggtgtgtattccagagatagtcagtggcagcaaggaaccgtccagcgcttgcagccttttggagccaggaaaaccacccgagagtttgccatcctatggcgaactcaactcttgtccaacaaaaacagccacagatgactatttccagtgcaacacctctagtgagacggtgctcacggcaccatcacctctgggaaagaataaggaggaccatgacactctgactttggcagaaggggtgaaaaagctctccccttctgataggcaggtcccccactcctccagggagcctgtggggcacaaggaggagtcaccaaaagggccgggtgggggccccgctgcttcgggaggagtggctgaagggatcgccaacggacgcctcgtccagcaccatggtgccgagcccagcagcttggacaagaggaaagagatatttagcaaagacacactgttcaaacctcttcacagcaccttgtctgtaaacagctatcacaagtcgagcctgtccctcctcaaatctcacccgaagacacctgctgacacattgccaggccgatgtgagaaactggaaccgtccctggggacctcggcggcacaagccatgcctgcttcccagcgtcagcaggagtcaggagggaaccaggaagcctcttttgactattacaacgtctctgatgatgacgactctgaggaaggggcaaacaagaacacagaggaggagaaaaatagagaggacgtaggcaccatgcagtggctcctcgagcgggagaaggaaagagacttgcagaggaaatttgaaaagaacctcacccttcttgctccaaaagaaaccgacagcagcagcaaccagagagccacccattcagcccggctcgacagcatggacagcagcagcatcacagtggacagtggattcaactccccacgtactcgggagagcctggcttccaacacatcaagcattgttgaaagtaaccgtcgtcagaaccccgctttgagcccggcccatggtggagctggtccagccttcaacttccgagcgagcgcggagcccccgacaaatgaagctgagaagctacagaaaccttccaactgcttgcaagcttctgttactagcgtgtgattgtccttctgcctcagatcttctgtctcattcgatacagcaaagtttacgacactgggactgatgtttacatctttggaaagacaagcatctcaaccacagtttttgtgtttacttaaactgtgctgctaagtagggctagggcaaaaaaacaaaaaatctttatttcagagtattgcttttcacatttatggctctgtagcaactgagtaacagtaggggtgatatgtatacttttgcttcactaattgtatctgagcacacataggaaagtctagacactgtaagtgtaatacgcattttcaatgtcatgcagttgccaattccattttaaaatgccacagatgcgtgttgctcccagtctgtggttaaacggtgccacagaactgatccttgacacttccaaaaaaaaaaaaacaaaacaaaacaaaaaaaatt

SEQ ID NO: 4807 - DNA, 1041 bp, Homo sapiens
ctcctccagggagcctgtggggcacaaggaggagtcaccaaaagggccgggtgggggccccgctgcttcgggaggagtggctgaagggatcgccaacggacgcctcgtccagcaccatggtgccgagcccagcagcttggacaagaggaaagagatatttagcaaagacacactgttcaaacctcttcacagcaccttgtctgtaaacagctatcacaagtcgagcctgtccctcctcaaatctcacccgaagacacctgctgacacattgccaggccgatgtgagaaactggaaccgtccctggggacctcggcggcacaagccatgcctgcttcccagcgtcagcaggagtcaggagggaaccaggaagcctcttttgactattacaacgtctctgatgatgacgactctgaggaaggggcaaacaagaacacagaggaggagaaaaatagagaggacgtaggcaccatgcagtggctcctcgagcgggagaaggaaagagacttgcagaggaaatttgaaaagaacctcacccttcttgctccaaaagaaaccgacagcagcagcaaccagagagccacccattcagcccggctcgacagcatggacagcagcagcatcacagtggacagtggattcaactccccacggaattgaaaaaaatgtttctgcacctgtagagatcaccaatctggactgtactcgggagagcctggcttccaacacatcaagcattgttgaaagtaaccgtcgtcagaaccccgctttgagcccggcccatggtggagctggtccagccttcaacttccgagcgagcgcggagcccccgacaaatgaagctgagaagctacagaaaccttccaactgcttgcaagcttctgttactagcgtgtgattgtccttctgcctcagatcttctgtctcattcgatacagcaaagtttacgacactgggactgatgtttacatctttggaaagacaagcatctcaaccacagtttttgtgtttacttaaactgtgctgctaagtagggctagggc

SEQ ID NO: 4808 - DNA, 696 bp, Homo sapiens
gcgagaatggatcaatggtgccacggagcacatcgctgacgctgattgtgttccttttccacagattgtctaaagccccaggaaaaatggtggaaaattcaccgtcgccattgccagaaagagcgatttatggctttgttcttttcttaagctcccaatttggcttcatactttacctcgtgtgggcctttattcctgaatcttggctaaactctttaggtttaacctattggcctcaaaaatattgggcagttgcattacctgtctacctccttattgctatagtaattggctacgtgctcttgtttgggattaacatgatgagtacctctccactcgactccatccatacaatcacagataactatgcaaaaaatcaacagcagaagaaataccaagaggaggccattccagccttaagagatatttctattagtgaagtaaaccaaatgttctttcttgcagccaaagaactttacaccaaaaactgaactgtgtgtaaccatagtaacaccaagcacgtatttatttataagtttttgccattataattttgaccataaattaatttgaccatctctcttattaatagagaagtaaaaaatgtaacttgaccttctcttagattatgttcaatgaatattgtaaatgttcaagtattgttaatgaatagaataaatacaatattgcattccc

SEQ ID NO: 4809 - DNA, 727 bp, Homo sapiens
gggggttgccgtcgcgcctaggcctttccctcaggttttcctcttccccactgcggctccccagtcggcgcttgcgcggagaactcagcgctgagattgtctaaagccccaggaaaaatggtggaaaattcaccgtcgccattgccagaaagagcgatttatggctttgttcttttcttaagctcccaatttggcttcatactttacctcgtgtgggcctttattcctgaatcttggctaaactctttaggtttaacctattggcctcaaaaatattgggcagttgcattacctgtctacctccttattgctatagtaattggctacgtgctcttgtttgggattaacatgatgagtacctctccactcgactccatccatacaatcacagataactatgcaaaaaatcaacagcagaagaaataccaagaggaggccattccagccttaagagatatttctattagtgaagtaaaccaaatgttctttcttgcagccaaagaactttacaccaaaaactgaactgtgtgtaaccatagtaacaccaagcacgtatttatttataagtttttgccattataattttgaccataaattaatttgaccatctctcttattaatagagaagtaaaaaatgtaacttgaccttctcttagattatgttcaatgaatattgtaaatgttcaagtattgttaatgaatagaataaatacaatattgcattccc

SEQ ID NO: 4810 - DNA, 5409 bp, Homo sapiens
tcacgggctccggtcccggcggcagaaatagggcagccgcggcggcggtggcacagcagcgggcagcggcggctcagggagctggagcctcaacagcctccagcgagcccgggacccgccgacagcccgagaaaccagccgaaggacgcggggcggggtcgccgccgccgccacggggtgctccctccctcccgcccaagtccggccacctggtcttcccctcggccccggccgtctcagactcatcaaaatgaaaccaggaggcttttggctgcatctcacactgctcggagcctccctgccggctgcgctgggatggatggacccaggaaccagcagaggcccggatgtgggtgtgggggagtcacaggcagaggagcccagaagctttgaagtcacaagaagagaagggctttccagccacaacgagctgctggcctcctgcgggaagaagttctgcagccgagggagccggtgcgtgctcagcaggaagacaggggagcccgaatgccagtgcctggaggcatgcaggcccagctacgtgcctgtgtgcggctctgatgggaggttttatgaaaaccactgtaagctccaccgtgctgcttgcctcctgggaaagaggatcaccgtcatccacagcaaggactgtttcctcaaaggtgacacgtgcaccatggccggctacgcccgcttgaagaatgtccttctggcactccagacccgtctgcagccactccaagaaggagacagcagacaagaccctgcctcccagaagcgcctcctggtggaatctctgttcagggacttagatgcagatggcaatggccacctcagcagctccgaactggctcagcatgtgctgaagaagcaggacctggatgaagacttacttggttgctcaccaggtgacctcctccgatttgacgattacaacagtgacagctccctgaccctccgcgagttctacatggccttccaagtggttcagctcagcctcgcccccgaggacagggtcagtgtgaccacagtgaccgtggggctgagcacagtgctgacctgcgccgtccatggagacctgaggccaccaatcatctggaagcgcaacgggctcaccctgaacttcctggacttggaagacatcaatgactttggagaggatgattccctgtacatcaccaaggtgaccaccatccacatgggcaattacacctgccatgcttccggccacgagcagctgttccagacccacgtcctgcaggtgaatgtgccgccagtcatccgtgtctatccagagagccaggcacaggagcctggagtggcagccagcctaagatgccatgctgagggcattcccatgcccagaatcacttggctgaaaaacggcgtggatgtctcaactcagatgtccaaacagctctcccttttagccaatgggagcgaactccacatcagcagtgttcggtatgaagacacaggggcatacacctgcattgccaaaaatgaagtgggtgtggatgaagatatctcctcgctcttcattgaagactcagctagaaagacccttgcaaacatcctgtggcgagaggaaggcctcagcgtgggaaacatgttctatgtcttctccgacgacggtatcatcgtcatccatcctgtggactgtgagatccagaggcacctcaaacccacggaaaagattttcatgagctatgaagaaatctgtcctcaaagagaaaaaaatgcaacccagccctgccagtgggtatctgcagtcaatgtccggaaccggtacatctatgtggcccagccagcactgagcagagtccttgtggtcgacatccaagcccagaaagtcctacagtccataggtgtggaccctctgccggctaagctgtcctatgacaagtcacatgaccaagtgtgggtcctgagctggggggacgtgcacaagtcccgaccaagtctccaggtgatcacagaagccagcaccggccagagccagcacctcatccgcacaccctttgcaggagtggatgatttcttcattcccccaacaaacctcatcatcaaccacatcaggtttggcttcatcttcaacaagtctgatcctgcagtccacaaggtggacctggaaacaatgatgcccctcaagaccatcggcctgcaccaccatggctgcgtgccccaggccatggcacacacccacctgggcggctacttcttcatccagtgccgacaggacagccccgcctctgctgcccgacagctgctcgttgacagtgtcacagactctgtgcttggccccaatggtgatgtaacaggcaccccacacacatcccccgacgggcgcttcatagtcagtgctgcagctgacagcccctggctgcacgtgcaggagatcacagtgcggggcgagatccagaccctgtatgacctgcaaataaactcgggcatctcagacttggccttccagcgctccttcactgaaagcaatcaatacaacatctacgcggctctgcacatggagccggacctgctgttcctggagctgtccacggggaaggtgggcatgctgaagaacttaaaggagccacccgcagggccagctcagccctgggggggtacccacagaatcatgagggacagtgggctgtttggacagtacctcctcacaccagcccgagagtcactgttcctcatcaatgggagacaaaacacgctgcggtgtgaggtgtcaggtataaagggggggaccacagtggtgtgggtgggtgaggtatgaagggcccagagcagagccctgggccaaggaacaccccctagtcctgacactgcagcctcaagcaggtacgctgtacatttttacagacaaaagcaaaaacctgtactcgctttgtggttcaacactggtctccttgcaagtttcctagtataaggtatgcgctgctaccaagattggggttttttcgttaggaagtatgatttatgccttgagctacgatgagaacatatgctgctgtgtaaagggatcatttctgtgccaagctgcacaccgagtgacctggggacatcatggaaccaagggatcctgctctccaagcagacacctctgtcagttgccttcacatagtcattgtcccttactgccagacccagccagactttgccctgacggagtggcccggaagcagaggccgaccaggagcaggggcctccctcccgaactgaaagcccatccgtcctcgcgtgggaccgcatcttctccctcgcagctgcttcttgcttttctttccatttgacttgctgtaagcctgagggagagccaacaagacttactgcatcttgggggatggggaaatcactcactttattttggaaatttttgattaaaaaaaaattttataatctcaaatgctagtaagcagaaagatgctctccgaggtccaactatatccttccctgccttaggccgagtctcgggggtggtcacaaccccacatcccacagcccgaaagaacaatggtcatctgagaatactggccctgtcaactattgccaccctgcttctccaagagcagaccaggccacctcatccgtaaggactcggttctgtgttgggaccccaaaaaaccagaacaagttctgtgtgcctcctttcagcacagaagggagacatctcattagtcaggtctggtaccccagattcagggcagactgggcttgcctggcaaggtatgggtggcctccaggctcaatgcagaaaccccaaggacacgagtggggccaggtgagttcctgaagctataccttttcaaaacagattttgttttcctacctgtggcccatccactcctctctggtaccccatccccgcatcagcactgcagagagaacacatttcggcgagggttttcttacccacattccccaatcaatacacacacactgcagaacccagaacagaaggccacaggctggcactactgcattctccttatgtgtctcaggctgtggtgactctcacatgggcatcgaagaagtacaacccacagagccctctggagaccgcctagatcagagactcagcaaaaacaggctcgccttccctctcccacatatgagtggaacttacatgtgtcctggtttgaatgatcattttgcaagccacacgggttgggagaggtggtctcaccacagacgtctttgctaatttggccaccttcacctactgacatgaccaggattttcctttgccattaaggaatgaactctttcaaggagaggaaaccctagactctgtgtcactctcaacacacacagctcctttcactcctgcctgactgccaagccacctgcatcccccgccccagatctcatgagatcaatcacttgtatgtctcacgcaacttggtccaccaaacgcctgtcccctgcaactcctaggggtgcgcctagacaggtacgtctgttttttattttaaaagatatgctatgtagatataagtagaggaagctcacctcaaaagcctagaatgcagtttcacagtagctgggatgcatggatgacccatctcacccctttttttttcctgcctcaatatcttgatatgtttactcccaatctcccatttttaccactaaaattctccaactttcataaacttttttttggaaaaatttccattgtatcagcccctgacagaaaaaggatctctgagcctaaaggaggaaaagtcccaccaactaccagaccagaacacgagcccctctgggcagcaggattcctaagtcaaagaccagtttgacccaaactggccttttaaaataatcaggagtgacagagtcaacttctgcagcacctgcttctcccccactgtcccttccatcttggaatgtgtctaaaaaagcatagctgccctttgctgtcctcagagtgcatttcctggagacggcaggcttaggtctcactgacagcatgccagacacaactgaatcgaagcaggcctgaagcctaggtcagggtttcaggagtccagccccaggaggcaaagtcaccaatgcagggaggtaaatgccttttggcaggaaaaccaatagagttggttgggtggggagtcaggggtgggaggagaaggaggaagaggaggaaggccagactggcctgccctttctcccatacttcaccccagcagaggttcatgggacacagttggaaagccactgggaggaaatgcctcactacaggggggcctcctgtagcaagcccagccggtaatcctcctaatgaacccacaaggtcaattcacaactgatatcttagctattaaagaagtactgactttaccaaaagaatcatcaagaaagctatttatataaaccccctcagtcattttgaaataaaattaattttac

SEQ ID NO: 4811 - DNA, 1010 bp, Homo sapiens
  misc_feature (599)..(612): n is a, c, g, or t
cagccggaagtggcggctgctgcggagaattggagatggggaccgccctggacatcaagattaaaagagcgaataaagtttatcacgccggggtgaccgcaaaggtctaatgaacgaaagctaaaacaaaccttggaagcagaaatgggaagtgctctctggcgtggtggtcatatcgagtaaggattcagtccaacaccagggagtgtctttgaccatggaaggaactgtaaacctccagctcagtgccaaaagtgtgggtgtgtttgaagctttttataattctgttaagcctatccagattatcaacagcaccatagaaatggtgaagccggggaaatttcccagcggcaaaacagaaatcccttttgaatttcctctgcacttgaagggtaacaaagttctgtatgagacgtatcatggcgtgtttgtcaacattcagtatacactgcgctgtgacatgaagcggtctctgttggccaaggacttgacaaagacctgtgaatttatcgttcactccgctcctcagaaggggaagtttactcccagtcccgtggacttcacgattacacctgaaaccttacagaacgtcaaagagnnnnnnnnnnnnnnatttctccttcgaggacatctcaactcaacaaactgtgtcatcacgcagccactaacgggagagctggtggtggagagctcggaagccgccatcagaagcgtggagctgcagctggtgcgcgtggagacgtgcgggtgtgcagaaggctatgcccgcgacgccacggagattcagaacattcagatcgccgacggggatgtgtgcaggggcctctctgtccccatctacatggtcttccctaggctgttcacctgccctacactggagaccaccaacttcaaagtggaatttgaggttaacatcgtggtgctgcttcaccctgaccacctcatcacggagaacttcccgctgaagctctgcaggatatagcccggaggagggaagcatagagaacggg

SEQ ID NO: 4812 - DNA, 1631 bp, Homo sapiens
taaagcacagcccagggaaacctcctcacagttttcatccagccacgggccagcatgtctgggggcaaatacgtagactcggaggtaggcatccgtgggggggcgccggctcgggcgtgcggggagtgtccgcttctgctatctgcctctccaaatatcccgactgctgccctggccccagccctctctccacttcggagcactcctctggcgttggcaccgctgaggaatgggcctgggcggggaggtgaagagaagccaggaatgttttatgttttcctaatggagagggggcctagggagcccctgagctaggaggacacggaaaaggggattggggtcctgagattgggtctgttgggcccaggacgcgttttctggatgggtctaggatgctcccttgtcgcgggacccccgcggtccggccctgcctgctgggggttcgaagaggtggagtgcagggtggaggtgttatttacccgagtcctggggacagtccccgggactctccgccaggcgcccagaccggcaggtcccgcaggcggcgcgcggtgtgtttgcactttccaaagttcttgaaccatctcaagaactccttctgcatcttggcgtctggcaggggtgttccgagagaggtagacctcccctccccaaactgccaccatcacttccaacgccctccacgcgctggagctctgcccgggtgtggaaacctcgtcttccaacacgtagctgcccttcagccacccgcccgcagcctgggagtgccctgagggtgggtcgggggagctgcgcagggacatctctacaccgttcccatccgggaacagggcaacatctacaagcccaacaacaaggccatggcagacgagctgagcgagaagcaagtgtacgacgcgcacaccaaggagatcgacctggtcaaccgcgaccctaaacacctcaacgatgacgtggtcaagattgactttgaagatgtgattgcagaaccagaagggacacacagttttgacggcatttggaaggccagcttcaccaccttcactgtgacgaaatactggttttaccgcttgctgtctgccctctttggcatcccgatggcactcatctggggcatttacttcgccattctctctttcctgcacatctgggcagttgtaccatgcattaagagcttcctgattgagattcagtgcatcagccgtgtctattccatctacgtccacaccgtctgtgacccactctttgaagctgttgggaaaatattcagcaatgtccgcatcaacttgcagaaagaaatataaatgacatttcaaggatagaagtatacctgattttttttccttttaattttcctggtgccaatttcaagttccaagttgctaatacagcaacaatttatgaattgaattatcttggttgaaaataaaaagatcactttctcagttttcataagtattatgtctcttctgagctatttcatctatttttggcagtctgaatttttaaaacccatttaaatttttttccttacctttttatttgcatgtggatcaaccatcgctttattggctgagatatgaacatattgttgaaaggtaatttgagagaaatatgaagaactgaggagg

SEQ ID NO: 4813 - DNA, 1949 bp, Homo sapiens
tggaaaggaaaagaagtggtcttcagggggctcatttgtaataacttacctggttaatcggagtctctctactgacttaaggattgtgggatgaggggaatgctatgtttggcttcatatagtctccaggactgggttcagtatgggtggtctgagcctgtggagtggggctgaccctgcctgggttcatcttgtgtctccatcccgaggtcttcaagccataccaggcctcccaacatgacatgtgccgcttccactccgaggactacattgacttcctgcagagagtcagccccaccaatatgcaaggcttcaccaagagtcttaatgccttcaacgtaggcgatgactgcccagtgtttcccgggctctttgagttctgctcgcgttacacaggcgcatctctgcaaggagcaacccagctgaacaacaagatctgtgatattgccattaactgggctggtggtctgcaccatgccaagaagtttgaggcctctggcttctgctatgtcaacgacattgtgattggcatcctggagctgctcaagtaccaccctcgggtgctctacattgacattgacatccaccatggtgacggggttcaagaagctttctacctcactgaccgggtcatgacggtgtccttccacaaatacggaaattacttcttccctggcacaggtgacatgtatgaagtcggggcagagagtggccgctactactgtctgaacgtgcccctgcgggatggcattgatgaccagattacaagcaccttttccagccggttatcaaccaggtagtggacttctaccaacccacgtgcattgtgctccagtgtggagctgactctctgggctgtgatccattgggctgctttaacctcagcatccgagggcatggggaatgcgttgaatatgtcaagagcttcaatatccctctactcgtgctgggtggtggtggttatactgtccgaaatgttgcccgctgctggacatatgagacatcgctgctggtagaagaggccattagtgaggagcttccctatagtgaatacttcgagtactttgccccagacttcacacttcatccagatgtcagcacccgcatcgagaatcagaactcacgccagtatctggaccagatccgccagacaatctttgaaaacctgaagatgctgaaccatgcacctagtgtccagattcatgacgtgcctgcagacctcctgacctatgacaggactgatgaggctgatgcagaggagaggggtcctgaggagaactatagcaggccagaggcacccaatgagttctatgatggagaccatgacaatgacaaggaaagcgatgtggagatttaagagtggcttgggatgctgtgtcccaaggaatttcttttcacctcttggttgggctggagggaaaaggagtggctcctagagtcctgggggtcaccccagggcttttgctgactctgggaaagagtctggagaccacatttggttctcgaaccatctacctgcttttcctctctctcccaaggcctgacaatggtacctattagggatgagatacagacaaggatagctatctgggacattattggcagtgggccctggaggccagtccctagccccccttgccccttatttcttccctgcttccctcgaacccagagatttttgagggatgaacgggtagacaaggactgagattgcctctgacttcctcctcccctgggttctgacttcttcctccccttgcttccagggaagatgaagagagagagatttggaaggggctctggctccctaacacctgaatcccagatgatgggaagtatgttttcaagtgtggggaggatatgaaaatgttctgttctcacttttggctttatgtccattttaccactgtttttatccaataaactaagtcggtattttttgtaccttt

SEQ ID NO: 4814 - DNA, 2712 bp, Homo sapiens
atgaccaattgcctgagtttccgaaatggcagaggactggccctgctgtgcgcgctcctggggacgctgtgcgaaacaggatccggtcagatccgctactcggtgtctgaggagctagataaaggttccttcgtgggcaacatcgctaacgacctggggctagagccccgggagctggcggagcgcggagtccgcatcgtctccagaggtaggacgcagcttttctctctgaatccgcaaagcggcagcttggtcaccgcggagaggatagaccgggaggagctctgcgctcagatcccgctgtgtctgaggaattggaaataaaaattggtgaactaacggttcctggaacccgatttccaattaaaactgcttttgacccagatgtaggcattaactccctgcagaactacaagcttagccccaatgactacttctctctggctgtgaatagcgtctctgagggggccaagtatccagagctggtgctggagcgggccctggaccgtgagaaaaaagaaattcaccagcttgtcctggttgcctctgatggtggcgaccctgtccactctggcaacttgcacatccaagtgatagtcctggatgcaaatgacaacccaccaatgtttactcagcctgagtaccgtgtgagtgtttgggagaacgtgcctgtgggtacccggctgctcacggtgaatgccactgaccctgacgagggattcaatgctcaagtgtcttatattctagataaaatgcctgggaaaatcgctgagattttccatcttaactcagtgagtggagaagtatcaatattaaaaagtctagattatgaggatgccatgttctatgaaattaaaattgaagcacaggatggaccaggtcttctttcaagagccaagattctagtcacggttctggatgtgaatgacaatgctccagaaattacaatcacgtctctcacaagctcagtcccagaagagggcaccgttggaagagaaattgctcttatcgacgtgcatgaccgagattctgggcagaatgggcaggttgaagtttttgtcctgggaaatctgccatttaagttagaaaaatcaatagatcaatattaccgcttagtgacggccacatccctggaccgcgaacaaatatcagaatataacattagtctgagagcctcagatgggggaagcccgccactgtccacagaaactcacatcaccctgcatgtgattgacatcaatgacaacccacccaccttccctcatttatcctactccgcctacattccagaaaacaaccccagaggagcctccatcttctcagtgacagcccaggacccagatagcaacaacaacgcccgcatcacttatgcattgaccgaggacactctccagggggcgcccctgtcctccttcgtctctatcaactccaacactggcgtcctatacgcgctgagatccttcgactacgagcaatttagagacttaaagctactggtgacagccagcgacagcgggaaccctccactcagcagcaacgtgtcgctgaacctgttcgtgctggaccagaacgacaacgcgcccgagatcctgtaccccgccctccccacagacggttccactggcgtggagctggcgcctcgctccgcagagcccggctacctggtgaccaaggtggtggcggtggacagagactcgggccagaacgcctggctgtcctaccgcctgctcaaggccagcgagccgggactcttctcggtgggtctgcacacgggcgaggtgcgcacggcgcgagccctgctggacagagacgcgctcaagcagagcctcgtggtggccgtccaggaccacggccagccccctctctccgccactgtcacgctcaccgtggccgtggccgacaggatccccgacatcctggccgacctgggcagcctcgagccctccgccaaacccaacgattcggacctcactctgtacctggtggtggcggtggccgcggtctcctgcgtcttcctggccttcgtcatcgtgctgctggcgctcaggctgcggcgctggcacaagtcacgcctgctgcaggcttcgggaggcggcttggcgagtacgcccggctcgcactttgtgggcgcggacggggttcgggctttcctgcagacctattcccacgaggtctccctcactgcggactcgcggaagagccacctgattttcccccagcccaactatgcggacacgctcatcagccaggagagctgtgagaaaagcgagcctcttctgataactcaggatttacttgaaatgaaaggagattccaacctacttcagcaagccccgcccaacacggactggcgtttctctcaggcccagagacccggcaccagcggctcccaaaatggcgatgacaccggcacctggcccaacaaccagtttgacacagagatgctgcaagccatgatcttggcgtccgccagtgaagctgctgatgggagctccaccctgggagggggtgccggcaccatgggattgagcgcccgctacggaccccagttcaccctgcagcacgtgcccgactaccgccagaatgtctacatcccaggcagcaatgccacactgaccaacgcagctggcaagcgggatggcaaggccccagcaggtggcaatggcaacaagaagaagtcgggcaagaaggagaagaagtaacatggaggcc

SEQ ID NO: 4815 - DNA, 1719 bp, Homo sapiens
ttaaatatttttcatgtcattgtggtgattgaggatgttaatgaccacgcccctcaattccggaaagatgaaataaacttagaaatcagtgaatccgtcagcctggggatgggaacaattcttgagtctgcagaagatcctgatattagtatgaattcgctgagcaaataccaactaagtcctaacgagtatttctcattggtggagaaagacaatcctgatggtggcaaatatccagaattagtattgcagaagactctggaccgagaaacgcagagcgctcaccacttggtactgaccgccttagatggtggggaccctccccgaagcggtactgctcagataagaatcctggtaatagatgccaatgacaaccccccagtgttcagccaggacgtgtacagggttagccttcgggaagacgtgcctccaggcacctccatcctgagagtgaaggccactgaccaggacgagggcatcaactcagagatcacttattccttctttggtgtggctgacaaagctcagcacgtgttctctctggattacactacaggaaacattctaactcagcagcctttggattttgaagaagtagaaagatatacgataaacatagaagcaaaagaccgaggatctctctcaacacggtgtaaagtaattgtagatgattctcaatcttcccccaaagcatggtttggtgccagccccttcacctccttccagagcccaagatcaatgctcaagttttggaggacatgatcaccatccccatggtactgatgcttgctggatttagggagggcattttgctaccaagcctcttcccaacgccctggggaccagtcttctgttttgtttttcattgtttgacgtttccactgcatgccttgacttcccccacctcctcctcaaacaagagactccactgcatgttccaagacagtatggggtggtaagataaggaagggaagtgtgtggatgtggatggtgggggcatggacaaagcttgacacatcaagttatcaaggccttggaggaggctctgtatgtcctcaggggactgacaacatcctccagattccagccataaaccaataactaggctggacccttcccactacataatagggctcagcccaggcagccagctttgggctgagctaacaggaccaatggattaaactggcatttcagtccaaggaagctcgaagcaggtttaggaccaggtccccttgagaggtcagaggggcctctgtgggtgctgggtactccagaggtgccactggtggaagggtcagcggagccccagtgcctccttgtgcatagaccttcttctcccacccccttctgcccctgggtccccggccatccagcggggctgccagagaaccccagacctgcccttacagtagtgtagcgccccctccctctttcggctggtgtagaatagccagtagtgtagtgcggtgtgcttttacgtgatggcgggtgggcagcgggcggcgggctccgcgcagccgtctgtccttgatctgcccgcggcggcccgtgttgtgttttgtgctgtgtccacgcgctaaggcgaccccctcccccgtactgacttctcctataagcgcttctcttcgcatagtcacgtagctcccaccccaccctcttcctgtgtctcacgcaagttttatactctaatatttatatggctttttttcttcgaca

SEQ ID NO: 4816 - DNA, 2205 bp, Homo sapiens
ccggcgggccgcgccgcgagccagtatctcagagagcgcggggtccggacagccgcgcgctgagggtctcggggcgggcgccgcgggacctctccgggccatggcagcccctgtcaaagggaacaggaagcagtccacggagggtgacgccctagacccacctgcatcccccaaacctgctggcaagcagaacggaatccagaaccccatctcgctggaggactcccccgaggcaggcggggagcgggaggaggagcaggagcgggaggaggagcaggccttcctggtcagcctctacaagttcatgaaggagcgacacacgcccatcgagagggtgccccatctcggcttcaagcagattaacctgtggaagatctacaaagcagtggagaagctgggggcctatgagctggtgaccgggcgccgcctctggaagaacgtgtacgacgagctggggggcagcccaggcagcaccagcgcggccacgtgcacgcgccgccactacgagaggctggtcctgccatacgtgcggcacctgaagggggaggatgacaagccgctgcccacctccaagcccaggaaacagtacaagatggctaaggagaacaggggggatgatggggccaccgagaggccgaagaaggccaaggaggagcggcgcatggaccagatgatgccaggaaagaccaaagcagatgctgctgacccagcaccacttcccagccaggagccccccaggaacagcacagaacagcagggcctggcctctgggtcttctgtgtcctttgtgggtgccagcggctgtcctgaggcctacaagcggctcctatccagcttctactgcaaggggacacacggcatcatgtcaccactggccaaaaagaagctcctggcccaggtgagcaaggtggaggccttgcagtgccaggaggagggctgccgccatggggcagagccccaggcgtccccagctgttcacctcccagagagtccccagagccccaaagggctgactgagaactccaggcaccggctgacccctcaggagggattgcaggccccaggtggcagcctcagagaggaggcgcaggcaggcccctgcccggcagcccccatcttcaagggctgcttctacacccaccccaccgaggtgctgaagcctgtcagccagcaccccagggacttcttctctagacttaaagatggggtgctattggggcctcctggcaaagaggggctgtcagtgaaagagccccagctggtgtggggcggagacgctaaccgcccttctgcgttccataaaggtggctccagaaagggcatcctctaccccaagcccaaagcctgctgggtgtcccccatggccaaggtcccagccgagagccccacgctcccgcccaccttccccagtagcccaggcctgggcagcaagcgcagcctggaggaagagggtgctgcccacagtgggaagagactgcgggccgtgtctccctttcttaaggaggcggatgccaagaagtgtggggccaaacctgcagggtccggcctggtctcctgccttctgggcccagccctggggcctgtgcccccagaggcctacaggggcaccatgctgcactgcccgctgaacttcactggcaccccgggccccttgaagggccaggctgcactccccttcagccccctggtcatcccggccttcccggcccacttcctggccaccgcaggcccctcgcccatggccgctggcctgatgcacttccccccaacgtccttcgacagtgccctccgccacagactttgcccggcctcatctgcctggcacgcaccaccagtcacaacctatgcagcgccccacttcttccacctcaacaccaagctgtaggccagcccatggtgttgtgtacactgtggagtcgacaggggcctacaacaggcaggtactgctgccagggggctctgaactagtgcctgctacccaggacacccgggccatgcccctggctgggcagcctggcacaagtgaagaagaaggcagtgggaaaactgggtttatctcaaggcagcagcctgagcccaggagcagaggacccagttgttataaggcgctgggagaggatgggcagctcccactgccccagagcggagctcgaagcacccaggttgcccacggaaaatccaataaaaagacaccagtgtgaatcc

SEQ ID NO: 4817 - DNA, 646 bp, Homo sapiens
ggaaaaggtcccggagagctgagcagtcaagatgtgtgacttcaccgaagaccagaccgcagagttcaaggaggccttccagctgtttgaccgaacaggtgatggcaagatcctgtacagccagtgtggggatgtgatgagggccctgggccagaaccctaccaacgccgaggtgctcaaggtcctggggaaccccaagagtgatgagatgaatgtgaaggtgctggactttgagcactttctgcccatgctgcagacagtggccaagaacaaggaccagggcacctatgaggattatgtcgaaggacttcgggtgtttgacaaggaaggaaatggcaccgtcatgggtgctgaaatccggcatgttcttgtcacactgggtgagaagatgacagaggaagaagtagagatgctggtggcagggcatgaggacagcaatggttgtatcaactatgaagagctcgtccgcatggtgctgaatggctgaggaccttcccagtctccccagagtccgtgcctttccctgtgtgaattttgtatctagcctaaagtttccctaggctttcttgtctcagcaactttcccatcttgtctctcttggatgatgtttgccgtcagcattcaccaaataaacttgctctctggg

SEQ ID NO: 4818 - DNA, 569 bp, Homo sapiens
ggatccggtgttgcatccttggagagagctgagagctcgagtacagaacctgctaaggccatcaaacctattgatcggaagtcagtccatcagatttgctctgggccggtggtactgagtctaagcactgcggtgaagaagatagtaggaaacagtctggatgctggtgccactaatattgatctaaagcttaaggactatggaatggatctcattgaagtttcaggcaatggatgtggggtagaagaagaaaacttcgaaggcttaatgatgtcaccatttctacctgccacgtatcggcgaaggttgggactcgactggtgtttgatcacgatgggaaaatcatccagaaaaccccctacccccaccccagagggaccacagtcagcgtgaagcagttattttctacgctacctgtgcgccataaggaatttcaaaggaatattaagaagaaacgtgcctgcttccccttcgccttctgccgtgattgtcagtttcttgagggctccccagccatgcttcctgtacagcctgcaaaactgtgagtcaattaaacctcttttcttcat

SEQ ID NO: 4819 - DNA, 6482 bp, Homo sapiens
  misc_feature (4763)..(4976): n is a, c, g, or t
aaacaaacaacatgaagttgaagaagccaccaacattctgacagcaacaagaaaatgtttccgacacatagccctcgattatgtgcttcagattaatgttcttcaatcaaaaaggagatcagaaatcctaaaatcaatgttgtcatttatgtatgcccatttggccttctttcatcaaggatatgatctgtttagtgaacttggaccctacatgaaggatcttggtgcacagttggatcgactggttgtggatgcagcaaaggagaaaagagaaatggagcaaaaacattccaccattcaacaaaaggatttctccagtgatgattctaagttagaatataacgtagatgctgcaaatggcatagttatggaaggatatctgttcaaacgagccagcaatgccttcaaaacttggaacaggcgctggttttcaatacagaataatcagttggtttaccagaaaaaatttaaggataatccgactgtggtagttgaagacctcaggctttgcacagtgaaacattgtgaagacatagagcgacgattctgctttgaggtggtctcgccaacaaaaagttgcatgctccaggcagattccgaaaagctgcgccaggcatggattaaggctgttcagaccagtattgctactgcttatagagagaagggtgatgaatcagagaagctggataagaaatcatctccatccacaggaagcctagattctggaaatgagtccaaagagaaattattgaaaggagaaagtgcgcttcagcgggtccagtgtatccctggcaatgccagctgttgtgactgtggcctggcagatccacggtgggccagcatcaacctgggcatcaccttgtgtatcgagtgctccggaattcaccggagccttggggttcatttttcaaaagtacgatctttaactttagacacctgggagccagaacttttaaagcttatgtgtgagttggggaatgatgttataaatcgagtttatgaagctaatgtggaaaaaatgggaataaagaaaccccaaccaggacaaagacaggagaaggaggcatatatcagagcaaaatatgtggagaggaaatttgtggataaatattctatatcattatcacctcctgagcagcaaaaaaagtttgtctctaaaagttctgaagaaaagaggctgagcatttctaaatttgggccaggggaccaagtcagagcatctgcccaaagttcagtcagaagtaatgacagtggaattcagcagagctctgatgatggaagagaatctttaccctccacggtgtcagccaatagtttatatgagcctgaaggagaaaggcaagattcttctatgtttcttgactcgaaacatcttaatccaggacttcagctttatagggcgtcatatgaaaaaaaccttcctaaaatggctgaggctttggctcatggtgcagacgtgaactgggccaattcagaggaaaacaaagcgacaccacttattcaggctgtattagggggctctttggtgacgtgtgagttcctcctacagaatggtgctaatgtcaaccaaagagatgtccaagggcggggaccattgcaccatgccaccgtcttagggcacacagggcaggtatgtttattcctaaaacgaggtgccaatcaacatgccactgatgaagaagggaaagaccctttgagcatagctgtggaagcagccaatgctgatatagtcaccttgttacgtttagcaagaatgaatgaagagatgcgggaatcagaaggactttatggacagccaggtgatgaaacttatcaggacatatttcgtgatttttcccaaatggcatccaataatccagagaaactaaatcgtttccagcaagattcacagaaattctgaatttttttaaaaatgggaaaatatgaaatctggtgaccccctaatgtatacagctaaaaaatcacaatttttttactgctttaattctacttaattttggtagatattgaatggcttggaaaagaggtacccattcatatatttataaattaaaacatagttatctagtagtaggagaggaacctagtttaggacctcttttattaaaaaagcctatttaaagggctatttctgtagacagaagttcagtctagatttaggccatctctaggttacaagatgataggaggttagacaaaagtgattcttttgccaatgggtggtggcattgatttttttcctccatgcatcttgcccaggatcactcagtcaagcatgtcttcatcaagtggaagccaactgtcctgcctgcctcaagaatatgtgttttctttagcttccctgaggctttttggtggttcagaaataggtgtgtgtgttgatgtgtttttggtaacctagctttcatacacataatatatgatttattagaactagagaatgtgttttccccgtttgttcataaatgcggtcggttatacttcttaggtgacaggttattgtccagtactttaatgtatgtatgtataatggctgtacaggtagaccataattcagtcctttagatttattttatgcagcaaaaagaagctcttttttttttttaatcacaaaaaaaaaccccagttcaaaatgtgtagttcttcattgttgggttgattccccaaaaccttgacagatgtatcgatggaataaaagtatgttttaaaggttacttgaatgtcacaaaattatgccttcatcaaaactttaaaggaaaaatcaatttataaaatcatgtaggccatttttatatttgaaatttgtccttttaaagatagttttgctgttgctcctagtgaaagaaaaatctctgtacaaaggagaaaaagaaccccacttattcttagttaatactaaaatatatagcaataaattgctgtttattttttctacatctattttgtgtacttgtacacagtgtacattcttttaaattatatcgtgtatatagctttagtattcggttacatgattcacagacccctgaattccaaaatattatggataaacattaccatttatatgctacaaattagtctgattccatctttgaaaatgtcttaaagtataaaataattaatttgctttttttttttttttttcccgagatggcgtcttgctgtgtcacccaggctggagtgcagtggcacgatctcagctcactgcagcctcctcctcttgggttcaagcaattctcctgcctcagcctcccgagtagctgggactacaggcacccgccaccattccgagctaatttctatatttttagtaaagacgggtttcaccattttggccaggttggtctcgaactcctgacctcaggtgatcagcctgctttagcctcccagagtgctgggattacaggcgtgagccaccgcacccagcctaatttgccttttgattccttcccattgttgtcaacaattaagtctattcttcttttagaaattatatgtaaatgatattattgatactctttctaaataagaggttttaaaatatataaaaactttatgatccaattatagataaattttctaacatttcccagtcactagggttttataagttgattaaacatcaaatcagaatctagccaagcaggaattatattgaaataagttcacattacagaaaaggttccataatttggccaaactgcatgcatgtaatgcttatttagtaatggtcactgtatgttagataaggataaaaatatatttgtgaattacttctgaggaaatgctaacttccacagcattgtatttaattataacaataacaggaacattaaatctttatctttgctgtttcacctcaaagtcatagatcatctggctttttaggcaccttcactaaaggcaaaaatctgatttgtagtttttattagcatgtaccttgaaattatttgaccaagaagctcaaagaaaagaagtacgttaaagaaaaagaaaaaacctcacttttcctttatagtgtcccttcctgttttaattcctaaagatcctgacttttatctgaggaagtctaggtagttttccttttggatctggccattggtgcgtgtttcattcagatcacctctggaatctctgtggttgtgaaggcaattccttatgagactcttgcctcctgtggcttacgtgatgaattgttaatatggcagtaattaattagtatctacttaaatttagtggtcagaaatgtatttgaagtgccttaaagatgatcatggttcagaatatcttcagagaaagcaaaatctttaatattgcagggagcctagcaatacaagtacacatttctgtggcttgatttcttgaatatgctgagacccaatttggactacatttggcagaaatgatggagtaaacagcaaggctttaaattaaattaatagttacaaggtaggttggctcttaggtgaatttagccatgtcaactaatagcttttatatggtatgtaacaaatctgaattatgttatgctgtgaattattcagtgcattataagaaatcttagttaatcatgcttttgggcttcattagtcaatgtgattggccttttattttctttccataacttatctgctattattagtttcttattccttattattaatctgttagctcattatcattagcttactaacttgaaagttagattaatatcaaaataagaatagcagcactatgaagagttaataaaatgcaatttcatnnnnnnnnnnnnnnnnnnnnnnnnnnnnnnnnnnnnnnnnnnnnnnnnnnnnnnnnnnnnnnnnnnnnnnnnnnnnnnnnnnnnnnnnnnnnnnnnnnnnnnnnnnnnnnnnnnnnnnnnnnnnnnnnnnnnnnnnnnnnnnnnnnnnnnnnnnnnnnnnnnnnnnnnnnnnnnnnnnnnnnnnnnnnnnnnnnnnnnnnnnnnnnnnnnnnnnacatacagatttaatttggaatatgaactttggttcttcatgagtgcattttgaaaaagaaaaaaagtacacattcagaatctggccaatttaagtttgtattttaaaaatattttatgcatgttaagtatggtcgcagtaaatgaaattgtgtttaagactaaatttactaccgttttgaacagacattcccagatcattcttatattgtcagataacacttgtgtataatatcactttggatcatggacatgagctggaaaaatgatgtatttttgtagattgtatgtccagaatgactttagaaccgcatgatacggtggaaggagcactggactagtcgtcactaccctttttggattcagggctcctcacaattaaaatgagtgtaatgaaacaaggtgaaaatatagaagcatccctttgtatactgttttgctacttacagtgtacttggcattgctttatctcactggattctcatggtaggatttctgagatcttaatctaagctccaaagttgtctacttttttgatcctagggtgctccttttgttttacagagcagggtcacttgatttgctagctggtggcagaattggcaccattacccaggtctgactgaccaccagtcagaggcactttatttgtatcatgaaatgatttgaaatcattgtaaagcagcgaagtctgataatgaatgccagctttccttgtgctttgataacaaagactccaaatattctggagaacctggataaaagtttgaagggctagattgggatttgaagacaaaattgtaggaaatcttacatttttgcaataacaaacattaatgaaagcaaaacattataaaagtaattttaattcaccacatacttatcaatttcttgatgcttccaaatgacatctacagatatggttttgtggacatctttttctgtttacataaatttatccacttaaaatgtgataatgtggagacaaagcaagatttgattacataaacttttctctgcattggtcttttcactatcttatttgctaacttttcttatttttcttcaacctccccaccctccattttttggatattaaacagggaaagcttgctacattataaagattgttggcaccatttattttacacaaaggctaaaggttaacttttggaaatgatgagctacttttatatatgtgtttactcatgctttgtgatatttctggatcattccagtcataaagacttattacatgtactatttcttgctacctgtgaaaaggtatattttaaagaatgtataaccaacagtccatttactttttattagtatgtagaggatttgtatctaattcatgaatgtagttttacagtagtttgtcattgtaaatggagcaaagtacattatcttctaaaatgtacattatgtaagaattgtaaatatacttaagtaatttgtatgccaaaaaattacaataagtcaataaagatctcacctctggctt

SEQ ID NO: 4820 - DNA, 1657 bp, Homo sapiens
aatagtggtgatgtcatgcaggcaagatggcggaaggggaggacgtgggatggtggcggagctggctgcagcagagctaccaagcagtcaaagagaagtcctctgaagccttggagtttatgaagcgggacctgacggagtttacccaggtggtgcagcatgacacggcctgtaccatcgcagccacggccagcgtggtcaaggagaagctggctacggaaggctcctcaggagcaacagagaagatgaagaaagggttatctgacttcctaggggtgatctcagacacctttgccccttcgccagacaaaaccatcgactgcgatgtcatcaccctgatgggcacaccgtctggcacagctgagccctatgatggcaccaaggctcgcctctatagcctgcagtcggacccagcaacctactgtaatgaaccagatgggcccccggaattgtttgacgcctgccaaccagagctctgggcacagattctggtggctccctgctggccctcttgggcctctgctcacacctgggaaggggctctctaaatcccggccagaaactctgacttgtgccaacaataggatgacccaagggagaggaaacctatcctcctcaccagaagagcctgtgtttttctgctgaacacccactgttcctgaggactcctgctgggaagtcccaagggatagttctagcccttctgcctgtgtagacagaagctaaaccaccagtctctctcggaggaagctgagacaacatactctgtccatacataagcaggcagggagggccatgccacctacccttggctaaacagggacagtgaacacattttggttcctatcccagtgggtaagaggcacttatctctgggaaatttgcctctcttgggactctccccctcccaggcattttccattcctggaaaggctcctttggggttcagaatccagagaccaaaccctgacccacctccttcctttcctccagcccacgctggtctgtccccatgccttcccagggcttcttcatgtcggatgcacccaagtccttagcccagctgtgccacctgcaggagttcgctcttgcgtttcttcccctccccaagaagggagggggctacttcaggcccttctgtgtgttgcctggcaggataccttgtccaaccagctacccacctcaactcccctgtagtttaggacacaaaacagctaccagcggtacagagcggtgatcaaagccgagtacttacaactctggtaagcctagcttctccgcctcagcccttctgcttctggaagggctatcctgggggtgaacttgaaactctcatcaggcttccacttcaaaccttcagtgagggggtgggatggagagaatgctgaatcttttttttgacgggatggggtttttctctttgtaattatttctttagtttaattaaccttttggttgtttgtgcaatattatatattttaaattataatgcatctccccagagtattttgtagctgggaaaagaaaaaaggaaaaaaagaaaaaaagattctaacagctgttagttttataattaaaaaagaaagaaaaaagaactttgtcctgaaccttttacagacttgccgttaacagcattaaagtgattcacccgaagctg

SEQ ID NO: 4821 - DNA, 1757 bp, Homo sapiens
gctgcgcggtggctgtggcaggttcgcgcccgagctctgctagccacccgtccgacaacttccggactcccaggggacagccctgccatcaaggaagacagcacaggactgggacccacccatgaacccttctcaggacaacccaacagcaccagtggggatgttctcctaagccgcagagggcctgggcacgccatccgtcctccaggaagagccatggtgttaatgcaggacaagggcagctctcagcagtggcctggtctggggggcgagggtggtggcacaggtcccttaagcatgctcagagctgccctgctgctcatcagcctgccatggggggcccaagggacagccagcaccagcctcagcactgctgggggtcacaccgtgccaccgactgggggccgctacttgagcattggagatggctctgtgatggagtttgagtttcctgaggacagtgagggcatcatcgtgatctccagccagtacccaggccaggccaacaggacggcgcctggccccatgctcagggtcacctccctggacacagaggtgctgaccatcaagaacctcgtggacgcccatgaggccccgcccacactgattgaggagcggagagacttctgcatcaaggtctcacctgctgaagacacgcctgccaccctcagcgccgacctggcccacttctcggaaaacccaatcctctacctgctcctgcctcttatctttgtcaacaagtgttcgtttgggtgcaaagtggaactcgaggttctgaaggggctcatgcagagcccccagcccatgctgctgggcctcctgggccagtttctggtcatgcccttgtacgctttcctcatggccaaggtcttcatgctgcccaaggccctggctctgggcctcatcatcacctgctcgtcgcctggcggcggggggagctacctcttcagcctccttcttggaggggacgtcaccctggccatctccatgactttcctctctacggtggctgccactggcttcttgcctctgtcttcggccatctacagccgcctgctcagcatccatgagacgctccacgtgcccatctccaagatcctggggaccctgctgttcattgccatccccatagccgtgggcgtgctgatcaagtccaagctccccaagttctcccagctgctgctgcaggtcgtcaagcccttcagctttgtgctcctcctgggcggcctcttcctggcctatcgcatgggggtcttcatcctggcaggcatccggctacccatcgtactggtgggtatcacggtgcccctggttggcctgttggtgggctactgcctagccacgtgtctgaagctgccagtggcccagcggcggacggtcagcattgaggtaggggtgcagaacagcctgctggccttggccatgctgcagctatccctccgccgccttcaagctgactatgcctcccaggcccccttcattgtggcgctgagcggcacctccgagatgctggccttggtcattggccacttcatctacagcagcctgttcccagttccctgaggcctctgggtcaagctttcatcagccccagcccccacactccaccaaagttctcatgcactatgcactcagaaaaatccaggcttattttttttactgattttttattctccagctttcagtgccaaagaggccatgctgagttaggtaggtgggcgctgcccagaaaatatatttcaataaaagagagaagc

SEQ ID NO: 4822 - DNA, 4175 bp, Homo sapiens
gaccagcgttccgctgttcccaactacgggtgcccagacgatccaatccgcgttcgaaatcgcctcctctcccctccccctacaggggcggtactcccggctccaaagaggtggggtcggtataaaggggttgaggtcaccgggaaggggtaaaagcgcgacgggacctgagctgaaggacgggatctcaagcctcaagtccctgcgccatcccgccgtctctgtgtcctcccctggggcccaaaacctccatcctccttctaggctcgctggctcaaggccaaggagctcagcgcgccgcctccgcccggaacgcaaacagctgttcccagagacgtctccgctctcaactttgccaactactccgcacgcactttgaccagcggagcaaccgggacctgtgggtcggggtcctctggcggagttaaaaaaaaaagaggtgaaactgcgggaccggcgctgcgagtcgctaggcttcgcctcaaactttgctgttgcagcggagcggccccgcccctcctctcccctacgacgcccacgcgctcggatggggcttgttccctagctcgggagcgtgtgggcagcagcagcggcggcggcggcggcggcggcggcggcggcagcagcagcttcagtagcgcagaggcggcggtggcgagaggtgcggcgaaggaggcagaggcacttatgcttgtcaggccaagaagcttgagagaagaaaaatttcagaaaaattgtctcaatttgactagaatatcaatgaaccaggaaaactgaagcaccttccctaaagaaaacttgggtatacaattactccacagacagagctgagggttttttacccaaatcagtcactggattttgctgcctgatacgtgaatcttcttggaatttttctcatgtggatctaaggggaatgctttattatggctgctgttgtccaacagaacgacctagtatttgaatttgctagtaacgtcatggaggatgaacgacagcttggtgatccagctatttttcctgccgtaattgtggaacatgttcctggtgctgatattctcaatagttatgccggtctagcctgtgtggaagagcccaatgacatgattactgagagttcactggatgttgctgaagaagaaatcatagacgatgatgatgatgacatcacccttacagttgaagcttcttgtcatgacggggatgaaacaattgaaactattgaggctgctgaggcactcctcaatatggattcccctggccctatgctggatgaaaaacgaataaataataatatatttagttcacctgaagatgacatggttgttgccccagtcacccatgtgtccgtcacattagatgggattcctgaagtgatggaaacacagcaggtgcaagaaaaatatgcagactcaccgggagcctcatcaccagaacagcctaagaggaaaaaaggaagaaaaactaaaccaccacgaccagattccccagccactacgccaaatatatctgtgaagaagaaaaacaaagatggaaagggaaacacaatttatctttgggagtttttactggcactgctccaggacaaggctacttgtcctaaatacatcaagtggacccagcgagagaaaggcatttttaaattggtggattctaaagcagtgtccaggttgtgggggaagcacaaaaacaaacctgatatgaattatgagaccatgggaagagcactcaggtactattaccaaaggggtattctggcaaaagtggaaggtcagcgcttggtgtatcagtttaaagaaatgccaaaagatcttatatatataaatgatgaggatccaagttccagcatagagtcttcagatccatcgctatcttcatcagccacttcaaataggaatcaaaccagccggtcgagagtatcttcaagtccaggggtaaaaggaggagccactacagttctaaaaccagggaattctaaagctgcaaaacccaaagatcctgtggaagttgcacaaccatcagaagttttgaggacagtgcagcccacgcagtctccatatcctacccagctcttccggactgttcatgtagtacagccagtacaggctgtcccagagggagaagcagctagaaccagtaccatgcaggatgaaacattaaattcttccgttcagagtattaggactatacaggctccaacccaagttccagtggttgtgtctcctaggaatcagcagttgcatacagtaacactccaaacagtgccactcacaacagttatagccagcacagatccatcagcaggtactggatctcagaagtttattttacaagccattccatcatcacagcccatgacagtactgaaagaaaatgtcatgctgcagtcacaaaaggcgggctctcctccttcaattgtcttgggccctgcccaggttcagcaggtccttactagcaatgttcagaccatttgcaatggaaccgtcagtgtggcttcctctccatccttcagtgctactgcacctgtggtgaccttttctcctcgcagttcacagctggttgctcacccacctggcactgtaatcacttcagttatcaaaactcaagaaacaaaaactcttacacaggaagtagagaaaaaggaatctgaagatcatttgaaagagaacactgagaaaacggagcagcagccacagccttatgtgatggtagtgtccagttccaatggatttacttctcaggtagctatgaaacaaaacgaactgctggaacccaactctttttagttaatataccaaagcttatgaataattgtttgttaattgaacattttcaattatatgcagactgactgattctaagataaattctaaggaggtttctaattttgtaattgttaaaaatagagttaattttgactttgttagatgagggaggaaaactcaactgtttctctttgttatctaaatgtttcagaattcaatcgtgaaggaacaggcattttacactatgaagacattcttttgagatttttatttcagttgctatatcataagcatttttaaagtttcttttctaattttacattgtattagattttctgattcttttgtaaatacagaacttaaatagaaggcaacaggaaatttatataggaactattttcattccacttgtgtaagttaagtcttgactctttcaaatgcaaaaaacctattttatgctttgttaaaattatggtgtcacttagattgactttagttgactgcactatataatatagaactatgaatatgtagaataacatgaaaaattggaggtgctggtggtatggctgaccctgtttcagaagcaggatagtataaaagcatcagcctaagaatggcactcccactaactagctatgtaatcttgacctctttgggctttagttcctctcataaaaggaagagatgtattggattagactagatgatcaccactttctcttctagttctaatttttttaattctaatacctatattttcaagttatgtcaattaaatcattatcaggttatttcctaatgtaagaatagctaaaatgttgcagagaaataagtgacccaacaaaatttattcatctgttatgggtaagatctgccataaattcttcctaaataatttgtttactaactctttaggccactgtgctttgcggtccattagtaaacttgtgttgctaagtgctaaacagaatactgctattttgagagagtcaagactctttcttaagggccaagaaagcaacttgagccttgggctaatctggctgagtagtcagttataaaagcataattgctttatattttggatcattttttactgggggcggacttggggggggttgcatacaaagataacatatatatccaactttctgaaatgaaatgtttttagattactttttcaactgtaaataatgtacatttaatgtcacaagaaaaaaatgtcttctgcaaattttctagtataacagaaatttttgtagatgaaaaaaatcattatgtttagaggtctaatgctatgttttcatattacagagtgaatttgtatttaaacaaaaatttaaattttggaatcctctaaacatttttgtatctttaattggtttattattaaataaatcatataaa

SEQ ID NO: 4823 - DNA, 1475 bp, Homo sapiens
atttttagtagagatggggtttcgccacgttggccaggctggtctcgaactcctgacctcaggtgatctgcccgtctcgtcctcccaaagtgctgggattacaggtgtgagccaccacgcccagccaccactacgcactttaaaaccaaaaaaagctcaaagggatggatcattgtccatggctcaggagccccactgtggggtaagtgtgatgtcgatggattaatttagacagtggtgtattcatcagggcaaaggaaattcttccagaggtgatgatgcggcagatattcccagtgctctcccaaagcaagctggccctcttgtcatcctctcagtgggcggcaccagctgcccctccttccacaagtactcaagcctgtttgtaaatactgaaggaattgatggggttgaggaaaggaggtgcatgtgaccagggtcccaaggccacagcttttcagatcctaggaagcaagtggcatttgcttgagttgtggcctcggaaggagaatgtttatctgttttctaactttgctgacaccaggattctccctgtcattgagaagaaagcattatctaattaccttcaggtggtttacttattctgtaaagaatatgtgtaaatattttgtacagagccctgtatcaaataaacagccatatgtggttactaatcacctcttctgtcattccgtccttggccaccgctcagtgggaatggtctctgatctggatgctcccaccttccatgtcaggcccagaactgtgccatggtctgtggactcctggtcagccttgactggctaggagaccttgggcagtacctacagtcttgctgtttctgtttcatctgcaagaattatgacccacacactccagctgcagcccagggcactgtgatattttatacgtgtgtagatgtttttgtccacagttcctggttcatcactcccataaccctttgttataatgttgggacactgcaggcctcagaaaacggaatctctgtctgtgaccttctcctgccccatttcacttgctcaacaccagactttaatctgactgtagctcataagaccctcattccagagagggtgctgccccatacccggaaggaggaacgctgcacagagaggccaagaagcatctggacagacaggccttgctgggtttagaccttatgctttttgtccagtttcatctcaacacagctgccatgcttcagccatgcctatccaatgacgtctccataaaaggcccaggaacacgggagcttctgaagagctgaacatgtggagggaggggaacgagaacttgtccatgtgccaagagggtggcgcacccccactccatggggacagaagctccagcatttgcccaggacccgtccagacctcaccctgtgtgtatcttcatctggctgtttacttatttgtatccttttctaataatgtttgtaataaactggtaaacat

SEQ ID NO: 4824 - DNA, 4349 bp, Homo sapiens
ttggtgactgcggggcaggccgggggcagctgtctgtctggctctttttgacagcccccagtgcgaaaggctgccagcatgtcatcagtgagccccatccagatccccagtcgcctcccgctgctgctcacccacgagggcgtcctgctgcccggctccaccatgcgcaccagcgtggactcggcccgcaacctgcagctggtgcggagccgccttctgaagggcacgtcgctgcaaagcaccatcctgggcgtcatccccaacacgcctgaccccgccagcgacgcgcaggacctgccgccgctgcacaggattggcacagctgcactggccgttcaggttgtgggcagtaactggcccaagccccactacactctgttgattacaggcctatgccgtttccagattgtacaggtcttaaaagagaagccatatcccattgctgaagtggagcagttggaccgacttgaggagtttcccaacacctgtaaaatgagggaggagctaggagaactatcagagcagttttacaaatatgcagtacaattggttgaaatgttggatatgtctgtccctgcagttgctaaattgagacgtcttttagatagtcttccaagggaagctttaccagacatcttgacatcaattatccgaacaagcaacaaagagaaactccagattttagatgctgtgagcctagaggagcggttcaagatgactataccactgcttgtcagacaaattgaaggcctgaaattgcttcaaaaaaccagaaaacccaagcaagatgatgataagagggttatagcaatacgccctattaggagaattacacatatctcaggtactttagaagatgaagatgaagatgaagataatgatgacattgtcatgctagagaaaaaaatacgaacatctagtatgccagagcaggcccataaagtctgtgtcaaagagataaagagactcaaaaaaatgcctcagtcaatgccagaatatgctctgactagaaattatttggaacttatggtagaacttccttggaacaaaagtacaactgaccgcctggacattagggcagcccggattcttctggataatgaccattacgccatggaaaaattgaagaaaagagtactggaatacttggctgtcagacagctcaaaaataacctgaagggcccaatcctatgctttgttggccctcctggagttggtaaaacaagtgtgggaagatcagtggccaagactctaggtcgagagttccacaggattgcacttggaggagtatgtgatcagtctgacattcgaggacacaggcgcacctatgttggcagcatgcctggtcgcatcatcaacggcttgaagactgtgggagtgaacaacccagtgttcctattagatgaggttgacaaactgggaaaaagtctacagggtgatccagcagcagctctgcttgaggtgttggatcctgaacaaaaccataacttcacagatcattatctaaatgtggcctttgacctttctcaagttctttttatagctactgccaacaccactgctaccattccagctgccttgttggacagaatggagatcattcaggttccaggttatacacaggaggagaagatagagattgcccataggcacttgatccccaagcagctggaacaacatgggctgactccacagcagattcagataccccaggtcaccactcttgacatcatcaccaggtataccagagaggcaggggttcgttctctggatagaaaacttggggccatttgccgagctgtggccgtgaaggtggcagaaggacagcataaggaagccaagttggaccgttctgatgtgactgagagagaaggttgcagagaacacatcttagaagatgaaaaacctgaatctatcagtgacactactgacttggctctaccacctgaaatgccgattttgattgatttccatgctctgaaagacatccttgggcccccgatgtatgaaatggaggtatctcagcgtttgagtcagccaggagtagcaataggtttggcttggactcccttaggtggagaaatcatgttcgtggaggcgagtcgaatggatggcgagggccagttaactctgaccggccagctcggggacgtgatgaaggagtccgcccacctcgctatcagctggctccgcagcaacgcaaagaagtaccagctgaccaatgcttttggaagttttgatcttcttgacaacacagacatccatctgcacttcccagctggagctgtcacaaaagatggaccatctgctggagttaccatagtaacctgtctcgcctcactttttagtgggcggctggtacgttcagatgtagccatgactggagaaattacactgagaggtcttgttcttccagtgggtggaattaaagacaaagtgctggcggcacacagagcgggactgaagcaagtcattattcctcggagaaatgaaaaagaccttgagggaatcccaggcaacgtacgacaggatttaagttttgtcacagcaagctgcctggatgaggttcttaatgcagcttttgatggtggctttactgtcaagaccagacctggtctgttaaatagcaaactgtaggtccaaatctcaattttttagaattttaagttatgaagtgctcaaaggtactgacacagttgattttattcacaccattaggggtatgcaagatgtccctgttttataaacataatcacaacagtaataaacctcaagtagtggctagtgtttagtatagaaatataagatgttgatttagtaaactgataaaaatcgaattcttgtctttttagtgggatccttactgtccctggaaagatatagcatagtggttctcagcacagtctccagaacagaagcatctgtagtacctggtaacttgttagaaatgtacattctcaggctccacagcaggccgcctgaatcaaatcctgggaggtggggacagaaatctgtgttttaagaagccttccaggtaattctgctgcacactcaagttcaggaaccaccggtatagaccattaccttagtggatttacctgtagagtttattggatcctgaaaccaatcaattacttagaactaggcaaagatgaaagtatagccaactattcttggctatatatatatattcaagtgggccgggcgtgatggctcacacctgtaattccagcactttgggaggtcgaggtaggcagatcaccgagcccaagagttcaagacaatcctggccaacggcgaaactctgtctctacaaaaaatatacaggcgtgttagcatgtgcctgtaatcccagcttcttgggaagctgaggcacaagaattgcctgaacccaggaggtggaggttgcagtgagctgggatcgcgccattgcactccagcctggctgacagagcgagactgtctctaaaaaaaaaagactcaagtggaccctacaatgaagcctacacatcccaatagaagccccttcttatgctgagggaagcagccctcagaacatgatagcttgtatccagcagagtggcacgtgctggcacacctcacagaagcaccctggccctggatgcctgcaacctcagaagagtgcagctcccagagggaggcagccatccatctgggatggtcctaagcatggaatcctaactcctgattccgtctcctatttcttgcttggctacgccagttcccaaatctggtagatgtccatgcccatgtgctcctgctgggactcaattcaggctatgtatgactatgaagtcaggctcatctgcttactggctgtgtgaactttttgtatcttggttttcttcatccatgaaatccaagtaatactacctaattgttactgtggagattaagttcaaatgcaatgtatagtaatattaagcaatttctagttattattctagccagtaatggacttcagaatcttttattacacaatataagaatatgtatgtaaagacattttggaatttcctggatgagaaggaagtctgggctgggcatggtggctcacccctgtaaccctagcactttaggaaatcgaggcgagtggatcacttaagctcaggagttcaaggccagcctgggcaacatggcaaaaccccatttctacaaaaaatacaaaaattagctgggcatggtggcacccgcctgtagtccagctacttgaggctgagatgggaggatgagggaggtcggggctgcagtgagccaagatcacgccactgcactccagcaccctgggcgacagagtgagaccctgtctcaaaaaaaaaaaaaaaaaa

SEQ ID NO: 4825 - DNA, 731 bp, Homo sapiens
ccgcccgcccgctcagcgtccgccgccgccatgggagtgcaggtggaaaccatctccccaggagacgggcgcaccttccccaagcgcggccagacctgcgtggtgcactacaccgggatgcttgaagatggaaagaaatttgattcctcccgggacagaaacaagccctttaagtttatgctaggcaagcaggaggtgatccgaggctgggaagaaggggttgcccagatgagtgtgggtcagagagccaaactgactatatctccagattatgcctatggtgccactgggcacccaggcatcatcccaccacatgccactctcgtcttcgatgtggagcttctaaaactggaatgacaggaatggcctcctcccttagctccctgttcttgggtaaggaaatggaatactgaagggcccttcactgcctttgctcctcccatgttatgcccagcgtttgatgggtagcagagagaacaaaaaacaccacaaggctatttttccccctgcattctttctgtattgagtatcctttcagtgttattagtgtatgctttgaatgtaaaaattggtcaccctaaggaaaggaattggcatgtgtatgttcccagttcaactcatggagatggcagctgtttaaatgtttttctatgtagtttataaattaaaactgaattgaggactatggaaatgtaggccaaatttgtagtgccaacattttagttctttgg

SEQ ID NO: 4826 - DNA, 4116 bp, Homo sapiens
gtttagaacagcctacagacccagtggcacgagacgggcctctctcccaaacatcttccaagccagatcctagtcagtgggaaagccccagcttcaacccctttgggagccactctgttctgcagaactccccacccctctcttctgagggctcctaccactttgacccagataactttgacgaatccatggatccctttaaaccaactacgaccttaacaagcagtgacttttgttctcccactggtaatcacgttaatgaaatcttagaatcacccaagaaggcaaagtcgcgtttaataacgactactgaacaagtgaaatttctctgttttctgttgagtggctgtaaggtgaagaagcatgaaactcagtctctcgccctggatgcatgttctcgggatgaaggggcagtgatctcccagatttcagacatttctaatagggatggccatgctactgatgaggagaaactggcatccacgtcatgtggtcagaaatcagctggtgccgaggtgaaaggtgagccagaggaagacctggagtactttgaatgttccaatgttcctgtgtctaccataaatcatgcgttttcatcctcagaagcaggcatagagaaggagacgtgccagaagatggaagaagacgggtccactgtgcttgggctgctggagtcctctgcagagaaggcccctgtgtcggtgtcctgtggaggtgagagccccctggatgggatctgcctcagcgaatcagacaagacagccgtgctcaccttaataagagaagagataattactaaagagattgaagcaaatgaatggaagaagaaatacgaagagacccggcaagaagttttggagatgaggaaaattgtagctgaatatgaaaagactattgctcaaatgattgatgaacaaaggacaagtatgacctctcagaagagcttccagcaactgaccatggagaaggaacaggccctggctgaccttaactctgtggaaaggtccctttctgatctcttcaggagatatgagaacctgaaaggtgttctggaagggttcaagaagaatgaagaagccttgaagaaatgtgctcaggattacttagccagagttaaacaagaggagcagcgataccaggccctgaaaatccacgcagaagagaaactggacaaagccaatgaagagattgctcaggttcgaacaaaagcaaaggctgagagtgcagctctccatgctggactccgcaaagagcagatgaaggtggagtccctggaaagggccctgcagcagaagaaccaagaaattgaagaactgacaaaaatctgtgatgagctgattgcaaagctgggaaagactgactgagacactccccctgttagctcaacagatctgcatttggctgcttctcttgtgaccacaattatcttgccttatccaggaataattgcccctttgcagagaaaaaaaaaaacttaaaaaaagcacatgcctactgctgcctgtcccgctttgctgccaatgcaacagccctggaagaaaccctagagggttgcatagtctagaaaggagtgtgacctgacagtgctggagcctcctagtttccccctatgaaggttcccttaggctgctgagtttgggtttgtgatttatctttagtttgttttaaagtcatctttactttcccaaatgtgttaaatttgtaactcctctttggggtcttctccaccacctgtctgatttttttgtgatctgtttaatcttttaattttttagtatcagtggttttatttaaggagacagtttggcctattgttacttccaatttataatcaagaaggggctctggatccccttttaaattacacacactctcacacacatacatgtatgtttatagatgctgctgctcttttccctgaagcatagtcaagtaagaactgctctacagaaggacatatttccttggatgtgagaccctattttgaaatagagtcctgactcagaacaccaacttaagaatttgggggattaaagatgtgaagaccacagtcttgggttttcatatctggagaagactatttgccatgacgttttgttgccctggtatttggacactcctcagctttaatgggtgtggcccctttagggttagtcctcagactaatgatagtgtctgctttctgcatgaacggcaatatgggactccctccaagctagggtttggcaagtctgccctagagtcatttactctcctctgcctccatttgttaatacagaatcaacatttagtcttcattatctttttttttttttttgagacagagtttcgatctattttaagtatgtgaagaaaatctacttgtaaaaggctcagatcttaattaaaaggtaattgtagcacattaccaattataaggtgaagaaatgtttttttcccaagtgtgatgcattgttcttcagatgttgaaaagaaagcaaaaaataccttctaacttaagacagaatttttaacaaaatgagcagtaaaagtcacatgaaccactccaaaaatcagtgcattttgcatatttttaaacaaagacagcttgttgaatactgagaagaggagtgcaaggagaaggtctgtactaacaaagccaaattcctcaagctcttactggactcagttcagagtggtgggccattaaccccaacatggaatttttccatataaatctcaatgaattccctttcatttgaataggcaaacccaaatccatgcaagtgttttaaagcactgtcctgtcttaatcttacatgctgaaagtcttcatggtgatatgcactatattcagtatacgtatgttttcctacttctcttgtaaaactgttgcatgatccaacttcagcaatgaattgtgcctagtggagaacctctatagatcttaaaaaatgaattattctttagcagtgtattactcacatgggtgcaatctttagccccagggaggtcaataatgtcttttaaagccagaagtcacattttaccaatatgcatttatcataattggtgcttaggctgtatattcaagcctgttgtcttaacattttgtataaaaaagaacaacagaaattatctgtcatttgagaagtggcttgacaatcatttgagctttgaaagcagtcactgtggtgtaatatgaatgctgtcctagtggtcatagtaccaagggcacgtgtctccccttggtataactgatttcctttttagtcctctactgctaaataagttaattttgcattttgcagaaagaaacattgattgctaaatctttttgctgctgtgttttggtgttttcatgtttacttgttttatattgatctgttttaagtatgagaggcttatagtgccctccattgtaaatccatagtcatctttttaagcttattgtgtttaagaaagtagctatgtgttaaacagaggtgatggcagcccttccctagcacactggtggaagagaccccttaagaacctgaccccagtgaatgaagctgatgcacagggagcaccaaaggaccttcgttaagtgataattgtcctggcctctcagccatgaccgttatgaggaaatatcccccattcgaacttaacagatgcctcctctccaaagagaattaaaatcgtagcttgtacagatcaagagaatatactgggcagaatgaagtatgtttgtttatttttctttaaaaataaaggattttggaactctggagagtaagaatatagtatagagtttgcctcaacacatgtgagggccaaataacctgctagctaggcagtaataaactctgttacagaagagaaaaagggccgggcacagtggcttattcctgtaatcccaacactgtggaaggccgaggcaggaggatcacttgagtccaggagtttgaaacctacctaggcaacatggtgaaaccttgtctctaccaaaataaaaattagctgggcatggtggcacgtgcctgtggtcccagctacttgggaggctgaggtgggagcctgggaggtcaaggctgcagtgagccatgatcatgccactgcactccatcctgggtgacagcaagatcttgtctc

SEQ ID NO: 4827 - DNA, 1827 bp, Homo sapiens
agcgtgtgggtgccgcctttctgccagtagttctggttcttaagaaaagcaccataaatcagacatgaaaattctggctccaaaaatagcattttctttgtgcaaataaaaacgtgtgtatcaagtatgacgttcccccaacgtggacacacttggttcctcagaaagccaagcccgctgcagctgccacatcccagggcttatggtgcagcaggtgcttttttcaagacaggaatcaaagtgttaggaacacggcagacaggtgacacctggataccaaatgcaggatgaggagtactgcagaggtcacagggaagtcacagaacagtaatacgctagcaggggcatggggcgtgaagaacagaagaagacagtttgagaaaagcatctgcaaaatgctaaagagcagagcttacctcattgcctgtccccatctcatcccaggtcaccacctggctgaccccaggtccccgacccaacaacaacccctcccaagtccctaactccctcacttggacttgagacccttcacaacccagcagcgctccgcctccaacgtgacatcatgctttctggaaacttccccgtatgtcccactttcccacacttggtgccctggagcaccttccggcctctacatgctgtacgttcccctgtgagcaccctcctctcggcctctggccaacacagtcccacccatctgtgggtaacaaacgggtgtgtgtgttcttttcagccttgctaaactgtctgaatcaaggatcacaaactacagcctgcaggccaaagccagcccacagcctgtgtttgtaaataaagctttattggaacaaagccacaccccttaatctacagatgatctgtggctactttcacaccacaacagagtaccatggttctgacagagactgggggaccctgtctaaatgacttctgacctggacctttactgaaaatcctcccaatcattctgttgacaagaatggtgtattactttttgcaataagaaacaagtaacctttgcagaattccacccatctttcaaggctgatcccagaagttccctctgcccacgcacctacctgatcctgatcacttcctaaactgcagcccggcccacccggctccagcatcatttgtggagtctcagctccataaatccagagggcaggtgggggtgtgtcctaattttcccgagcctactgtaccgaaacaggacagcagagtaggaagcctctgtgacttctgctccctccctagcttttccaccagaccctgcatggtcccaccctggctgtgtgaagcagggatcagggagcgtggctcgatgtcagtctccagaaccctgtccaccctggcgtggtggcagacatggctacctgcagctgagctgccagttcctctgagtcctcaaagaccaggccattttctttatgtttcaccagctcatgtaaactgcagagagaaccaagggagcctgagagctgcctggggaagacaccagacccctggggtgcccagctgggctcccacccaccccacgctcaagccaggctgggggttggaacagggggtgtggtttctgggagctggttcttagatttggcatctgaagggtataaaggcctggggggggtgcacatcaaaatgaccaaatcgatttgaggagagagccttaaggaaggtttgtaccttctgtgctggatgctcttcaaggactgaagaattatttttgcatgtttttcttaattccatggccatggaacaagtaaaggcaaccccctggggactggttcagcacataaaagatgacttttctaggacacc

SEQ ID NO: 4828 - DNA, 4210 bp, Homo sapiens
caacggcggcgacggcggcagcgacggatcctcctcctcccttattcccttgctcctctttcttccttttcttttcctttccgggcgggccctcgtccactttccctaacggcggagctcgatcctacgtaaaggcatgacttcctggcaccacagggaaaatcgggtgcaagcccagaaactatttccccaccaccacttgttgaaaaactgatttgaaggcatctccggggttgaacaaacggaaagtgccaggatttgatgcgtctctggtttcgctctggagaccattccctgctaagtatcaagacgaaaaaaactggaaactaatccgaaccatatttatttagagtcagaatggagcgatttgtagtaacagcaccacctgctcgaaaccgttctaagactgctttgtatgtgactcccctggatcgagtcactgagtttggaggtgagctgcatgaagatggaggaaaactcttctgcacttcttgcaatgtggttctgaatcatgttcgcaagtctgccattagtgaccacctcaagtcaaagactcataccaagaggaaggcagaatttgaagagcagaatgtgagaaagaagcagaggcccctaactgcatctcttcagtgcaacagtactgcgcaaacagagaaagtcagtgttatccaggactttgtgaaaatgtgcctggaagccaacatcccacttgagaaggctgatcacccagcagtccgtgctttcctatctcgccatgtgaagaatggaggctccatacctaagtcagaccagctacggagggcatatcttcctgatggatatgagaatgagaatcaactcctcaactcacaagattgttgactaggaggttaccaccattgtgatcaagataaatgtggagtattaaagttatgtgttgattgtgtggttcatttttgtatttatttcatttaaaatcatgtgacgcagaatagttttgcaatgtgtatatagttgcaggcaaaaaaaaaaccacctcactgcaaaacttattgttaattttagtcaccaatggtataaagcaaaacctaggtttagagtgtgctaggatacctgaaacctgatggttatctttaaaattaatggtttttctcctgaaatgtttgtgcatggaagaactgccctgcttttttaccctgttgccatgtatgattattccttgtgagattacttaattacttggattgaagactagcctattgaagctgctgccaggcaacaccacttaacagtaacttaaaggaattattttctttagaggatcctcttcaaaaaggaagggagatagtggaaaactgttcttatatcttcagatccctagcagaaatgactgtttatttcaaactatgttttacttgtatatgatgtagtcaccttaactatctttcaattccatacttcccccgcccccattttaaaggcttattgttgtattttgtagcagcttcaagtgaccaaaagactaaaatctttcaacgtcaatgccaaaagccaaggggaattttgcagtgacaggattttagtctcttactatgaatactaatttcgaaccatagctttcattttaagcatcatcttgaatttctaaacttttttctatgtcttggtgttaaaagatttcaagattggcatttttacttaaacagacattttatggttgagttttctctttattatagagaattagtaatttttttttggctgacagatcagataaaattactttctattcattaatttttctctacaactttatgagtttatttaggtgaatagtctagactagaaacaagtttactttatctgctttgcctctggtggtacaaggtttttaacatggatggtaaacaattgtctagaaattctggcaggttttttgtattggagatctggcagtatcctgcataactttgggtgaggaaattgttctcttaaagatcagccatgttcaggaaatgatctctgtttgaacctcactatcctgtaaggttatccaagtagcttagcccagctaagttctatcagagacccaaattatattttttaaaaatttaacagctggaaacttggactagagctttaataaaaaatcttaaattctttgaaattcaagttaaaaatacttatatatttctattacaaagcagtgacaaatgatgccctgtgtgacttggagttatctttgacttttaccacaaatcttcatttataaaagaaaaagccaaagtgaaaaaaagttagattgtgtatttttcagtaacagctttccatgtcttaagatttttttacagacttaagtttctaattcaggttgtcaaactggccatttgacttcagagatttgttttcattaaaaaataagcctgccgccaaaataaatcacttatcaaaatgtgaactgttttcctcatgttcagttatgttaaagtagtatgataaatgcatgcctagagtagtgctctcgttgatgaagcacatgtatgaggagaccagcagcaaaacataaccatatgtgttttgcgtttacttcctctagaaaagaatttgcaggcaaccatgtttaatttgaactatctaagatggtagattttagaagctaggaataattgagttttatagcactattttcagaatacgaaaagatacacaatcattctgttttttgaaattccatgtgattcaaactgctccctattatttgggtattaatttgcactaatagcaaaatgtaatggcagatcagctttgagagtggtcctaagcagtaaactggatgatgttgcattagaaaaacatcaataattcatatttaagttttagtagttactactgatttgataatcacttaaattttatatatcttaatgtattttttcagactcctaattaattcccacattcactgtaactaggggcatagtccattctgttaggattatatcctctccttagaaatgttttccatcctgttgtggggatttggtattaatgtttcttcattgattatggaacttttgttccctgaagctagttaactgtgtctaaagttaaataaatacagcagaatgattgttttagcctgctcgaactgatacaaatccctgaaaccatgattggcatatgttagataacaaatgaggatgtctaagaggcatatgctgctttggaggtgtagtgaacgtgtgtacagaagttttcaatcttaactatatagtgttagtgtgatgctatactattggaaaaatagcagcttttttctattttataagttgtatgcataaacataagatttgtaatgtttcatttataaactgccttcttcaacacatgttaatagtgttttctcaaagtattgatagtatgtcttccagaatttcacaatatgcttacagtaaatatttcctagcttgttgaaatgttcaattctttgttggctttcttcttgattctgtgggggtgtataacaagcctgaaggacattgtaatcatttcttacaaggtgaaaattaagaaagattgtgtatgagagcctatatagttgttttatccattatcatctttgattaagactttaaaaaaatgctatttccagttaatgcatttggccctattgaattttcagggaccagaaaacattaaaaagttctgcatcttataatggtaaccaattaagcttgagattgttctgaaagtatcaattgctttaaaactgttgtaagtacagttggcaagatctccaagctgaaacttccacgttaaaacttttgcctgtaagaatttgcacatgaatgttaatggaaaacacaaaactaaagatggcccaaaacaaaagccacaaacagttcatcatttggtgcttagtctttgtaagggctctctgtggtttgacttaccccagctaccgttaaatgaggacaaatcaccttaaaacatgttcatttgattcataacaaggaaaattgggtctatgattttttgccaatcttagcctaaaagaaattgctttagcttctggtcagcactgattaaaatgtgaatagtgaagtggctatcctaaactggtttatctccacccacactatcatagatttcttaggtaaatacaattcttatctagtggtattctacttgtattcagaatactgtattaaaattttactatttcattttt

SEQ ID NO: 4829 - DNA, 3049 bp, Homo sapiens
  misc_feature (2643)..(2883): n is a, c, g, or t
gtaagatggcggcggcgttggtggtggcagtggacggggcggctgggcctggaacagtcggagcagccgctagcagaaggatgacccaagacgggaagcgggctgctgagcctcgccgattcccgtgcttgtaactgccccagccggacaccccccctcccttgacctacccgtccttcagtgaatctacagacctattttctcaggagctcagcctggccttacttcagtgataaaaggaggaaaggctggctacagcaaacatcattcaagatgtccagcaaagggagcagcacagatggcagaacagacttagctaatggaagcctgtctagcagtccagaggagatgtctggagctgaagaggggagggagacatcctcaggcattgaagtggaggcctcagacctgagtttgagcttgactggggatgatggtggccccaaccgcaccagcacagaaagtcgaggcacagacacagagagctcaggtgaagataaggactctgacagcatggaggacactggtcattactccattaatgatgaaaatcgagtccatgaccgctcagaggaagaggaagaggaggaagaagaggaggaagaagagcagcctcggcgccgtgtacagcgcaagcgggctaaccgtgaccaggactcatcagatgatgagcgggccctagaggactgggtgtcctcagaaacatcagctctaccccgacctcgctggcaagccctccctgcccttcgggagcgggagctgggttcaagtgcccgctttgtctatgaggcctgtggggcaagagtctttgtgcagcgtttccgcctgcagcatgggcttgagggccatactggttgtgtcaataccctgcactttaaccagcgcggcacctggctggccagtggcagcgatgacctgaaggtggtggtgtgggattgggtacggcggcagccagtactggactttgagagtggccacaaaagtaatgtgttccaggccaagtttcttcctaacagtggtgattctactctggccatgtgtgcccgtgacgggcaggttcgagtagcagaactgtctgccacacagtgttgcaagaatacaaaacgtgtggcccagcacaagggagcgtcccacaagttggcactggaaccagactctccctgtacgttcttatctgcaggtgaagatgcagttgttttcaccattgacctgagacaagaccgcccagcgtcgaaactggtggtgacaaaagagaaagagaagaaagtggggctgtatacgatctatgtgaatcctgccaatacccaccagtttgcagtgggtggacgagatcagtttgtaaggatttatgaccagaggaaaattgatgagaatgagaacaatggagtactcaagaagttctgtcctcatcacctggtgaacagtgagtccaaagcaaacatcacctgtcttgtgtacagccacgacggcacagagctcctggccagttacaatgatgaagacatttacctcttcaactcctctcacagtgatggggcccagtatgttaagagatacaagggccacagaaataatgccacagtaaaaggcgtcaatttctatggccccaagagtgagtttgtggtgagcggtagtgactgtgggcacatcttcctctgggagaaatcatcctgccagattattcagttcatggagggggacaagggaggcgtggtaaactgtcttgagccccaccctcacctgcctgtgctggcaaccagtggcctagaccatgatgtgaagatctgggcacccacagctgaagcttccactgagctgacagggttaaaagatgtgattaagaagaacaagcgggagcgggatgaagatagcttgcaccaaactgacctgtttgatagtcacatgctgtggttccttatgcatcacctgagacagagacgccatcaccggcgctggcgagaacctggggttggggccacagacgcggactctgatgagtctcccagctcctcagacacatcggacgaggaggagggccctgaccgggtgcagtgcatgccatcttgaggcctcatacctaggtggggcaggctggggctgccaacctgatcctgcctgggcaaccctttcctgtcccaggccctacattcagcagaaacgcactttggactttttgctttagataaaagaaagacatccccagcaaccccatcccagaatcctattttcctgggaagtccttaaagcccctaaccatcccacactcttcactttcctttccaccttattcattctctgttagaggcctaattttatatctataaatatattaaaaagcaagtcaaacttggatgtatcaaggtaaaattattgtcaaagtttaaatacctatatattctctgaatgcaataaagggacttaagagtgaacaagagtaatggtgtggaagtgacacctggggtcagtttacctctgtgtatggtcactagagattgggacttaccctttaggttttaggaggcttgagaatggaaggatcctcatttctgcccttcctggttccctgctttggtgtaggggttgggaaaaacaggaaattcctctcagctctgcctcagatctcctacctctccttaagtcttnnnnnnnnnnnnnnnnnnnnnnnnnnnnnnnnnnnnnnnnnnnnnnnnnnnnnnnnnnnnnnnnnnnnnnnnnnnnnnnnnnnnnnnnnnnnnnnnnnnnnnnnnnnnnnnnnnnnnnnnnnnnnnnnnnnnnnnnnnnnnnnnnnnnnnnnnnnnnnnnnnnnnnnnnnnnnnnnnnnnnnnnnnnnnnnnnnnnnnnnnnnnnnnnnnnnnnnnnnnnnnnnnnnnnnnnnnnnnnnnncagctctgagaccagatgttggctgctgtacttactccctgaggtagggaatgtgtggtgatcgagtggtctgtgttcctattgctggtggggtgatagggtgggctaaaaaccatgcactctggaatttgttgtattttctcccagtaaagcttttcttctcccg

SEQ ID NO: 4830 - DNA, 2501 bp, Homo sapiens
tcttcctactccagtaaggttgctcatgtttgtgatgcaggttacgtcgctggatttgtagacttggaggtgagcaacagaccagacctctatgatgtgtttgtgaatctggcagagagtgagattaccattgctccccttgcaaaagaggccatggcaatgggcaaactgcacaaagaaatgggtcagctaattgttcagtctgcagaagatccagagaaatcagagagccacgttatacaggtaactccctcaccttctgacttactgaaagtcctgacccggtgtcgctgggtggtgtgcggcagagctgtgcacataagcagagtggggggctgtggtagaggccagcgggcaggtgcttagagagggtttacagacggccacagtgatgatggacaagcaggtgcaggctggcctgatctagttagttactgggctcgagggcaggtatacacaggggctggtgctgacaccgaccgctggcaatgagaaatgtaactaccaagtggtctggaaggcttttctgggccagccagtgcattctttcttcctaggagaatttccctggaggaacaaattataaaggggaggttgttgctgagcatggggaactagattgtcaaaattttgctttgcttgtctccaggacaacagaaatcatgcagtcagactcctgtcccacttagtgactgttgccacatgccgcagagccagctccttgctggtgtctacctggcatgctgaccagcgtccatgtggcccagtgggcacctgctctgcccttgccaaactgggatggcaaatgggttttatttcttgtgctttccacgtggtggcctgcagcccgcccagctccttgcatttggcctgttcccagctccttgctcctctcctgaaggatacacttccagcgttgccttatctagatgcctgactcataacctggggctggagggcccagaaggactgtctcccatctgcacctgtcctacctgggggtacgggggcacctctgatatgcaggctttactcattcggcccaacctgatgccttcttcatttatccattcatttactcagtgtttcttgagctctgtttgttaggcattgcactggcagtggggatgcagtggtgagcaaatccctgccctcatggagtctgtaatttagtggagtagatgcacagaaaataataaatgacaagataattacagcccatgttaggtgctgtgacagaaggggttgaggtggagaatattgggggatgggtaggccagatctctaaggaggtgacatgtcagcggaaagatgagaggggccatttctctgcagtgctggtggcctggccagctgtgagcaggaagagtgggctgatcttgccctgaggacctgaacactggagactctggggccgcttctttcctaccatgggaatcctcactgcccacctacccccaacattagagtaaagacatattcttacaatatcagcaacatatgtgaatctgagttttgcattactgtgttgttcacagactaaaagtgctacctagatgacttagtatgacgtatgagaccttggggagggcaagtgaaagtgctgggaatgctgtaagggttcaaaaatacatgaatgaattaatgatgtcagcaaacaaggaagaagacgtgacttttttttcccttttttgagtttcactgtcgcccagggtggagtgcagtggtgcaatcttggctcactgcaacctccaccacgtgggttcaaacgattctcctgcctcagcctcccacgtagcaggcactgggattacaggggcctgccaccacacctgactaatcttgcatttttagtagagatggggtttcaccacgctgaccaggctgatcttgaactcctgacctcaagtgctccgcctacctcagcctcccagagtgctggggattacaggcatgagccaccacgcctggccagaagacatgattttaatgagtgctttagtgagtcctcagccacccaaaaggaataaagcctgcgtggcaggtgccgggttacttatcccaggcagaagaggacttttgggaagagattccttcaaaaaaacaatagcagcatttctcaaaaagttaaacatcaagttaccatatgatttagcaatgctgtttctgggtatatacccaaaataattgaaagcagggactcggccaggcccggtggctcatgcatgtaatcccagcactttgggaggccgaggcgggcggatcacctgaggtcaggagttcaagaccagcctggccaacatggtgaaacccatctctactaaaaatacaaaaattagccgggtgtggtggtgggcgcctgttaatcccagcgacttgggaagccgaggcaggagaatcgcttcaacccgggaggcgggggttgcagcgagccgagattgtgccattgcactccagcctgggcaacaagagcaaaactgtctcaaaaaaaaaaaaaaaaa

SEQ ID NO: 4831 - DNA, 2263 bp, Homo sapiens
agcttgtgcagtgcgtggcattgtagtatcctggatttcttctcccgtcacagtgcaagagaagtgaggactcggagctactgccagccgcctcctctgcttcctgccccttcatgcagcactatgctcactcttgcatgtatgcacatccaagtatttgcacacacacacacacacacacacacaggtctgtgtgtacatgcacacactcataggcaaagacttcttttcttcatgacagtttaacatggagttgcctccctccatttctggtgaggagcaggcaggcgtgccttccacacacagcttgctgctcacagtggcagcagaagcccgcaggagggaacctcattccctatgtggctgcaggttcactgctgtggtcctcttcagcctctagtcgcttgctgctagtggccctgctagagaaccggggtttcatgcacacttgcagtcagctgtacaggcctcgatgtgtggcagcctatggatgtctatctgaacaagaatgtacctgaaacatgggagcccagttaaaatgatggagagttatattgcagttctcacaaaggggatatgccagagtgaagaaaacggctctttccttagtaaggattttgatgcccgaaaggcctacctggctggctccatcaaagacattgtatctcagtttggaatggaaactgttatcttacacacagcactgatgctaaagaaaagaattgtggtgtatcaccccaagatagaagcggtccaggagttcaccaggactctgcctgccctggtgtggcaccgacaggactggaccatccttcactcttacgtgcacctcaacgccgatgagctggaagccctgcagatgtgcacaggttacgtcgctggatttgtagacttggaggtgagcaacagaccagacctctatgatgtgtttgtgaatctggcagagagtgagattaccattgctccccttgcaaaagaggccatggcaatgggcaaactgcacaaagaaatgggtcagctaattgttcagtctgcagaagatccagagaaatcagagagccacgttatacaggatattgctctaaaaacaagagaaatctttaccaacctagcaccgttttcagaagtttcggctgatggagaaaagagagtccttaatttggaggcgctaaagcaaaaacgatttccaccagcaacagaaaacttcctttatcatctagcagcagccgaacaaatgctgaaaatctgactgtgtgacagaacgtatcactgatgactgatagaaagccctctttcactctgattacccactcactacatgaagtcctgaaaataacagagaaactgttatatctttttaatgatttatttgcaagtattgagatttgacctgaaaaacaatgaaacacatgaacacacttccgattttctcctcgctgattagcttcctgcctgctgtcagtgctggacgaagtgctataactactttatgtaacattacagaacagctagaggtcctggggtaagagaaaaaaagcacatcacaacaaatgtgaaagccttcattattacacgttccagtttgtctcgctgtgtaggcataagctaatggtttattttcagaaagctgcctgaaacgttgctttgtattcttctaggaagaactttaattcctcctgaggaactctactttctgagccaaactgctaattttctgcggaactgtctagaagatcattcaagagaccctgcagttgcactttctcgtaaaagttaaaaaaaaaaaaaaaaaaaaaaggtttttcccggcctttgaacattttgcctatgagagttttgcatatattttatacttgagtagacaactttaataatccatatttatactatcgcagaagtaagcatttggcaaacgttcagccattagcactcatttaaccctgttagcaatattcttttgaaaaaagtgccagtccttatgtgataaactaagaagcccattgaatataaaagtgtgtaggactgaaacagtgaccttatattattgctaagggaatatgagattaacttcctacaggggccaaaaccagagaaaggcttccagcaacttcgatgaaagtagtttggccacatgtcaagccaattgtttgtactatttatgtacctttttcataactggaattgccaaataagcatggagatctaaatgatgtacttgttagtgtattcattcatattgactgtaaaggattatttttcactc

SEQ ID NO: 4832 - DNA, 6039 bp, Homo sapiens
gaatattatgaatagaaaatgtattttttgtttgttttgcaaggaaggatataaagaaagagtaattttatatgtggaggaatcctgtatagtaaattccctatcctagagtaaaataactttaagaaagaggtagtatagaacatgtcaggaaattcagctatgttgtagatggtctgtgtaagtcatctgcacagtgcatgagtgtggaggtgggcgggcactcattggcccttgaactccttttgagcagtatggaagccaagaactagaagccaggaaatggggttgtaaaactgatttgtctatggattttatgtgttgagctgctgtggtcttggcttgtagtaattacctatatgaaccttcccccctcccctttagaatttaggacaggttcaaaaggccctccaatataaaaataaaatactgtccttccccacaaaggaaaaaatagctccccggttcaaccaggagacttagtcttgctaaaaccttaaagacagggtaaagacagggataccccaagaatcaattacaatgaaatggaaggggccttatcaggtattgttaagtacccccactgctgttaaacttcagggaacacctacttgggcacacagatccaggactaaacctgtttcttatgagtcacaggcacaaaggaagggcactacaaccacaaccaatatcagtaaagctttggaagacctctgctacctatttaaaataatcaacactcagccagaagaggtaatgtaatgctgtagatgggaataggagcattgatcttgctcttcttcctgactgtagtacttcctttctatggctttaaccagccacctcctcctgggaaacatctcctgtgggcttgttgggtatagaagctactctaagacccaaccagataccatgatgccactgttaattctgtttgctcttctaattaacctaagctagtgtgtatgtggacagggagggtggacaaaattctacagtaaatatttcaaaaattatagcatcatagaatcatctttatggctgccagatttgtcatcaacacccccaggatagacagtttcatcttccgacctatctggaaaatctcaggaccatgtccccagacctcctaactaaccatagcaccccaaaatacccaaacccctattgtgaagtggaactcttccccacttagtggatcccccctggaccctgctgtccccctgccctgaccactattatcggaatctgggaagttgggcatctatatctccagtgcactcataactctaacatttgcatccactcttgcattaatgacacaaaagtggaagcttccctgcgatgctctggtccaactctagttgccaagtttccaagaccacggggaggtaaatgagattccatttgtgagtgaaaagaccatatatggtaccttctcccggatgggaacatacaaaggaaaaacaactgcctgatctgggaaggtgacagtactaccttcttctagaaaacaaagattgttcaaccaccaccatgagaacaggtggaaaatatctctatagacccaacctggcaatgaagtataaacatcgcaccccgcagggcttctcttggtgccctagttgggttcatttttgtttgtgactatgaatgggaagaagtcacaccctgtaaccactccaactccctaaggagtcacctcttctttaaggaatagctttcccttgtatctaaaaaacttggaactgacatgaatgaacgttggccactcttacccctccaggggtcacaatctataacgcctaggacccaagaatatcagaaataagtaagcaataaaactaattctggcaggaatcagggtggcaataggactagcagcaccctggggtggctttgcctaccatgagttaacgctaaagaacttggctcaaatcctagaatccttagccaccaacggagatcaggcattaaagagaattcaagagttccccagactctggaaaatgtagttgttgataacagactagcattggattatttactagctgaacaaggtggggtcttgtgcagttattaataaaacctgctgcacatatattaactctggacaggttgaggttaacattcaaaagatctatgagcaagctacctagttacatagatataaccagggcactgcccccaactatatctggtcaaccatcaaaagtgccttcccaagtctcacctgtttttcacctcttctaggacctttgacaactgtcttgttacaaatgtttggtccttgcttctttaacctcttagtaaagtttgtgtattctagattaccacagttccagagacaatgctggcacaaggcttccagcccatcctgtccactgacacggagaatgaaatcgtcctgcctctgggctccttagatcaggtatccagagatttttactcctccagtgccaggcagggcctacgtccataaactcagcaggaagtagttacggaaaacagatctccgcccttctgcagcccccttaagattaaggaggagtatctaatctctgaagggggaatgaggtaggaggtgggactcaactctggaagtggggctcaggcactcagaccaaactgagcactagctaaaataggtccagggcagatgctagtttccataggacacaccgacctgtgtcaagtcagttcaccatggctctggcagcacccagaagttaccaccctcaccctggaaatgtctgcataaactgccccttcatttgcatataattaaaagtggatacaaataccactgcagaactgcctctgagctgctactgtgggcgcacagcctgtagggcagccctgctttgcaaggagcagcgcctctgctgctgctgtgcacagccggccgcttcaataaaagttgctaacaccactggcttgcccttgagttccttcctgggcaaagctaagaaccctcccgggctatgcttcaatcttagggctcgcctgtcctgcatcactgggatcatctcccagtaaactagccacacttacatccatgtgtcagggacatttctggagaaagcagcccaggacactgttgaataaaacacacaatagtctctgtggtcttctccaccccaccccacaccaggcaccctcagcttgattctcctttttaattgcctgtaagcagggaagcacaatgttttcacattctttgtaaggcctttgttctactaaaatctaacctcagagcacaattttaaactagatgaaagagttgctgcgcctgaagcactgcaaacacctcctcaccacacatgtgcactcaccctggacaccctcactcaccctgacaccctcactcctcaccctggacaccctcactcaccccagacaccgtcactcctcaccctggacacctcactctgcaccctggacaccctcactcaccctggacacgttcactcaccctgacaccctcactcaccctggacaccctcactcaccctggataccctcactcctcaccctggacaccctcactcaccctggataccctcactcctcaccctggacactctcactcaccctgacaccctcaatcctcaccctggactccctcactcctcaccctggactccctcactcctcaccctggacaccctcactcctcatcctggacaccctcactcaacctggacaccctcactcctcaccctgacaccctcactcctcaccctggacaccctcactcctcaccctgacaccctcactcctcaccctggcaccctcagtcaccctgacaccctcactcctcaccctgacaccctcaagtcttcacctccctggctgcagcctgggacacgctttccctaacttctgaaggctcagtcctcctcaagccaatctcatctcaaattgcacctcctcagagaggtcttccataaccgcccttataaagcaggattctttcaccaataccccttcccacatggcactgtctcacagcactcctctaaaagtctgtttacttccttgacaatctgtcttccttataaggggaggttctgtaaaagccaagactctctctgtctagttgactgttgcataccagggcttagaccaaggccctgacatgcagtaggtgcttaatatgttttgaggcaaggtcttgctctgttgcacatgctggagtgcagtggcacaatcgtaattcattgcagccttgaactcctgagctcaagtgatcctcctgcctcagcctcctgagtagctgggactacaggcatgcaccaccaagcttggctaatttaaaaaaaaaattatatagatagggacttgctatgttgcctaggctgatcttgaactcctaacctcaagcaatcctcccacctcggccttccaaagtgctgggattatagccatggagccgccacacccagccaatgtgccgaagaaagaaagaaaaacatgctcatcctttgagtcaggttcaaattttttctcctctttaacccccagtcactccagttataagtgatttttaactcttctcacactttaatgcatctggcaagaagatccacgtggtgttaggaacaatacaggaccttaaggatgggggaatcagcaggtgtcagcgtgccctgtatgctcagggcagctgtttccactggacattctccctttgcctctctgggcagcaactcctaggccagccgacctgctgtgtcgagtaaccaggatttctcaatcttggcatggttgccattttggaccagatcgttctttgttgtgggggctgccctgtacggcaaagaatgccgagcagcacttccagtctccacccacaggacgccagtagcaccctctaagttgtgagaactcaaaatgtccccagaggatgccagatgtcccctggggtggggacacaatcaccccaggttgagatccatggagccaggtctgtttgccaccaaggggtaaagctccattcccaccttaggagggctaggaggcagcatcgtggggccacagaaggcctgggtttgcagtcagaggacaggatgcacattccttcaagatacagacccagattgttgggcatctagttcttgggttttctgttgttgctgttccgttttgtctgtcttccctcctttgtttactagcagcctggaatttgccactttttctaaacgaagatttatggaacacttaccacacggctgacgctgcgcgaggctaaggttctaatacaccgcagctcacttaactctcgcaataccataaacgcacactgtttcatcttgaccctttcttgggaaggtgacagagaggtaggagggcaaacatcttgtgtgccccgtcccaagggtattactggtggaataatatccgccccccaccccagtttctaatttgctgtaggctgtgacgctgtggggcaagactaggagtcctgttgaaattaggaataagtgtgctgtgagggaagggctgccttattttagagcacagattttctgaatatctattttgacaggttcgatcctctccccttcctgccttccttctgtcgattttcaatgtcttgatggtgtcccacctgagtggcctttagagatgtgagttgtgaggcactggggaggcaggcacacgtcctccagcccaagactgcctaatttaacagggatttctgcattctggaacaagcctccattttccccaagcaggattactccagagggcaaaacacagcccaatagtatcacatttcctttctgctttagcaaaaataaccactgtctcattcatgggaaaaggccgccaaacaaatttgttactggaaccatttgtaacaacttctagtttgcactgccttggagcaagcacactttgtagaggagggatttgcagttacttgggcaacaaggtaaccactgatcattacaggaagcttcagaaaccgtgggaccagtgtagaagaatggactatctgtccaaactaagaataaaaagaatgacacttgt

SEQ ID NO: 4833 - DNA, 6015 bp, Homo sapiens
agctctgctcatgtgctttgcctgctttcccatggcaggctttttattggttaaataaagacacaaacttttcatcagtctttgcaaatacttggttccggcaagttcttggcccttcccaggcttggggctgccggctcacggttcttctctctgcatttcagccaggcccccatatgctgggtttgcaggtcacgaccacccatgacggctgtgctgcgtggggtgcagttccccgtgggcgccgagggtggtgtggggctgcctctcgctcgctccaccagccacccgagggcccgtgtcctggtcgtggccgcgtgtgctctgctgtgtgggtggtcagtcctccccaggggccacctggatggtgtccactcctgccccatggcaggaagtcccagcggcacctggccacgtccctctaacatgtttctggaagtgggattctaggctggagcctcatagcgggcagatactgccccctggccatgagccatgacagttggttgatgggacttgaaggggcctctggacagtgtggctgcagccctggaccctaggagaatagcagccgtgatggggggcagggaccccactttctgggtgggagtgaggagggccggctgctgccccttgctgcagtcatcttcagtcactttcccggccgccacggccccctcctggcttcttgctctcagcagaggggacaagacccttgtgagggtgggcacaggcactccaattgtttggggccttcgctgtcccttgctgtctgtgctggtctttccaggcatccccaggccgtgtgtgtcagcaggtggaggctgggcacctctcacccacccaagctgaagcggcctcacagggggtggcaccaggtgtttctccagctgaacaagctcgccctggaacccccaccctgaaagggctactgcccccatgagaggagcttctagagatggtggccagccttgggggcccggtggagatgtgttcgcggggtcctggtctgattctgtcttggaaggaacatcgggcccctgagaggtcagagcagtggccggcccacggctccgctcaggcgccacggcggctcctttctgtttcttgtagtcactgagttcgaggttcccacagggaggaggcttcctgtggctccgccgtcagggagcagtggggctgccccagcctctgggggctttttaggtgctctgaggcgatctgggtgtggcctggccggtgtgggcagctttgcccttcgtctgagaccccgagccctggggcaggatgaggggtgtggggagagtttgctttttccagagacgtttatctgttttttttttagacggagtctcgctctgtcgcccaggctggagtgcagtggcgcgatctcggctcactgcaagctccgctcccgggttcacgccattctcctgcctcagcctcccaagtagctgggactacaggcgtgtgccatcacactcggctaattttttgtatttttagtagagacggggtttcaccgtgttagccaggatgctctcgatctcctgaccttgtgatccacccacctcggcctcccaaggtgctgggattacaggctgagccaccgcactggccagcgtttatctttaaatgtgccttggacctggcccctggctctttgggagggagagtccttggcaggccccgttgcctccaccccaccagtgcaccttggctcctggtcactgcccaccctccctgcccgggcaggaattcttacaggccctacactcctgaagggaaatcaggctggtcctggggcaggcagcctctcagagctgttgagaattgagcaatctccttgtgctctttcaagctgttcttttctttggttcacactgagcaagggctggttgctccgatagggagaagacgtgaggagtggcatttactgtgattgagcacagggcctgtggactctcccattcacgcagccacatttcccaaaaagaagtggtcctgctccccaccccccgacccccactgcagcgccacctgcctttatctgtacttggagggacagcgcagcaggctgtggctggctaccccaggtggctccacccagctctcagaagttcacctgctgcactcagaggccgtttacttgaggtttgatatttatctccaaaggaagggctgccccgactggcctggaccctccagggagttcagcaagccggaaatgcgtgtctgctgctctcctggcccctgggccacctgcttctgtggccctgggattggggagccagggctgagggcctgtagggccccctgtctgtgcctctagaggccctgagccacctcctgcagtgttttagatcccataagcaagagacagaattgtgcatggatggtgagaaaacatgaagctttttatttgtaaacagaaaatggcagggctcactgtgtggggctggggacagcgctaggcctgctttaggccgtgcaccccaacctggggtgttccaccaagaggggtacagtggcctccactgtgagtatgtggccatcctctggctcctgattgctgagttcctgattgctgtctttgcgtaacttaggaaccccgatgaagagcccgtgctcatagctccgttcctgacatgttcaggaacgcctctgttgaggtttttctctttggttctggaattcctgggtccctttgacccctgatgcgtttgttttgggtgttgatgagcactggagctgcttccccacagggatggggcattggggagattccgacacagcagggccctcacccaggaggctgctgtgggtgctggagcggttgcttccatggagctgggattcctctcatttggggctgtaggaaggggtctttcctctctgtgctaacagttgtttgtttaaaaagaaaggctgtttaaacctttcaaacttaaaacttctttttttctttggagatggagtctcaccctgtctcctcccaggttcaagtgattgtcatgcctcagcctcctgaatagctgagattacaggcacatgctaccatgcccagctaatttttgtagttttagtagagacggtgatatggtttggctgtgtccccacccaaatctcaacttgaattgtatctccaagaatttccatgtgttgtgggagggacccaggggaggcaattgaatcatcgggctggtcttttctgtgctattctcgtgatagtgagtaagtctcatgcgatctgataggtttattaggggtttctgcttttgcttcctcctcattttttctcttgccgctgccatgtaaaaagtgcctttcaccacccgccatgattctgaggcttccccagccatgtggaactgtaagtccaattaaacctctttttgttcccagtttcgggtatatcttcttcagcagcgtgaaaatggagtgcacacacacgtcagcactgtgggcgcacacacctgcactcacacattcatcaggacccatgggcacacgtgcacacacacgtcagtcctgtgggtgcacacacctgcactcacacattcatcaggacccatgggcacacgtgcacacacgtcagcaccgtgagcgcacacacctgcactcacgcacacacctgcactcacgcactcaggaccgacggacatacgtgcacacacacatcagcaccgtgggcgcacacacctgcactcaacgcactcgtcaggacccacgggcagatgtacacacatgcaccagcacccgtggacacgtgcacgcacacatcagcacccatgggcatacatggatgcacacatcagtaccatgggcacacacacatgcacccactcccgatggcttcggcttgctgggtgcctgcttcgccctcgggtgagcaagtctggaggcaggcacttggggtggggccacagtatggttcttaggagcccagtgtcccctggacccacttgctcccagccttgggtcccaaagtgctgctcccactggtctctgtgccccacccatcatgggcagggctgtctgaacagggcagagtcacgagtgatgcaagggtggggtgtggaggccttgcctagaggcagcagccagctctggcttggctgggccttaccttcactgtcctgctgtgagacgcaggagccctgggggaggacggcagtctgtatcagggcagtggtgaaactgcagattcctaaatgtgatctggagacgactcttgctggagaaatctacccaggtcccttgggtctgtccctcccttcaccctccacagtcagggacaggctgcgtggtgtgcctccccatctgtgcgtggcctcagcgcagcaggcctgtcctgcccattgctaaaggtagagcccggcagattcattgtgtggtgagggcttccccagacccaccaactcctgtgtcttcccatggtgagaagggtggggtctctctggggcctttttttttttaggaagtcactgatgccactcaggtgggtgcccagctccccacctgatctctggagtggccccttctgctggaggctgccccaggctggatgccgtggcctgcagaccccccttcttgcagtccctgggcaggcagcacccatgcgcacacgtgcacacaggccgtgagcactgccctgtgagccaggtggtggtggggggtgttggggctaaggtttggttagggcccgagtgcttgcgcacccccccatccaatttcccatggtgctgggatgctgccgcctcctggaccctggcgttgaagtgccaccttcatctccctccccagacagtaagctccagacaagggcaggctgtggccgtcactctggccagctgctcgggggcttggtggctgctgggtggtcgcctggactctgccctcctgtctcctggtgtcccggaggggccttgctgggctgggccctccaccgccccattgggcgcctgactctcagggcgcagtcagttctttggggatggccctgatctctgagcgggactgcctctggcctttcttctgcatcccctacggaacagcagcctgctagacgccctgaggaggcaggctgaggggtggaaggggcgtggccgtgcccagcagagaccaccctctgatgacggtgggcgtcctttccagcccctctcggggcatcgcttcatcccttcccccatttccttcctggccctgctctccaagtcttgtgtgtgtggtggggcctggcttccctcccggcctctcgcctgttcccgcccatccctctctggttctctcaggcctcctctgggcttgccaggaatgtaggggaattagggggagggggacacaggaaatgcctcccctcctctgacaacagctccagctgcagggggaggggggaggggagagcagagtgggtgagacgagggagggctgaaggggggagtcggcttggggggagagtgttctcctgcccacccaggcactgggcgtggcccagccccacagacagaacagttctttcttccttattttattttttattagagacagggtctcactctgtcgcccaggctggagtgcagtcgtgtgattggcctcaagcgattctcccacctcagccttccaaagcactgggattacagcagtgagccagtgtgcccagcctcttcctaagtttacaccagtgtgggcatccagtgaggggaactggcctgtgatgcggtggtccttgtgacatgtcaggcagttttagagtagggtttgttaaaacatgggttaaattgggccccacccccagccctccactcctcagccattcaggagaagcgcgaggcatgggtgcgcgaaaattctgagtctgccttccacctgaaccccctctggaaggtctgaccacgggctgggtgtggtggctcatgcctgtaatcccagcacttttgggaggccgaggcgggtggctaatgaggtcaggagttaaagattagcctggctgatatggtgaaaccacgtatctac

SEQ ID NO: 4834 - DNA, 1402 bp, Homo sapiens
ccgtgccccgccgtcctccttcccgcggccgtgagggagaccgcggctcggccgtagcggagctgcgagttacagaatgtctgaaggggacagtgtgggagaatccgtccatgggaaaccttcggtggtgtacagatttttcacaagacttggacagatttatcagtcctggctagacaagtccacaccctacacggctgtgcgatgggtcgtgacactgggcctgagctttgtctacatgattcgagtttacctgctgcagggttggtacattgtgacctatgccttggggatctaccatctaaatcttttcatagcttttctttctcccaaagtggatccttccttaatggaagactcagatgacggtccttcgctacccaccaaacagaacgaggaattccgccccttcattcgaaggctcccagagtttaaattttgggatgcttctgtttgcggggacggtcggtgcagctgcaaggctggaggcggccggcaggtgcccggtgctggctgcagatgcggcgctaaccttctctccccacttgaaggcatgcggctaccaagggcatccttgtggctatggtctgtactttcttcgacgctttcaacgtcccggtgttctggccgattctggtgatgtacttcatcatgctcttctgtatcacgatgaagaggcaaatcaagcacatgattaagtaccggtacatcccgttcacacatgggaagagaaggtacagaggcaaggaggatgccggcaaggccttcgccagctagaagcgggactgaggctgcctcacgtgttgcaagaacagttttgagccattgttaacaatgccttttttcttcacataaagtagttgattacgagggagtcaaattttctttttaaaaaggagcttcaatgatttgtaactgaaatatcaggttctagaagaaactggcgcttaaaccaaatcgcatggatttctttttcagtgacgttcaagtgtttctcacggatggaattctagtcagctgcaggcgggaagccaggcgggtggagcccatgggagcaagggcgagtggccggtccccgctgtgccaggtgggcaggcaggagcaaggcctgcgagggaggaacgggccgctccccgccagccgccttccccagcagccgcaggtggtgccagccactccacagagcccgagggatgatctagcctgattcctgcgtgtccgaaagaacttaacgttttaaaggtgattgtcaagtaactgtgtggggttctaatgccagtttcctaattccatctcactggagatgtttaaagttggcctctatcctaatgactcaaaacttggttcttaactaccatgattgcttttgagggcccggaattataaatatatattatatttt

SEQ ID NO: 4835 - DNA, 4185 bp, Homo sapiens
ggcaggaggcagtggcgttggtgggaagcgcagctcgaaaagcgatgccgattctggtttcctggggctgcggcccacttcggtggacccagcgctgaggcggcggcggcgaggcccaagaaataagaagcggggctggcggcggcttgctcaggagccgctggggctggaggttgaccagttcctggaagacgtgcggctacaggagcgcacgagcggtggcttgttgtcagaggccccaaatgaaaaactcttcttcgtggacactggctccaaggaaaaagggctgacaaagaagagaaccaaagtccagaagaagtcactgcttctcaagaaaccccttcgggttgacctcatcctcgagaacacatccaaagtccctgcccccaaagacgtcctcgcccaccaggtccccaacgccaagaagctcaggcggaaggagcagctatgggagaagctggccaagcagggcgagctgccccgggaggtgcgcagggcccaggcccggctcctcaacccttctgcaacaagggccaagcccgggccccaggacaccgtagagcggcccttctacgacctctgggcctcagacaaccccctggacaggccgttggttggccaggatgagtttttcctggagcagaccaagaagaaaggagtgaagcggccagcacgcctgcacaccaagccgtcccaggcacccgccgtggaggtggcgcctgccggagcttcctacaatccatcctttgaagaccaccaggtacactgccccgtccaggcctccctcctcagtgggctctgcctcttggtcaggccttcactagcttcctccctgtgctgggaactccaatgacccagacagccctgggcctgtccgcaacggggctcacggtccagtgcaagagacctgttcccagacagtgatgggcagagtggttggggctgggagcccagacggggcacctggcccagcctggggggtcaggaagggctcccgggaggaggggtcgcctgagccgaggcagaggctgagggaggggtttgcagtgggaggaggggagtgggttttccaggtggtgggaacagcactgcaaaggcacagagttgagagagaccgtggcgccttccaggaagcctgtggggcagagatgaaaaaggctgtggtgacacggtggcacactggcagccaagtgacagttatatatgggcgaggctagctcagcgatgggaaagtctagctggagccactgtgcatttagcgggcatctgttgagcacagatgctgtggacaaaggggacaaaaacccctcccttggccgggtgcggtgcctcacacctgtaatcccagcactttgggaggctgaggcgggcagatcattggaggtcaggagttggagaccagcctgaccaacatggtgaaaccctgtctctactaaatacagaaaattagcagggcatggcagcacgcatctgtggtcccaactgcttgggaggctgaggtgggaggattgcttgagcccaggaggtccaggctgcagtgagctatgatcgcaccacggcactgcagcctgtgtaacagagcgagactcaaaaaacaagcacaaccctccctcaaggaacagcccttctcatggggtcacgtgactggagagatgctgagatgtttgcggtagatgcaggaccgcttgtccgaatcgttttcagcattcataagaaggagatagctagccaggaacagaggcagcttcctcatctggtagagaaaagtgtctgcggaaaaaagcaacagtgtgctcatggttgaaagcgtgagggtgccgctcactgccatctgttcctggaccagatgtgggagggggcgtggagatcagacattcacttttagatttgtacagaactacttcgtagagataaaattcacttaaccatacggtcagcctagttagagtatgtgattcagtggcttttagtgaccattgtgtaaccatccccgcagtcaattttagaacattttcactgtccgtaaaggaaacctcacacatgtcagccatcacccccgcaattccctgtctcgtgtggtcttgggctgccaggcttcctgtctcagggaccagcccaccctgaccaattcacatagatgaaactgtgggccgggcatggtggctcacacctgtaatcccagcactttgggaggccgaggtaggtggaccacctgaggtcaggagttcaagaccagcctgaccaacatggagaaaccccatctctactaaagttacagaattagccgggtatggtggcacatgcctgtaatagtagctactcgggaggctgaggcaggagaatcgcttgaacccaggaggcgggggttgtggtgagctgagatcacaccattgcactccagtctgggcaacaagacagaaactctatctcaaaaaaaaaatgtgaagcgtgcaggtcagactgccttcacagacgtgcagagcaggtgtgagggcgagggtttgaggtgccctctggctctgtgcagggtgggtgtgctggtagacggggtgtggggaggaaagcctgggccggggcgggatccacgggcactggatgagggacagatgggaggtaagagggtctagtctcagtgtcccaggaggggttcagggacccatcctcactcccgcccctcagaccctgctctcagcggcccacgaggtggagttgcagcggcagaaggaggcggagaagctggagcggcagctggccctgcccgccacggagcaggccgccacccaggtgagccccgcacctgcccactccctcccctccccgggcctcctacccacccctgacactgcaccccgcctccccaggagtccacattccaggagctgtgcgaggggctgctggaggagtcggatggtgagggggagccaggccagggcgaggggccggaggctggggatgccgaggtctgtcccacgcccgcccgcctggccaccacagagaagaagacggagcagcagcggcggcgggagaaggctgtgcacaggctgcgggtacagcaggccgcgttgcgggccgcccggctccggcaccaggagctgttccggctgcgcgggatcaaggcccaggtggccctgaggctggcggagctggcgcggcggcagaggcggcggcaggcgcggcgggaggctgaggctgacaagccccgaaggctggggcggctcaagtaccaggcacctgacatcgacgtgcagctgagctcggagctgacagactcgctcaggaccctgaaggtgctcactgtgtcctgccgtggagccccgtgcccagtgatgacaccatccttgctccccgtgccccccaggggctatgggcgacaccatggctgcccctgggctgggccagtggggccaatgcccaggggctgagggcacgggatgctgggatgagatcccagggtgaggggccaggctaaggtttgagtccgggaccctaagaaggcctttccttccagctggtccctgttgcagtcccggtcacctttaggactagagggaccttcctgaagctcagaaccaaccctgtccctcccctgctcggaacctgctgtggctccccagtgcccctgaggaagcccagctcctctgtcagccacacgcctgggccgacccggccgtggggctccagccagttgtgctcatgagcggactgtgccttctccctctgatccagcctttgccctcgctgtccccttttctgtgtcgtcaccagcccacttcccgtgactcctctaagcccagcttagagatggccataggttggtggctgtcatcccaacactgagccccagcagctgagggccaggctgagtccctggtgcccacaggctgccctggggggagactgcatggggctgagccctgccaggaccccgaggagaggtccaggcccttgggcttctgccaggccctgctgaggcctccctctctgtcctgtagcccgagggcaacatccttcgagaccggttcaagagcttccagaggaggaatatgatcgagcctcgagagagagccaagttcaaacgcaagtacaaggtgaagctggtggagaagcgggcgttccgtgagatccagttgtagctgccatcagatgccggagactcgcccttcaataaaaaatctcttctagctg

SEQ ID NO: 4836 - DNA, 2670 bp, Homo sapiens
  misc_feature (41)..(182): n is a, c, g, or t
acacacacacacttacacacacacacactcacacacacacnnnnnnnnnnnnnnnnnnnnnnnnnnnnnnnnnnnnnnnnnnnnnnnnnnnnnnnnnnnnnnnnnnnnnnnnnnnnnnnnnnnnnnnnnnnnnnnnnnnnnnnnnnnnnnnnnnnnnnnnnnnnnnnnnnnnnnnnnnnnnngccccccatggacgcccccagcacggggcgctgagacccccgcgtcgctgcccagcccggtccggcgcgccacgccgagggatctctggacaggacaagactccgaagctactcccccagcacacagcccgggacccacaaacccagcttgcccccagccctcccacctgccactccctggcccctcccaccgcccgccccccttggggcgcagggcatggtgtgaaaggccaagtgctgaggcgggtatcatgggtgctgtgccctagggcctgggtggcagggggtgggtggcctgtgggtgtgccgggggggccagtgtgcccaccccagtctcttggcgtgctggagggcatcctggatggaattgaagtgaatggaacagaagccaagcaaggtggagtgtgggtcagacccagaggagaacagtgccaggtcaccagatggaaagcgaaaaagaaagaacggccaatgttccctgaaaaccagcatgtcagggtatatccctagttacctggacaaagacgagcagtgtgtcgtgtgtggggacaaggcaactggttatcactaccgctgtatcacttgtgagggctgcaagggcttctttcgccgcacaatccagaagaacctccatcccacctattcctgcaaatatgacagctgctgtgtcattgacaagatcacccgcaatcagtgccagctgtgccgcttcaagaagtgcatcgccgtgggcatggccatggacttggttctagatgactcgaagcgggtggccaagcgtaagctgattgagcagaaccgggagcggcggcggaaggaggagatgatccgatcactgcagcagcgaccagagcccactcctgaagagtgggatctgatccacattgccacagaggcccatcgcagcaccaatgcccagggcagccattggaaacagaggcggaaattcctgcccgatgacattggccagtcacccattgtctccatgccggacggagacaaggtggacctggaagccttcagcgagtttaccaagatcatcaccccggccatcacccgtgtggtggactttgccaaaaaactgcccatgttctccgagctgccttgcgaagaccagatcatcctcctgaaggggtgctgcatggagatcatgtccctgcgggcggctgtccgctacgaccctgagagcgacaccctgacgctgagtggggagatggctgtcaagcgggagcagctcaagaatggcggcctgggcgtagtctccgacgccatctttgaactgggcaagtcactctctgcctttaacctggatgacacggaagtggctctgctgcaggctgtgctgctaatgtcaacagaccgctcgggcctgctgtgtgtggacaagatcgagaagagtcaggaggcgtacctgctggcgttcgagcactacgtcaaccaccgcaaacacaacattccgcacttctggcccaagctgctgatgaaggtgactgacctccgcatgatcggggcctgccacgccagccgcttcctccacatgaaagtcgagtgccccaccgaactcttccccccactcttcctcgaggtctttgaggatcaggaagtctaaagcctcaggcggccagagggtgtgcggagctggtggggaggagcctggagagaaggggcagagctgggggctgagggagacccccccacaccccttctctccttcctctcgtccttggatagattcagctcccacacacacacccgcactgcccaggtccctcctcagacctccagccctgggacagggcaaacaactgaacttgctatggaaaggacagtgtgggaggctgggggagctgtgtcctgcagttcccaggaccccatcctctcagaaggtaggggaagggcgggaggattgagaagggacaagccaccttgaccgtaggggaaggaggaatgtgggctgggggaagatgccctcaactcaccccctacacacacatgagagagagcccccacccagttccttggcctaggtctcccctccaggctgagggcctctctacttccccagatgcctgggtgcaaagaacggcttggcttggctcctcctctggaggttaaaatttatagtcattctaactgcactttgcgagctgccccttcttcccccacatcagagagaaatgcccccacaccagagccccaagggtagggctgccgatcagagctgtgagttaacacaacagggtcctggccaccccccttgccataccccgccctctgtgcccctttggcaccccccaaccctagtatgtcctctgctttctgccactcgtgcccgctgagttccatctacctctcatgctggatgccagctggcccctcaccagcctgccctgctgcccacacagctcccctttaagtgcccagccctaggggcctctccccatccacctcctccttccacaccttggcacccacccaggaaaaaact

SEQ ID NO: 4837 - DNA, 2057 bp, Homo sapiens
ggatcccaaagccatccttccacctgggctccctcattggccattcagaaacaacccccactctactgagaaatcgaaggcagcaccgctaaaccctctggcaaactacaggggcgatttggtcagtgctcctcccaccacacccaggatgactgttccccttccctcctaggtgctgatggtgcgctttgcttcgttgttcaacgtgaaggaccagacagtgatgttcctaagccgcaccacctacagcctgcaggagcttggtgccatgggcatgggagacctgctcagtgccatgttcgacttcagcgagaagctcaactccctggcgcttaccgaggaggagctgggcctcttcaccgcggtggtgcttgtctctgcaggtaggtcaggctctcgcctgacccgggggaggaggcagacgcagttcaattcaacacaccttttatggagtacctactctatgccaggccctgcaccgggcactggggatacagacatgattcagacacagtctagcttgggaaacagactcatgcccgactaattataaaacagtgagataagtgtcacagtagaagcatgaaccaaggaagcacagacaactatttctgcctgggggagctggggaaggaggtgacacttgagttggggcctcaaaggacaagtaagatgttgccaggcagagaaagggggaagggcatcccaggcagagggaactacacagcaaaaagcaagggagtctggccatgtttggcctgctgaggaagggaaggtggtcttacgggatgggaggtgaccagccctgctgagcccacgctcccagctttcaggcacctcctgctcttggggcagaggcctgggagaaggtatggcactccttctccttccccatcggccttctggggggcttcagggagaggctgcattgcctgccaggtcctcgcagacctccggttcctcctcagaggagctcggggagtccgcctcactgctgtcgtcttccccacagaccgctcgggcatggagaattccgcttcggtggagcagctccaggagacgctgctgcgggctcttcgggctctggtgctgaagaaccggcccttggagacttcccgcttcaccaagctgctgctcaagctgccggacctgcggaccctgaacaacatgcattccgagaagctgctgtccttccgggtggacgcccagtgacccgcccggccggccttctgccgctgcccccttgtacagaatcgaactctgcacttctctctcctttacgagacgaaaaggaaaagcaaaccagaatcttatttatattgttataaaatattccaagatgagcctctggccccctgagccttcttgtaaatacctgcctccctcccccatcaccgaacttcccctgctcctttttttaaaccactctgtctcccccacaaccctcccctggccctctgatttgttctgttcctgtctcaaatccaatagttcacagctgagctggcttctgtggtgtgtgctcgtttggggggtggggtggaaatactgccaaggctggggggggccacctctccatctggtcagtttgtggggtgggtactctgccagcagatgggaggatatagggaaacagcacacaagtctaaggggggtgcccaagggggttattttcatcatatatttattacataaatatatagtaaaatagacgagcaacaattaccataaaaatatctttctttaaaatcctgacccaaaacacaacggggtgttctctccaggctcctccccaccagctccgcacaccctctggccgcctgaggctttagacttcctgatcctcaaagacctcgaggaagagtggggggaagagttcggtggggcactcgactttcatgtggaggaagcggctggcgtggcaggccccgatcatgcggaggtcagtcaccttcatcagcagcttgggccagaagtgcggaatgttgtgtttgcggtggttgacgtagtgctcgaacgccagcaggtacgcctcctgactcttctcgatcttgtcc

SEQ ID NO: 4838 - DNA, 1633 bp, Homo sapiens
gcgtctgccaatgatccaggagccgctcctttccactcgggaaaccttcagaggagtctcagaaaggacacggctggctgcttttctcagcgccgaagccgcgccatgctcgtcctcagaagcgccctgactcgggcgctggcctcacggacgctggcgcctcagatgtgctcatcttttgctacgggacccagacaatacgatggaatattctatgaatttcgttcttattaccttaagccctcaaagatgaatgagttcctggaaaattttgagaaaaacgctcatcttcggacagctcactctgaattggttggatactggagtgtagaatttggaggcagaatgaatacagtgtttcatatttggaagtatgataattttgctcatcgaactgaagttcggaaagccttggccaaagataaggaatggcaagaacaattcctcattccaaatttggctctcattgataaacaagagagtgagattacttatctggtaccatggtgcaaattagaaaaacctccaaaagaaggagtctatgaactggccacttttcagatgaaacctggtgggccagctctgtggggtgatgcatttaaaagggcagttcatgctcatgtcaatctaggctacacaaaactagttggagtgttccacacagagtacggagcactcaacagagttcatgttctttggtggaatgagagtgcagatagtcgtgcagctgggagacataagtcccatgaggatcccagagttgtggcagctgttcgggaaagtgtcaactacctagtatctcagcagaatatgcttctgattcctacatcgttttcaccactgaaatagttttctactgaaatacaaaacatttcattaactgctataggatctgtctgctaatggtgcttaaattctcccaagaggttctcacttttatttgaaggaggtgttaagttaatttgctatgtttcttgcattatgaaggctacatctgtgctttgtaagtaccacttcaaaaaatagttctgtttactttctgcatggtatttcagtgtctgtcatacattaaaaatacttgtcactgttttaagatcttgactcttcatttgtttcagaatagctcttctactgtattctgacaactctttgctttatagcattttgttgtattcaaatgataatggtagcatttccatgcttgtgacagcatttttaagttattaatatattttatcaacctttccatcatgtctgttttcctggttttttttggttgttttttgaccagtaaaatttattttgtaataccaaataggatttaagaaaattaacgtatttctttactatggaaaaccacattgtcatttgtgacatcatctatattaaatatggttttcacattagttatttgtcacttacttggaaaatgatgctgttaggtcctggtattaaaaatctagaaaagacttgttggtttatgtgctgaaatgtctttatttataattaattttaactactatttacttcatttcggatcctgtttaacaaagatacttgagacatccatttgttttaatgaaatctgtatggatatggaaatgcttgccctaataaaagcctacatatacct

SEQ ID NO: 4839 - DNA, 4174 bp, Homo sapiens
gaacaagaggccagctacggcagagacgcctttgccaaggcaatatatgagcgccttttttgttggatcgttactcgcatcaatgatattattgaggtcaagaactatgacaccacaatccatgggaaaaacactgttattggtgtcttggatatctatggctttgaaatctttgacaacaacagttttgaacaattctgtatcaattactgcaatgagaaactgcagcagctatttattcagctggttctgaagcaagaacaagaggaataccagcgggaagggatcccctggaaacatattgactacttcaacaatcagatcattgttgacctcgtggagcaacagcacaaagggatcattgcaatccttgatgatgcttgcatgaatgtcggcaaagtcaccgatgaaatgtttcttgaagcacttaacagtaaattgggcaaacacgcccatttttccagccgaaagctctgtgcctcagacaaaattctggagtttgatcgagattttcgaattcgacattatgcaggcgatgtagtctattctgtcattggttttattgacaaaaataaagatactttatttcaagatttcaagcgccttatgtataacagttcaaatcctgtgctcaagaatatgtggcctgaaggcaaactgagcattacagaggtgaccaagcgacctctgactgctgctaccttgtttaagaattctatgattgctctagtagacaaccttgcatcaaaggaaccatattacgttcgttgcatcaaacccaatgacaagaaatctccacagatatttgatgatgaacgctgccggcaccaagtagaatatcttggactactggaaaatgtgagagtgcgtcgggcaggatttgccttccgccagacatacgagaagtttcttcacaggtataagatgatctctgaattcacctggcccaaccatgaccttccttcagacaaagaggctgtcaagaaactaattgaacggtgtggttttcaggatgatgtagcttatgggaagaccaaaattttcattcgaacaccccgaacattgtttaccttggaagaactccgtgcccagatgctcataaggattgtcctctttctacaaaaggtgtggcggggcaccctggcccgcatgcggtacaaaagaaccaaggcagctctgacaataatcaggtactaccggcgctacaaagtgaagtcgtacatccacgaggtggccagacgcttccatggcgtcaagaccatgcgagactacgggaagcacgtgaagtggccaagccctcctaaagttcttcgccgttttgaggaggccctgcagacgattttcaatagatggagagcatcccagctcatcaagagcattccggcctcagacctgccccaggtcagggcaaaggttgcagccgtggaaatgttgaagggtcaaagggctgacctcgggctccagagggcctgggagggcaactatcttgcttcaaagccagatacacctcagacctcaggcacttttgtccctgttgctaatgaattgaaacggaaggacaaatacatgaatgtcctcttttcctgtcacgtccgtaaggtaaatcgatttagtaaggtggaagacagagcaatttttgtcactgaccgtcacctgtataaaatggatcccactaaacagtacaaggtgatgaagactatccctctatacaatttgactggtctgagtgtctccaatggaaaggaccaacttgtagtgttccatacgaaagacaacaaagacctcattgtctgcctcttcagcaaacagccaacccatgagagtcgaattggagaacttgttggagtgctggtgaatcatttcaagagtgagaagcgccaccttcaagtgaacgtcaccaacccagtacagtgcagcctgcacgggaagaagtgcaccgtctccgtggagacgcggctcaaccagccccagcccgacttcaccaagaatcgctcgggcttcatcctcagcgtgcccgggaactgacgccccgcggaggcctggcccggagcccggccacactccgagtcctgggtcccagtccagctgctgcctcccaacccatgcccgctagaaacctgctgcgagggcccctcccagaggagccccgcccctgtaagatttccttcctggttttctgcctttggtatcatcttcctctgtccttactgtccacggtccctgttcaataagccaaagaccctggtgccccgcccagacccctgggctgacgtccagaccaatctcaccccagaggcaactggatggtgcctttagttggtgcggatgccccgtggccaggtcaagtcagagcacctggacaggtgtcctccctgctgctgaccctgcagagggaaggggtggggatgcaggaccccactctgcgggagccccatagccacctctcttgcccaaggtgagccagccctggggacccagctcagggaggctctgctcagagttcggcggacccaccccaacccaactcccagccgccagccaaagccactgggtgagcagagtcacccacagggccagcccctcagccaggagccagtggcaggagcggaacagcccatccagcagagtgagtccatccttcccaggttctcccctgggagactccctttgccaccaaggcccccaccagggcctctgaccaccgctctggagaggacagtgtggcatgctccaaggatcatcttacttaactcgcagcctgtggctgtggtcctcttatagatactttcaccgtttgcagggttgctaatcagatacctgctgtcaccacacttgggtcaggaaccctaatgagaacggggagctgccagggtgagggcagccctcagggtcggccgctttccctctggaccacctcccgctgcgtttcctactcagagaaacagcaagggcggggtcaagacacgggatgacgggaagcaggaagcggggcagcagcacagcgtggggtcctggcactgcaggccaggccaggatgcccaccccgccctctacacggccccttggggcctgcgcccgtgaaactggtgccagggagcactgccagcttgccagtttctgcccagcaaaagcacgtatgcttcaggggccttctgagaccaccttccccactgagccccagctgctgagaaggccttgagggaagtagaggctgggagcaaatgccccatgcggtgagaggatgaggggagcctacgcctcaggcatgtggtgagaggatgagggggagggagcccacgcctcaggtggagtgggcagaggtgcaagagagggatgtactgaagcttcttcccgtcctgccacagacacttctcctgccttcccaccctgacccggcagaacccaccaagtgcctgtgtgcagcctcctgtgcctcacccagggcctgaccccagagtggtcccaacaacccggtctcatgcccactccccatccctgcttcccaaaaattgcactgtgtgcagtttgcaacaaagaatcccgctggcatcctgtccttgggaaccctttctcattctccaagcctggtcagctgcctgcacaggcagaggtgccctcagcccagattagcaacactcatagttttgccaattaccagtagacactagtggaaccatctaactggaacttcctctctccttccacttatttcctcaaacttgttgctttacactagacacatgcaaatgtatgttttaaacacaccaaaacagatcatgccaaatgagttgcctgtcaaaggctggagggcaggaggagggcctgggtttgggttctttcctcccagcctttggatggtgccttgggccccttagccccagcgccagggcctcccagctgaggccacaggacaagcacttttttatgatgtactaaaagccacagtatgtggaaactgcaaaaggatcaggaatttagggtatgatctcggtcacgtgtcccgggcgctgaggggaaaggaagcgggcatgattgtagacaatgagggggttctcttgatgtaatgaaatgcaattttatggtttggtgcaaaaactcctattttccagtaaattaactttatttctaaagcatattttgatttgccatcaagagcaataaagcattaaatctt

SEQ ID NO: 4840 - DNA, 2123 bp, Homo sapiens
gaggcggagcggggaacgaggccgtcggccattttgtgtctgcttcctgtgggacgtggtggtagccgttgggttgggaaagtgagggatttttggcctcgtttctcctgcttcttttctcctcccttttactttgccggtagaacacagttatgggtcgcaagaagaagaagcagctgaagccgtggtgctggtattgtaatagagattttgatgatgagaagatccttattcagcaccaaaaagcaaagcattttaaatgccatatatgtcacaagaaattgtatacaggacctggcttagctattcattgcatgcaggtacataaagaaacaatagatgccgtaccaaatgcaatacctggaagaacagacatagagttggaaatatatggtatggaaggtattccagaaaaagacatggatgaaagacgacgacttcttgaacagaaaacacaagaaagtcaaaaaaagaagcaacaagatgattctgatgaatatgatgatgacgactctgcagcctcaacttcatttcagccacagcctgttcaacctcagcaaggttatattcctccaatggcacagccaggactgccaccagtaccaggagcaccaggaatgcctccaggcatacctccattaatgccaggtgttcctcctctgatgccaggaatgccaccagttatgccaggcatgccacctggattgcatcatcagagaaaatacacccagtcattttgcggtgaaaacataatgatgccaatgggtggaatgatgccacctggaccaggaataccacctctgatgcctggaatgccaccaggtatgcccccacctgttccacgtcctggaattcctccaatgactcaagcacaggctgtttcagcgccaggtattcttaatagaccacctgcaccaacagcaactgtacctgccccacagcctccagttactaagcctcttttccccagtgctggacaggctcaggcagctgtccaaggacctgttggtacagatttcaaacccttaaatagtacccctgcaacaactacagaacccccaaagcctacattccctgcttatacacagtctacagcttcaacaactagtacaacaaatagtactgcagctaaaccagcggcttcaataacaagtaagcctgctacacttacaacaactagtgcaaccagtaagttgatccatccagatgaggatatatccctggaagagagaagggcacagttacctaagtatcaacgtaatcttcctcggccaggacaggcccccatcggtaatccaccagttggaccaattggaggtatgatgccaccacagccaggcatcccacagcaacaaggaatgagacccccaatgccacctcatggtcagtatggtggtcatcatcaaggcatgccaggataccttcctggtgctatgcccccgtatgggcagggaccgccaatggtgcccccttaccagggtgggcctcctcgacctccgatgggaatgagacctcctgtaatgtcgcaaggtggccgttactgatcttacttcatccagtctaataggtttggagattaaaccttttctcaacttgtgctgtttatatagccaagcttccgtcaataaggcttcattgtgactttaacaaacattatcttcccacataccaggaactattggacatttattttacatgggaaaaattatttggaataataaagcaggaacttttcctgaagttgcaatttatactgtatggcttctttttcatgtttcatctaggtttttagaagtgaagtatagtaaatttggttcgttaaattgtgaaggcgctggaattacatgaacataccaccctagtaaaggcaagttctgtaagcttacattgctatttgtaaagtttgccttcacagcatttcagatgctgttggacttcatgtccccaacctagcttggtgagggctgtaactgtttccaagtacttgtacattggaagtctgaatgtgtaacaatatttaatgtatttagagttcctcatgttgcagggtttaagaaatctgacccaccaaggtcatgtgacttttctgtactgttaaacttcattgtaataaaatgagagaa

SEQ ID NO: 4841 - DNA, 1878 bp, Homo sapiens
gcttcctgtgggacgtggtggtagccgttgggttgggaaagtgagggatttttggcctcgtttctcctgcttcttttctcctcccttttactttgccggtagaacacagttatgggtcgcaagaagaagaagcagctgaagccgtggtgctggtattgtaatagagattttgatgatgagaagatccttattcagcaccaaaaagcaaagcattttaaatgccatatatgtcacaagaaattgtatacaggactgccaccagtaccaggagcaccaggaatgcctccaggcatacctccattaatgccaggtgttcctcctctgatgccaggaatgccaccagttatgccaggcatgccacctggattgcatcatcagagaaaatacacccagtcattttgcggtgaaaacataatgatgccaatgggtggaatgatgccacctggaccaggaataccacctctgatgcctggaatgccaccaggtatgcccccacctgttccacgtcctggaattcctccaatgactcaagcacaggctgtttcagcgccaggtattcttaatagaccacctgcaccaacagcaactgtacctgccccacagcctccagttactaagcctcttttccccagtgctggacagatggggacacctgtcacaagctcaagtacagcttcatccaattcagaaagtctgtctgcatcttctaaagctctgtttcctagcacagcacaagctcaggcagctgtccaaggacctgttggtacagatttcaaacccttaaatagtacccctgcaacaactacagaacccccaaagcctacattccctgcttatacacagtctacagcttcaacaactagtacaacaaatagtactgcagctaaaccagcggcttcaataacaagtaagcctgctacacttacaacaactagtgcaaccagtaagttgatccatccagatgaggatatatccctggaagagagaagggcacagttacctaagtatcaacgtaatcttcctcggccaggacaggcccccatcggtaatccaccagttggaccaattggaggtatgatgccaccacagccaggcatcccacagcaacaaggaatgagacccccaatgccacctcatggtcagtatggtggtcatcatcaaggcatgccaggataccttcctggtgctatgcccccgtatgggcagggaccgccaatggtgcccccttaccagggtgggcctcctcgacctccgatgggaatgagacctcctgtaatgtcgcaaggtggccgttactgatcttacttcatccagtctaataggtttggagattaaaccttttctcaacttgtgctgtttatatagccaagcttccgtcaataaggcttcattgtgactttaacaaacattatcttcccacataccaggaactattggacatttattttacatgggaaaaattatttggaataataaagcaggaacttttcctgaagttgcaatttatactgtatggcttctttttcatgtttcatctaggtttttagaagtgaagtatagtaaatttggttcgttaaattgtgaaggcgctggaattacatgaacataccaccctagtaaaggcaagttctgtaagcttacattgctatttgtaaagtttgccttcacagcatttcagatgctgttggacttcatgtccccaacctagcttggtgagggctgtaactgtttccaagtacttgtacattggaagtctgaatgtgtaacaatatttaatgtatttagagttcctcatgttgcagggtttaagaaatctgacccaccaaggtcatgtgacttttctgtactgttaaacttcattgtaataaaatgagagaa

SEQ ID NO: 4842 - DNA, 3017 bp, Homo sapiens
ccgggccgcaccaccgctggggggcagcgaagcgagcctagaggagaaaaggcggtccccgccgagtgcacgccgggggcggggcacggcacgaaggctccgtggtcggacttctgggctgttcggaggccctggcccacctggagggccctggaagagtttccagcgcttcccgaggtaggcgtgagaagctcgacgcggaccacatctccctcgtcggccgcgtcgggagcttctagccccgcccccgcgtcgggccccgccccctccgctgtgtcgtcgtctagtcctacgccgccagtgcgcctgcgcaagacgctggacttggcgctcagcatcctagccgattgctgtacggaaggggcgtgccggaccgaagtgcgcagactcggaggcatactccctttggtgaccattcttcagtgcatgaagacagacagcatccagaaccgaacggcccgtgccctggggaacttagccatggaacctgagagctgtggggacatccactgtgctggtgctgttcccctgcttgtggagagcctgacagcctgccaggactcgcagtgcctacagagcgtggtgcgtgccctccgtaacctggcagactcaccccagcaccgcctggccttggcacagcagggagcagtgcgtccgctggccgagctcctggccactgccccagatgctgcactgaccttagccctcgtccgtgccctcctggaactcagccgaggctgctcccgggcctgtgctgagcagctaagtctgggtgggggattgggcccactcgtcagcctggcttcccaccccaagcgggcagtacgcgagggaaccattctgatcctcgccaacctgtgtgcccagggcctgattcggcctgcactgggcaatgctggtggcgtggaggtgctggtagatgagctccggcagcgccgggatcctaatggagctagcccaacctcccagcagcccctggtgcgggctgtgtgcctcctatgtcgtgaggccatcaaccgggcccgactgcgggatgctggtggcttggatctactgatgggcctgctgcgggaccctcgtgcaagcgcatggcaccctcgtattgtggctgcccttgtggggtttctgtatgacactggggccctgggccggctgcaggctctgggacttgtgcctctcctggctgggcagctgtgtggtgaggctggtgaggaggaagaagagggaagagaagctgcttcctgggactttcctgaggagaggacccctgagcgggcacagggtggaagcttccggagcctcaggtcgtggctgatctccgagggctatgccacaggccctgatgacatctcccccgactggtctcctgagcagtgtccgccggagcccatggagccggccagccccgccccgaccccgacctcgctgcgggcaccacgcacccaacgcactccgggccgcagccccgccgccgccatcgaggagccttggggacgcgaagggccagccctgctgctgctgtcgcgcttttcccaggcccctgacccaagtggggcacttgtgaccggcccggcgctgtacggcctgctgacctatgtgaccggcgcaccgggcccgcccagcccacgtgcactgcgcattctgtcacgcctcacctgcaaccctgcctgcctcgaggccttcgtgcgcagctatggcgcggcgctgctgcgggcctggctggtgctgggggtggcgcctgacgattggccggcaccacgtgcccggcccactctccacagccggcaccgagagctgggggagaggctactgcagaacctgacggttcaggctgagtcgccctttggggttggggccctgacgcacctgctgctctctgggagccctgaggaccgagtggcctgcgcgctgaccctgcccttcatctgccggaagccctctctgtggcgccggctgcttctggagcagggtggtctccggctcctccttgcggcgctgacccggccggccccacacccgctcttcctcttctttgccgcggactccctttcctgcctccaagacctggtgtctcccactgtgagcccagctgtcccacaggcagtccccatggacctagactcaccttccccttgcctctatgaacctctgctgggcccagcccctgtcccagctcccgacctgcacttcctgctggactcaggcctccagctccctgcccagcgagcggcctcagccaccgcctcccctttcttccgggccctgctgtcaggcagctttgcagaagcccagatggacctggtgcccctgcgaggtctgtcgcctggtgcagcctggcctgtcctgcatcatttgcatggttgtcgggggtgtggggctgccctggggcccgtgcccccaccaggccagcccctgctgggttcagaggccgaggaggcactggaggctgctggccgtttcctactgcctgggctggaggaggagctggaagaggccgtgggccgcatccacctgggaccccagggtggcccggagtcagtgggtgaggtgttccgcctgggccggccccggctggctgcccactgtgcccgctggacactggggtcagagcagtgcccgaggaagcggggtctggccctggtggggcttgtggaggcagcaggtgaagaggcagggcccctgacggaggctttgctggctgtggtgatggggattgagttgggggcaagggtccctgcctagactgttgacgtcccctgggaaggggacccaaggatgaattggctgtgaaggatcctccctgagactggcaagggaggaggctgagcagaaggagtcatcatggaggagcggtgagaacatggaaccggactccaagatgacgatctaaagacccgggagcgagaagccaaggccaggttctgggtgtagggcccagagaagcagaacagcccagagccccaggtgcctggcctggcctagacctctggaattgagattaaacaatttggagttgg

SEQ ID NO: 4843 - DNA, 2481 bp, Homo sapiens
gctcggcatggctgacgacgcgggtttggagaccccgctgtgttccgagcagttcggctccggggaggcacggggctgccgcgccgccgcggacgggagcctgcagtgggaggtcgggggctggcgctggtgggggctctccagggccttcacggtcaaacctgaaggacgagatgcgggcgaagtgggggcttccggggccccctcaccgcccctctccgggctccaggccgtgttcctgcctcagggcttccctgatagcgtcagcccggactacttgccctaccagctgtgggattccgtgcaggcgtttgcttccagcctctccggctccctagccacccaggcagtcttgctgggcataggggtggggaacgcaaaagccactgtttcagctgccacggccacctggctcgtgaaagattcaactggcatgctgggccgcatcgtctttgcctggtggaaagggagcaaactggactgcaatgccaagcagtggaggctttttgcggacatcctcaatgacgtagccatgttccttgagattatggctcctgtatacccaatctgtttcaccatgaccgtctccaccagcaacctagccaagtgcatcgtgagtgttgctggtggggccactcgggctgccctgaccgtgcaccaggctcggaggaacaacatggctgacgtgtcagccaaggacagcagccaggagacgctggtgaacctggcggggctcttggtcagcctcctgatgctccctctggtgtcaggttgccctggcttcagccttggatgtttcttcttcctcactgccctccacatctacgccaactaccgcgcggtccgagccctggtcatggagaccttgaacgaaggccggctccggctggtcctgaagcactaccttcagaggggagaggtactcgacccaactgcagccaatcgcatggagccgctgtggacaggtttctggccagctccgtctctatccctgggggtccccttacaccgcttggtctccagtgtctttgagctgcagcagctggttgaggggcaccaagaatcctacctcctctgctgggaccagtcacaaaaccaggtacaggtagttctgaaccagaaggcaggccccaagaccatcctaagggccgccacacatgggctgatgcttggggccctgcagggagatggaccccttccagcagagctggaggagctgaggaaccgggtgcgggcaggtcctaagaaagagagctgggtcgtcgtcaaggagacacacgaagtgttggacatgctgttcccaaagttcttgaaaggactgcaggatgccggctggaagaccgagaagcaccagctagaggtggatgagtggagggccacatggcttctgtctcccgaaaagaaggtcttgtgagcagcccagacggaggcccaagcccagggcaggaacctggagcaaggacactttggccacagcaggacaggggaaaggcagctttatttttccttagggcaactgcagcgggtgggccaggccctcatgggaagtgactgccaatcagatgcagtgggccccaggcagaggaaggccgggagaaggggagccaggaccttctcaccccactgccccttccccttttctggggagcaccgcaggctcctcacccccacttcctgtgaggctgtggcttatggtgtccaacgcagttggtcttaggcatagaagccccagaggaacacggccactgccatcatgagcagggcattgaggttgaccacacgggcccagctcgggtcctcgctgatgtcctccaggtcctcccgttcctccttgctatgccggagactgaagaccaggcggtggagctggggagggtgggagcacgaacgaggtgggagttctgtccccccatgcctggccctaaagtctcttgcacaccagctcgtcactgcctgccctacccacctctgtccagtctacacacccagcccaggcttaactcatgccaactccaccctacatggctgccctgtgccctcgggataaaccccaagcccctgagcttgtgtttaaagccgttggccttgctcccccagctttgtcagctcaggtctgtctacacccagatggtagcgcttgtgacactggcctggcagtcctgctcacagtgttctgtgcctgtgtgctcccaccctttcctcctgctgctgcagaaacccggccatccttccacacccagatctcttgtcctgtcctcaccccaccctgccaccatcagccctgcctggagccacctgccctttggcaacaaaaccaaacctttttgtgggcgttcaagatggtattgtgcccaccagtcagatcctgtgttttgagtcccaaaggccatgccaaggattggctttgggaggctttaatcaccaacccatcaacatcaagcctcccccaggccggttcaaataaatgtatttaaataaaaa

SEQ ID NO: 4844 - DNA, 1181 bp, Homo sapiens
gtgaacctggcggggctcttggtcagcctcctgatgctccctctggtgtcaggttgccctggcttcagccttggatgtttcttcttcctcactgccctccacatctacgccaactaccgcgcggtccgagccctggtcatggagaccttgaacgaaggccggctccggctggtcctgaagcactaccttcagaggggagaggtactcgacccaactgcagccaatcgcatggagccgctgtggacaggtttctggccagctccgtctctatccctgggggtccccttacaccgcttggtctccagtgtctttgagctgcagcagctggttgaggggcaccaagaatcctacctcctctgctgggaccagtcacaaaaccaggtacaggtagttctgaaccagaaggcaggccccaagaccatcctaagggccgccacacatgggctgatgcttggggccctgcagggagatggaccccttccagcagagctggaggagctgaggaaccgggtgcgggcaggtcctaagaaagagagctgggtcgtcgtcaaggagacacacgaagtgttggacatgctgttcccaaagttcttgaaaggactgcaggatgccggctggaagaccgagaagcaccagctagaggtggatgagtggagggccacatggcttctgtctcccgaaaagaaggtcttgtgagcagcccagacggaggcccaagcccagggcaggaacctggagcaaggacactttggccacagcaggacaggggaaaggcagctttatttttccttagggcaactgcagcgggtgggccaggccctcatgggaagtgactgccaatcagatgcagtgggccccaggcagaggaaggccgggagaaggggagccaggaccttctcaccccactgccccttccttccacacccagatctcttgtcctgtcctcaccccaccctgccaccatcagccctgcctggagccacctgccctttggcaacaaaaccaaacctttttgtgggcgttcaagatggtattgtgcccaccagtcagatcctgtgttttgagtcccaaaggccatgccaaggattggctttgggaggctttaatcaccaacccatcaacatcaagcctcccccaggccggttcaaataaatgtatttaaataaaaattcttgctcggc

SEQ ID NO: 4845 - DNA, 1791 bp, Homo sapiens
  misc_feature (842)..(842): n is a, c, g, or t
gcccgtctgttccccttcgggtccaaagcttttggctcctccttgttccgagcccgaaggcccgccccttcacgtactcggagctcggatcccagtgtggacctggactcgaatcccgttgccgactcgcgctctcggcttctgctccggggcttcttccctgcccgcccggggccctgaccgtggcttcttccccggcctgatctgcgcagcccggcgggcgcccagaaggagcaggcggcgcgggggcgcgctgggcgggggaggcgtggccggagctgcggcggcaagcgggctgggactgctcggccgcctcctgcccggcgagcagctcagaccatgtcgcctgaagaatggacgtatctagtggttcttcttatctccatccccatcggcttcctctttaagaaagccggtcctgggctgaagagatggggagcagccgctgtgggcctggggctcaccctgttcacctgtggcccccacactttgcattctctggtcaccatcctcgggacctgggccctcattcaggcccagccctgctcctgccacgccctggctctggcctggactttctcctatctcctgttcttccgagccctcagcctcctgggcctgcccactcccacgcccttcaccaatgccgtccagctgctgctgacgctgaagctggtgagcctggccagtgaagtccaggacctgcatctggcccagaggaaggaaatggcctcaggcttcagcaaggggcccaccctggggctgctgcccgacgtgccctccctgatggagacactcagctacagctactgctacgtgggaatcatgacaggcccgttctntcgtaccgcacgtacctggactagctggagcagcccttccccggggcagtgccagcctgcgcccctgctgcgccgcgcctggccggccccgctcttcggcctgctgttcctgctctcctctcacctcttcccgctggaggccgtgcgcgaggacgccttctacgcccgcccgctgcccgcccgcctcttctacatgatccccgtcttcttcgccttccgcatgcgcttctacgtggcctggattgccgccgagtgcgctgcattgccgccggctttggggcctaccccgtggccgccaaagcccgggccggaggcggccccaccctccaatgcccaccccccagcagtccggagaaggcggcttccttggagtatgactatgagaccatccgcaacatcgactgctacagcacagatttctgcgtgcgggtgcgcgatggcatgcggtactggaacatgacggtgcagtggtggctggcgcagtatatctacaagagcgcacctgcccgttcctatgtcctgcggtgagtgagcccgcccagtctcaggtgacactgcagaactacatctcccagcaggccccagggtagcctgcagcgtccctggctggcccctgcccccggaggctcatgggaattgtagtttgtttagcctggttttgccctgcctctaattatagtggcagcatgccggtgtaaaatcgttccccctctcggggcctcagttgctacttctgtaaagtcagcctcactcagcagaagcaatgtactgagtcctgtggactcaatagccagccttcctggaatcttggccgtccaggttatggagaaaccttgaggagttagttgacctcttagttgcctcaagtgttgaatggagtgaatgctatttattactggtttcataggtagatagaaggactaaatgtgataaaatgtgaaatgtattt

SEQ ID NO: 4846 - DNA, 2519 bp, Homo sapiens
gctgcgatggcggaggccgtggagcgcactgacgagctggtccgggagtacctgctcttccgcgggttcacgcacacactgcggcagctggacgccgagatcaaggcggacaaggagaaggggttccgggtggataagattgtggaccagctgcagcagttaatgcaggtgtatgacttggctgcccttcgggattattggagctacttggagcgtcggctcttcagccgcttggaggatatatacagacccacaatccacaagctgaaaaccagcctgtttcgattttatcttgtctacacaatccagacaaacagaaatgacaaggctcaggagttctttgcaaagcaggccacggaactccagaaccaggctgagtggaaggattggtttgtcctgcccttcctgccatccccggacaccaaccccacctttgctacctacttttctcgacagtgggctgacaccttcattgtgtccctgcacaacttcctgagcgtcctgtttcagtgcatgccagtccctgtgatcctgaactttgatgcggagtgtcagaggactaaccaggttcaagaagaaaatgaagttctgcgtcagaagctttttgcattgcaagctgaaatccaccgactgaagaaagaggagcaacagccagaagaggaagaggccttggtccaacacaaattgcctccttatgtctccaacatggaccgcctgggggactcggaacttgccatggtgtgcagccaaaggaatgcctccctctcccagtcacctcgtgtgggcttcctgtcctcgctgctgcctcagagtaagaagagcccctcaaggttgtcgcctgctcagggccctcctcaacctcagagctcggccaagaaagagtccttcggtggtcagggcaccaagggaaaggacccgacgtccggagccaaggatgggaagagcctcctcagcgggctggccactggggagtccggttggtcacagcaccggcagcggcgcctgcaggaccatggcaaggagaggaaggagcttttctccacaaccacttcccagtgtgcagagaagaaaccagaagccagtggcccagaggctgagccctgcccagagctccacacggagccagtggagccactgactcgggcatcctcggcaggccctgagggtggaggagtccgccccgagcagccctttattgtgctgggacaggaggagtacggggaacaccactcatccatcatgcactgcaggtggactgctctgggaggagagtcgccagcttagacgtagatggggtcatcaaagtgtggtccttcaaccccatcatgcagaccaaagcatcctccatttccaaatcaccgctgctgtctttggaatgggccaccaaacgggacagactgctcttgctgggcagtggtgtgggaacagtgcgtctctatgacacggaagccaagaagaatctctgtgaaatcaatatcaacgacaacatgcccagaatcctgtctcttgcgtgcagccccaacggggcctctttcgtctgttcggcagcagctccgagcctcacttcccaggtggacttctcagcaccagacatcggcagcaagggcatgaaccaggttcctggcaggctgctgctgtgggacacgaaaaccatgaagcagcagctccagttctccctggatccagaacccattgctatcaactgtacagccttcaatcacaacgggaacctgctggtcacaggggcagctgatggcgtcatccggctgtttgttcatccagtggaacatccacaagagtggcctcaaggtatccgagtacagcctcccctcagatgccacgggcccctttgtgctgtctggatacagcggctacaagcaggttcaagtccccaggggccgactcttcgcttttgactcggagggaaattacatgctgacatgttctgccacaggcggcgtcatctacaagctgggtggcgatgagaaggttctggagagctgcttgagcctaggtggccaccgagcccctgtggtcaccgtggactggagcactgccatggactgtgggacctgcctcaccgcctccatggatggcaagatcaagctgaccaccctcctggcccataaagcctgatgacttgccccaagggccacccgaggaagcagtattatctgcggtggggggaggagatataggacaggaaaaccacgtgctccactccagctccctgccagtgcagtgactctgcagggaaagactggcaaggaggctcaggtgcttccatctgtggtgactggaatgggacccacgtggagtaggtgacatatgcttcccagagactggtattgtggctgtgccaggagtacatgtgagactatgggaggaaagctccggaagaaggagaaacattgcagtggctactgtgttggcccagtagaaattgacagtattttgtatatatgtgcccatttatctttttcttttttaaaaaaagagaatactcttgtggtcccctg

SEQ ID NO: 4847 - DNA, 4628 bp, Homo sapiens
gagcagaccccgaaagccccatcctggacctggaccttcacctgcccttgctgtgctttcggcctgagaaggtgctacagatcctgacatgcatcctgacggaacagcggatcgtcttcttctcctcggactgggctctgctgacgctggtcactgagtgcttcatggcctacctgtatccgctgcagtggcagcaccccttcgtgcccatcctgtcggaccagatgctggatttcgtcatggcccccacgtccttcctgatgggctgccatctcgaccacttcgaagaagtcagcaaggaagccgacggtttagttctgataaatattgatcatgggagcatcacctactccaagtccacggacgataacgtggacattcctgatgtccccctcctggcagcccagacgtttattcagagggtgcagagcctccagctccaccatgagctgcacgccgcccacctcctctccagcacagacctgaaggagggccgagcccaccggcggtcctggcagcagaaactcaactgccagatacagcagaccaccctgcagctgctcgtgagcatcttcagggatgtaaagaatcatttaaactatgaacacagagtctttaatagtgaagaatttctcaaaaccagggctccaggggaccatcagttttataagcaggtcttagacacctacatgttccattcttttcttaaagcccggctcaataggaggatggacgcctttgctcagatggacctcgacacccagtcggaggaggacagaataaatggaatgcttctaagtccaaggagaccgaccgttgagaaaagagcctcccggaagtcctcgcacctgcatgtcacccacaggcgcatggtggtcagcatgcccaacctgcaggacattgccatgcctgagctggcacccaggaactcctcgctccggctgacggacaccgcaggctgtaggggcagcagcgcagttctgaatgtcacgccgaagtccccgtatacattcaagattcccgaaatccactttccgctggagagcaagtgcgtgcaggcataccatgcccactttgtctccatgctgagcgaggccatgtgctttctggcccccgataactctctgctcctggcccgctatttgtacctccgagggctcgtttatctgatgcagggacagctgctgaacgccctcttggacttccagaatctgtataaaacagacatacggatctttcccactgatttggtgaagaggacggtggaatccatgtctgcccctgagtgggagggggctgagcaggcgccggagctgatgaggctcatcagcgagatcctggacaagccgcacgaggcctcgaagctggacgaccacgtgaagaagttcaagctgcccaagaagcacatgcagctgggcgacttcatgaagcgggtccaggagtcagggatcgtgaaggacgccagcatcatacaccggctgttcgaggccttgactgtaggacaggagaaacaaatcgacccagaaacattcaaagatttctacaactgctggaaggagacggaagcagaagcccaggaggtcagtctgccgtggctggtgatggaacacctggataaaaacgagtgtgtgtgtaagttgtccagctccgtcaagacaaacctaggcgttggcaagatcgccatgacccagaagcgcctgttcctcctaaccgaaggaaggccaggctacttggagatttccaccttcagaaatatagaggaggtcaggagaaccactactacatttctacttcggagaatacccactttaaaaatcagagtggcgtccaagaaagaagtcttcgaagccaacctgaaaaccgagtgtgacctttggcacctgatggtgaaggagatgtgggctgggaagaagctggccgatgaccacaaggaccctcactacgtccagcaggcgctgaccaacgtcttgctgatggacgccgtcgtgggcacactgcagtcaccaggcgccatctacgctgcctccaagttatcctactttgataagatgagtaacgaaatgcccatgacgcttccggagacaaccctggaaacactgaagcataaaatcaacccctcggcgggggaggcgttcccacaagcggtggacgtgctgctctacactccagggcatcttgacccagccgaaaaagttgaagatgctcaccccaagttatggtgtgctctgagcgaaggcaaggtgaccgtgttcaatgcttcttcatggaccatccaccagcactcctttaaagtgggcactgcaaaagtgaactgcatggtgatggccgaccagaaccaggtgtgggttggctcggaagactccgtcatctacatcatcaacgtccacagcatgtcctgcaacaagcagctcacagcccactgctccagtgtcacggatttgattgtgcaggacggacaggaggcacccagcaacgtgtactcgtgcagcatggacggcatggtgctggtgtggaatgtgagcacactgcaggtgaccagccgcttccagctgccgcgaggtggcctgacgtccatcagactgcacggcggccgcctgtggtgctgcacaggtaacagcatcatggtcatgaaaatgaatggatccctccatcaagaattgaagattgaggagaacttcaaagacaccagtacctccttcctggccttccagctccttcctgaggaggagcagctgtgggcggcctgtgcaggacgcagcgaggtttacatctggagcctgaaggacctggcccagcccccgcagagggtgcccctcgaggactgctctgagatcaactgcatgatccgggtgaagaagcaggtctgggtgggcagccgagggctggggcagggaacacccaaggggaaaatctacgtgattgacgccgagaggaagaccgtggagaaggagctggtggcgcacatggacaccgtgaggacgctgtgctcggctgaggacagatacgtgctgagtgggtcgggcagggaggaggggaaagtcgccatttggaaaggcgaataaacgtggctgagtctgccaagtggaactgtgccctatgtgtggggactggctgccccctagagcctgccaggagcagaagcctggaggggtggcagggcagagcagcccaggctcagcatggagcccacttaccgtgtggccagccgcgagacccatggccacgcaccttctctcaggccttcgggccccctggttaaactgcaccaagggtgtttcctgttggggtgtgtctcaggcaggcagctgcgtcttgttggtgataacctctgctgggaggttactttgttgcctagaaagttctggaatccacaaccaggggctggcactggagccagcagcttggccgagtcacaggtgacccgtggccctcacgtctctggttttacctttccttacttcattcattcactcacccagtccttacgaatcaccgaggaacactgggctgagcacatgacagggagcctggagccccggggcctccagcgaggcctgagaagggtggttcgggtaaccactgtgggctctctcccatcacagaaggtggacagggcctacccaggtggaggggaccaccctgcgatcaggtgtttgcgacaggggttgggccagctgaggcaagctgtcttttttcccttttctttttaatagatgcaacatttttataataatcctagagaccttttttctaccaaagatcacagaccagaaaaagttccatctaaaatatcatgcccaggaaagcacatgggatcaaaagtaaaatagcatcatgtgtgatctcgtcttccagcgtgccgctcagttccccgaatccgtgtgcacacgtgtgatctcgtcttcagtgtgccgctcagttccctgaatccgtgtgcacactgcgtatgtgtacgcgcagcatgctatactgaactcaacaagatcttggctgtacataaatatttgtaaaagagaccctttgcacctttttactgtaatgttgagacttcattacttaaatgttctacggaaggttctggtgtggttgttggagccggagggagcgtgtcagcacgtgctgagggcatggggcctgccccctgggcacccatccacaagctgggccacggagctccagcttctcaggacaaagccccggggctggcgcatcctgagggtctctgggggtgtttgccaggctcctgggatgggccgctttcagaagccctgcagtgcctccagatggaaaggcgggcccggcctccggttgggtctgcattttggagagtccacaccacggaccaggttttcccccaaggcttggctttgtgtagctactaacttcttggggcattctgagagtgtgggcagagagaattatgtggcctcatcctcccccaaggctgtgcttgcagcccgggcaccttcccactttctagctctggagaggttggattttgcttttgtaaacacatgaatccttatgataaaagtctgtcagtcaaaaatacatttataaattatttaatgccagtcctcatgtaacctcaggtatcttcagcttgtggagaataaatctggtttaat

SEQ ID NO: 4848 - DNA, 1256 bp, Homo sapiens
ggctgcggcggctggagcaggcgagcggcggcggccgatagcgagtgtcagggccggccggggcggcgcttctcggcctgtcgctggtcggcctcctactgtacctcgtgcctgctgcggctgcgctggcctggctggccgtggggactaccgcggcctggtggggactgagccgcgagccccgaggttcgcgccccttgtcctccttcgttcagaaggcgcgacatcggcgaacactgttcgcttcgcctccggccaagtcgacagccaacggaaacctcctagagccgcggaccctgctcgaaggacctgaccctgccgaactgctcctcatgggcagttacctgggcaagcccgggccgccgcagcccgcccccgctccggagggccaggacctgcggaataggcctggccgccgcccgcccgcccggcgccgcgctccacaccgccctccccgccgacccatcgcgttcaccacttttacccctctctccccactcctcttctccgaccctccgggaggccttccccacgggatcgtgggactttaccagatcggtttgtaataacacctcgaagacgctatccgatccatcaggcccagtattcctgtccgggggtacttcccacagtgtgctggaatggttatcacaagaaggctgtgctgtcccctcgcaactccaggatggtgtgtagcccagtgactctgaggatcgcccctcctgacagaagattttcgcgttctgcgataccagagcagataatcagctcaacactgtcctcaccatcaagtaatgccccagacccatgtgcaaaggagactgtactgagtgccctcaaagagaagaagaagaaaaggacagtggaggaagaagaccaaatattccttgatggccaggaaaataaaagaagctgtcttgtcgacggtctcactgatgcctcttctgcattcaaagttcctcgacccgggccagatacactccagttcacagtggatgtcttccactttgctaatgactccagaaacatgtgacagaagaagcagatgtcaccgtggggccactgatcttcctggacaggaggggtgaccatgaagtagagcagtgggctttgccttctgacacctcagtggtgctgctgggcgtaggcctggctgtggtggtgtccctgactctgactgctgttatcctggttctcaccaggaggtgtcgcactgcctcccaccctgtgtctgcttccgaataaaagaagaaagc

SEQ ID NO: 4849 - DNA, 5813 bp, Homo sapiens
gagcggcgccctgctctggccgttgctcccgctcctgctcctgctgctgtcggcgcgggacggcgtgcgcgccgcgcagcctcaggccccgggttacttgattgcagctccctctgtttttcgcgcgggcgtggaggaagtcatcagcgtgaccatctttaactctccaagggaagtcacggtccaggctcagctggtggcccagggtgagccggtggtgcagagccagggagccatcctggataaagggacaatcaaactcaaggtgcccacgggcctccggggccaagcgcttctgaaagtgtggggccgcggctggcaggcggaggaggggcccctctttcacaaccagacctcggtgaccgtggacggccggggcgcttctgtattcatccagacggacaagcctgtgtacagaccccagcaccgagtgctcataagcatcttcaccgtctctccaaatctgaggcctgtcaacgagaagctggaagcctacatcctggacccccgaggctctcggatgatagagtggagacacttaaagccgttctgctgcggcatcaccaacatgagcttccccttgtccgaccagcctgtgttgggagaatggttcatttttgttgaaatgcaaggccacgcgtacaacaagtcttttgaagttcagaagtatgtgttgcccaagtttgagcttctgattgacccgccccggtatatccaagacctggacgcctgtgagacaggcactgtgcgggccaggtatacctttgggaaacctgtggctggtgccttaatgatcaacatgactgttaatggtgtagggtactacagccacgaggtgggacgccctgtcctcagaacaaccaagatcctcggctcccgggacttcgacatctgcgtgagggacatgatcccagcggacgtccctgagcacttccggggcagggtcagcatctgggccatggtgaccagtgtggacgggagccagcaggtcgcgttcgatgactccacccccgtgcagaggcagctggtggacatccggtactccaaggacacgaggaagcagttcaagccgggcctggcctacgtggggaaggtggagctatcctaccccgatggcagcccagctgagggggtgacggtccagattaaggcagagctgacaccaaaggataacatctacaccagtgaagttgtgtcccagcgtggactagtggggtttgaaatcccctccatccccacgtcagcccagcacgtgtggctggagaccaaggtgatggcactgaacgggaagcctgtgggggctcagtacctgcccagctacctctccctcggcagctggtactcccccagccagtgctacctgcagctgcagccaccctcccacccactgcaggttggggaagaagcctatttttctgtgaagtccacatgtccctgcaactttaccctgtactacgaggtggctgcacggggcaatattgtgctatcgggccagcagcctgcccacaccacccagcagcgaagcaagcgggcggcccctgccctggagaaaccgattcgtttaacacacctttctgagacagagcccccaccagccccagaagctgaggtcgacgtgtgtgtgacctctcttcatctggccgtgacccccagcatggtcccccttggtcgcctgctggtcttctacgtcagggagaatggagaaggggtcgccgacagccttcagtttgcagtcgagaccttcttcgaaaaccaggtttcagtgacgtattcagcaaatgagacccaacctggggaggttgtcgacctgcggatcagggctgcaaggggcagctgtgtgtgcgtcgccgcagttgataagagtgtctacctgctcaggtctgggttccggctgactcctgcccaggttttccaggaactggaagattatgatgtttctgattcctttggcgtgtccagggaggatggtcctttttggtgggctgggctgacggcacaacgacgccggcgctcctctgtcttcccgtggccttggggcatcaccaaggactctgggtttgccttcaccgaaacgggactggtggtgatgaccgaccgagtgagcctgaaccaccggcaggacggtggcctctacaccgatgaggctgtccccgctttccagccccacacagggagcctggtggcagtggctccttccaggcacccccccagaacagagaagagaaaaaggactttcttccccgaaacatggatttggcattgtctcaacatcagtgacccatctggtgaggggacactcagtgtgaaggtcccggactccatcaccagctgggtgggtgaggccgtggccctgtccacctctcagggcttaggcatcgccgagccctccctgctgaagaccttcaagcccttcttcgtggacttcatgctccccgctctcatcatccgtggggagcaggtcaagatcccgctcagtgtctacaactacatgggcacctgcgctgaggtgtacatgaagctctcggttcccaagggcatccagtttgttgggcatcctggcaaacgccatgtgaccaagaagatgtgtgtggcccccggggaggctgagcccatctgggtcgttctgtccttcagcgacctgggactcaacaacatcacggccaaagcccttgcttacggagacacaaattgctgccgggatgggaggtccagcaaacaccctgaggagaatcacgccgacaggagggtccccatcggggtggatcacgtcaggcgcagtgtgatggttgaggcggaaggagtcccccgggcgtacacctacagcgcattcttctgtcccagtgagagagtccacatctccacccccaacaagtatgagttccagtatgtgcagcggccactgcgcctcacccgctttgatgtggctgtgcgagctcacaatgatgcccgtgtggccttgtcttctgggccccaggacacagcaggcatgatcgagatcgtcctgggggggcatcagaacaccaggtcatggatctccaccagcaagatgggagagcccgtggccagtgcacacacggccaagatcctctcctgggatgaattcagaacattctggatcagctggcgtggtggccttatccaggttggccatggtccagagccatccaatgagtctgtcattgtggcctggaccctcccgaggccaccagaggtccagttcattggcttttccaccggctggggctccatgggtgaattccgaatctggaggaagatggaggtggacgagagctacagcgaggccttcaccctgggggtcccacacggcgccatccctgggtctgagcgagccaccgcctccatcatcggggacgtcatggggccaaccctgaaccacctcaacaacctcctgcggctgccgtttggctgtggagagcagaacatgatccactttgcacccaacgtctttgtcttgaagtatcttcagaaaacccagcagctcagccctgaggtggagagagagaccaccgactacctagtacaaggctaccagcgccagctgacctacaagcgccaggatggctcctacagcgcgtttggggagcgggacgcatcggggagcatgtggctcacagcctttgtcctgaagtccttcgcacaggctcgcagctttatcttcgtggacccccgggagctggctgccgccaagagctggatcatccagcagcagcaggccgatggctccttcctggccgtgggcagggtcctgaacaaggacatccagggtgggatccacggcactgtcccgctgacagcctacgtggtggttgctctcctggaaacaggcacagcctcagaggaggagagaggctccactgacaaagcgaggcacttcctggagtctgctgcgcccctggccatggacccttatagctgtgccctgactacctacgcgctgaccctgctccgcagcccggcagcccctgaggcactgcgcaagctccgtagcctggccatcatgcgagatggggtcacccactggagcctgtcaaattcctgggacgtggacaagggcacattcttgagcttcagtgacagggtctctcagtcagtggtctcggccgaggtggaaatgacagcctacgcccttctgacctacactctgctgggtgacgtggctgccgccctgcctgtggtgaagtggctgtcccagcagcgaaatgcacttgggggcttctcctccactcaggacacctgcgtggctctgcaggccttggctgaatatgccatcttgtcctatgctggaggcatcaacctcactgtctccctggcctccaccaacctggactaccaggaaaccttcgagctgcacaggaccaaccagaaggttctgcagacagcagcgatccccagcctccccacggggctgtttgtgagtgccaagggggacggctgctgcctgatgcagattgatgtcacctacaatgtgcctgacccggtggccaagccagctttccagctgctcgtaagcctccaggagcctgaggcccagggacgcccgccccccatgcctgcctccgcagctgagggttcccgaggagactggcccccagctgacgatgatgacccagcggccgatcagcatcaccaggaatacaaggtgatgctggaggtgtgcaccaggtggctgcatgcagggtcttccaatatggctgtcctggaggtgcccctgctgtcaggcttccgggcagacatcgagagcctggagcagctgctccttgacaagcacatggggatgaagaggtatgaagtggctggacgccgagtgctcttctactttgatgagatccccagccggtgcctgacgtgcgtgcggttccgtgctctccgggagtgcgtggtgggcaggacgtcggcgctgccagtctccgtgtacgactactacgaacccgccttcgaggccactcgcttctacaacgtcagcacccacagcccactcgcccgggaactgtgcgccggacccgcgtgcaacgaagtggagcgcgcccctgcccggggcccgggctggttccccggcgagtcgggccctgccgtggcccctgaggagggggcggcgatcgcgcgatgcggctgcgaccacgactgcggcgcccaggggaacccggtgtgcggctccgacggggtggtctacgccagcgcctgccgcctgcgggaggccgcctgccgccaggccgcgcccctggagcccgcgcctcccagctgctgcgccctcgagcagcggctgccggcctcgtcgtcctccacctacggggatgacctggcttctgtggccccggggcctttacagcaggacgtgaagctgaatggagccggccttgaggtggaggactcagaccctgagcctgaaggggaggcggaggacagggtcacagccgggcctcggcctcctgtgagcagcgggaacctggaaagcagcacccagagcgccagcccgttccacagatggggccagactccggcccctcagagacatagtggccgggtggtgggggcccacaggccagggcttctgagccctgtcttcgtctacagcccagcctttcagagtggtggggaggagggtttatggatgtcaaacacctgcaccttgagataatcctacaaccacatgcagttgtgggaccgcagtttggtcctggggaccattcatacccacacacccagcttgtgcctgtggttaacatctcagaaaactctggtaaatgatcactccaggatattgacaagaatacacgttactgatcttactcaca

SEQ ID NO: 4850 - DNA, 977 bp, Homo sapiens
ccggcggctgcggcggctggagcaggcgagcggcggcggcccatagcgagtgtcagggacggccggggccggggctgcggcgggccggccagggcggtgctcctgggcctgtcgctggttggcctcttactgtacctcgtgccggctgcggctgcactggcctggctgaccgtgggggctaccgcggcctggtggggactgagccgcgagccccgaggttcgcgccccttgtcctccttcgttcggaaggcgcgtcatcggcgaacactgttcgcttcgcctctggccaagtcgacagccaacggaaacctcctagagccgcggaccctgctcgaaggacctgaccctgcggaactgctactcatgggcagttacctgggcaagcccgggccgccgcagcccgccgccgctccggagggccaggacctgcgggataggcctggccgccgcccacctgcccgcccggcgccgcgctccccaccgccgcgctccccaccgccgcgctcccccccgccctccccgccgacccatcgcgctcaccacgtttacccctctctgcccactcctcttctccgaccctccaggaggccttccccacgggattgtgggactttaccaaatcggtttgtaataacacctagaagacgctatccgatccatcaggcccagtattcctgtctgggggtacttcccaccgtgtgctggaatggttatcacaagaaggctgtgctgtcccctcgcaactccaggatggtgtgtagcccagtgactgtgaggatcgcccctcctgacagaagattttcgcgttctgcgataccagagcagataatcagctcaacactgtcctcaccatcaagtaacgccccagacccatgtgcaaaggagacagtactgagtgccctcaaagagaaggagaagaaaaggacagtggaggaagaagaccaaatattccttgatggccaggaaaataaaagaag

SEQ ID NO: 4851 - DNA, 1781 bp, Homo sapiens
agcattttctcctggaccccttgatgccggagctgctggtgtttcccgcccagacagatctgcatgaacacccactgtaccgggccggacacctcattctgcaggacagggtaggcaagaggaatagaaaagggaagaatgtgtaggcacgggaagggcctagcctggggtctctgtttacccggcccctgtgttctgcctgccaggccagctgtctcccagccatgctgctggacccccgccaggctcccatgtcatggatgcctgtgccaccccaggcaataaagaccagtcacttggctgctcttctgaagaaccaagggtgagtgccacaggaggaggaggaggacatggggtttgattttgtgcctttcagtgggtaatgaaggctgaaaggatgactttcgcttaactctttcctgctgcaccaaagtagttcacggtatttgccccaagctaagctttccccactgcaggtgtgagatgtggatcccttagcccttggggcagagaccccaggccagttacctctgaccctgggccctttaaatataggctgtttcaatattgtgtgtcctggcttaacctgcatgttctggttgtctgtgtcagctgtgacaggcccttagctgctccatgcatgctcagctcacccctgctctgccctctgccctaggaagatctttgcctttgacctggatgccaggcggctggcatccatggccacgctgctggcctgggctggcgtctcctgctgtgagctggctgaggaggacttcctggcggtctcccccttagatccgcgctatcgtgaggtccactatgtcctgctggatccttcctgcagtggctcgggtgagatggtgagaaggcgtggctgagggactcagaggtccacagcagcttagacctggagtcatctgttttggtcttagttctgacactttaatgggcttgggaccctggagcaaaagttctcctctgtgaagcgaggatttcaggagcgaggatttcaggactgaggcagcctgtgaagctgtgtaaccgagacacgcttttccttaggtatgccgagcagacagctggaggagcccggggcagggacacctagcccggtgcgtctgcatgccctggcagggttccagcagcgagccctgtgccacgcgctcactttcccttccctgcagcggctcgtctactccatgtgctccctctgccaggaggagaatgaagacatggtacaagatgcgctgcagcagaacccgggcgccttcaggctagctcccgccctgcctgcccggccccaccgaggcctgagcacgttcccgggtgccgagcactgcctccgggcttcccccaagaccacgcttagcggtggcttcttcgttgctgtaattgaacgggtcgagatgccgacgtgagtgagtgggggcatgcttgggaggcgcaggatggtactggcacatctaacatctacatttctctagctcagcctcacaggccaaagcatcagcaccagaacgcacacccagcccagccccaaagagaaagaagagagcaaaaagctgcagccggtgcttgcacaccgccttgcacatagcagaggctccgggctcactccttcctggtgggaaaggaagatgcctgtcctctccgtggaagaccctgggccctcaccgcaggcagcagtttgcgttttgaaaggttattgggtcccttcctcgggctgtgttcttgctggtgagcaaaagtgttgcctgcagaaataaaatgcagaacgt

SEQ ID NO: 4852 - DNA, 2828 bp, Homo sapiens
ctgaggcccacgcagggcctagggtgggaagatggcaggtgggggcggcgacctgagcaccaggaggctgaatgaatgtatttcaccagtagcaaatgagatgaaccatcttcctgcacacagccacgatttgcaaaggatgttcacggaagaccagggtgtagatgacaggctgctctatgacattgtattcaagcacttcaaaagaaataaggtggagatttcaaatgcaataaaaaagacatttccattcctcgagggcctccgtgatcgtgatctcatcacaaataaaatgtttgaagattctcaagattcttgtagaaacctggtccctgtacagagagtggtgtacaatgttcttagtgaactggagaagacatttaacctgccagttctggaagcactgttcagcgatgtcaacatgcaggaataccccgatttaattcacatttataaaggctttgaaaatggtaatccatgacaaattgcctctccaagaaagtgaagaagaagagagggaggagaggtctggcctccaactaagtcttgaacaaggaactggtgaaaactcttttcgaagcctgacttggccaccttcgggttccccatctcatgctggtacaaccccacctgaaaatggactctcagagcacccctgtgaaacagaacagataaatgcaaagagaaaagatacaaccagtgacaaagatgattcgctaggaagccaacaaacaaatgaacaatgtgctcaaaaggctgagccaacagagtcctgcgaacaaattgctgtccaagtgaataatggggatgctggaagggagatgccctgcccgttgccctgtgatgaagaaagcccagaggcagagctacacaaccatggaatccaaattaattcctgttctgtgcgactggtggatataaaaaaggaaaagccattttctaattcaaaagttgagtgccaagcccaagcaagaactcatcataaccaggcatctgacataatagtcatcagcagtgaggactctgaaggatccactgacgttgatgagcccttagaagtcttcatctcagcaccgagaagtgagcctgtgatcaataatgacaaccctttagaatcaaatgatgaaaaggagggccaagaagccacttgctcacgaccccagattgtaccagagcccatggatttcagaaaattatctacattcagagaaagttttaagaaaagagtgataggacaagaccacgacttttcagaatccagtgaggaggaggcgcccgcagaagcctcgagcggggcactgagaagcaagcatggtgagaaggctcctatgacttctagaagtacatctacttggagaatacccagcaggaagagacgtttcagcagtagtgacttttcagacctgagtaatggagaagagcttcaggaaacctgcagctcatccctaagaagagggtcaggatcacagccacaagaacctgaaaataagaagtgctcctgtgtcatgtgttttccaaaaggtgtgccaagaagccaagaagcaaggactgaaagtagtcaagcatctgacatgatggataccatggatgttgaaaacaattctactttggaaaaacacagtgggaaaagaagaaaaaagagaaggcatagatctaaagtaaatggtctccaaagagggagaaagaaagacagacctagaaaacatttaactctgaataacaaagtccaaaagaaaagatggcaacaaagaggaagaaaagccaacactagacctttgaaaagaagaagaaaaagaggtccaagaattcccaaagatgaaaatattaattttaaacaatctgaacttcctgtgacctgtggtgaggtgaagggcactctatataaggagcgattcaaacaaggaacctcaaagaagtgtatacagagtgaggataaaaagtggttcactcccagggaatttgaaattgaaggagaccgcggagcatccaagaactggaagctaagtatacgctgcggtggatataccctgaaagtcctgatggagaacaaatttctgccagaaccaccaagcacaagaaaaaagagaatactggaatctcacaacaataccttagttgacccttgtccggaaaactcaaatatatgtgaggtgtgcaacaaatggggacggctgttctgctgcgacacttgtccaagatcctttcatgagcactgccacatcccatccgtggaagctaacaagaacccgtggagttgcatcttctgcaggataaagactattcaggaaagatgcccagaaagccaatcaggtcatcaggaatctgaagtcctgatgaggcagatgctgcctgaggagcagttgaaatgtgaattcctcctcttgaaggtctactgtgattcgaaaagctgctttttcgcctcagaaccgtattataacagagaggggtctcagggcccacagaagcccatgtggttaaacaaagtcaagacaagtttgaatgagcagatgtacacccgagtagaagggtttgtgcaggacatgcgtctcatctttcataaccacaaggaattttacagggaagataaattcaccagactgggaattcaagtacaggacatctttgagaagaatttcagaaacatttttgcaattcaggaaacaagcaagaacattataatgtttatttagccattcttatctcctcccttcagatcctctggcagctagctacgcaatgtgcctgtggtcccactaatctgtgactgctcctgtggaaactccacatcacaattctccaaaatttatcattgccattttaaaaccgtc

SEQ ID NO: 4853 - DNA, 2199 bp, Homo sapiens
ctgaggcccacgcagggcctagggtgggaagatggcaggtgggggcggcgacctgagcaccaggaggctgaatgaatgtatttcaccagtagcaaatgagatgaaccatcttcctgcacacagccacgatttgcaaaggatgttcacggaagaccagggtgtagatgacaggctgctctatgacattgtattcaagcacttcaaaagaaataaggtggagatttcaaatgcaataaaaaagacatttccattcctcgagggcctccgtgatcgtgatctcatcacaaataaaatgtttgaagattctcaagattcttgtagaaacctggtccctgtacagagagtggtgtacaatgttcttagtgaactggagaagacatttaacctgccagttctggaagcactgttcagcgatgtcaacatgcaggaataccccgatttaattcacatttataaaggctttgaaaatggtaatccatgacaaattgcctctccaagaaagtgaagaagaagagagggaggagaggtctggcctccaactaagtcttgaacaaggaactggtgaaaactcttttcgaagcctgacttggccaccttcgggttccccatctcatgctggtacaaccccacctgaaaatggactctcagagcacccctgtgaaacagaacagataaatgcaaagagaaaagatacaaccagtgacaaagatgattcgctaggaagccaacaaacaaatgaacaatgtgctcaaaaggctgagccaacagagtcctgcgaacaaattgctgtccaagtgaataatggggatgctggaagggagatgccctgcccgttgccctgtgatgaagaaagcccagaggcagagctacacaaccatggaatccaaattaattcctgttctgtgcgactggtggatataaaaaaggaaaagccattttctaattcaaaagttgagtgccaagcccaagcaagaactcatcataaccaggcatctgacataatagtcatcagcagtgaggactctgaaggatccactgacgttgatgagcccttagaagtcttcatctcagcaccgagaagtgagcctgtgatcaataatgacaaccctttagaatcaaatgatgaaaaggagggccaagaagccacttgctcacgaccccagattgtaccagagcccatggatttcagaaaattatctacattcagagaaagttttaagaaaagagtgataggacaagaccacgacttttcagaatccagtgaggaggaggcgcccgcagaagcctcgagcggggcactgagaagcaagcatggtgagaaggctcctatgacttctagaagtacatctacttggagaatacccagcaggaagagacgtttcagcagtagtgacttttcagacctgagtaatggagaagagcttcaggaaacctgcagctcatccctaagaagagggtcaggatcacagccacaagaacctgaaaataagaagtgctcctgtgtcatgtgttttccaaaaggtgtgccaagaagccaagaagcaaggactgaaagtagtcaagcatctgacatgatggataccatggatgttgaaaacaattctactttggaaaaacacagtgggaaaagaagaaaaaagagaaggcatagatctaaagtaaatggtctccaaagagggagaaagaaagacagacctagaaaacatttaactctgaataacaaagtccaaaagaaaagatggcaacaaagaggaagaaaagccaacactagacctttgaaaagaagaagaaaaagaggtccaagaattcccaaagatgaaaatattaattttaaacaatctgaacttcctgtgacctgtggtgaggtgaagggcactctatataaggagcgattcaaacaaggaacctcaaagaagtgtatacagagtgaggataaaaagtggttcactcccagggaatttgaaattgaaggagaccgcggagcatccaagaactggaagctaagtatacgctgcggtggatataccctgaaagtcctgatggagaacaaatttctgccagaaccaccaagcacaagaaaaaaggtgatgatcaagtgatcttctgccaatgtctcgtctattatgttgttgattttctatctctgtggacttacagtctttaaattgacccatcatcataaaatttgattttataata

SEQ ID NO: 4854 - DNA, 3559 bp, Homo sapiens
ctgaggcccacgcagggcctagggtgggaagatggcaggtgggggcggcgacctgagcaccaggaggctgaatgaatgtatttcaccagtagcaaatgagatgaaccatcttcctgcacacagccacgatttgcaaaggatgttcacggaagaccagggtgtagatgacaggctgctctatgacattgtattcaagcacttcaaaagaaataaggtggagatttcaaatgcaataaaaaagacatttccattcctcgagggcctccgtgatcgtgatctcatcacaaataaaatgtttgaagattctcaagattcttgtagaaacctggtccctgtacagagagtggtgtacaatgttcttagtgaactggagaagacatttaacctgccagttctggaagcactgttcagcgatgtcaacatgcaggaataccccgatttaattcacatttataaaggctttgaaaatggtaatccatgacaaattgcctctccaagaaagtgaagaagaagagagggaggagaggtctggcctccaactaagtcttgaacaaggaactggtgaaaactcttttcgaagcctgacttggccaccttcgggttccccatctcatgctggtacaaccccacctgaaaatggactctcagagcacccctgtgaaacagaacagataaatgcaaagagaaaagatacaaccagtgacaaagatgattcgctaggaagccaacaaacaaatgaacaatgtgctcaaaaggctgagccaacagagtcctgcgaacaaattgctgtccaagtgaataatggggatgctggaagggagatgccctgcccgttgccctgtgatgaagaaagcccagaggcagagctacacaaccatggaatccaaattaattcctgttctgtgcgactggtggatataaaaaaggaaaagccattttctaattcaaaagttgagtgccaagcccaagcaagaactcatcataaccaggcatctgacataatagtcatcagcagtgaggactctgaaggatccactgacgttgatgagcccttagaagtcttcatctcagcaccgagaagtgagcctgtgatcaataatgacaaccctttagaatcaaatgatgaaaaggagggccaagaagccacttgctcacgaccccagattgtaccagagcccatggatttcagaaaattatctacattcagagaaagttttaagaaaagagtgataggacaagaccacgacttttcagaatccagtgaggaggaggcgcccgcagaagcctcgagcggggcactgagaagcaagcatggtgagaaggctcctatgacttctagaagtacatctacttggagaatacccagcaggaagagacgtttcagcagtagtgacttttcagacctgagtaatggagaagagcttcaggaaacctgcagctcatccctaagaagagggtcaggatcacagccacaagaacctgaaaataagaagtgctcctgtgtcatgtgttttccaaaaggtgtgccaagaagccaagaagcaaggactgaaagtagtcaagcatctgacatgatggataccatggatgttgaaaacaattctactttggaaaaacacagtgggaaaagaagaaaaaagagaaggcatagatctaaagtaaatggtctccaaagagggagaaagaaagacagacctagaaaacatttaactctgaataacaaagtccaaaagaaaagatggcaacaaagaggaagaaaagccaacactagacctttgaaaagaagaagaaaaagaggtccaagaattcccaaagatgaaaatattaattttaaacaatctgaacttcctgtgacctgtggtgaggtgaagggcactctatataaggagcgattcaaacaaggaacctcaaagaagtgtatacagagtgaggataaaaagtggttcactcccagggaatttgaaattgaaggagaccgcggagcatccaagaactggaagctaagtatacgctgcggtggatataccctgaaagtcctgatggagaacaaatttctgccagaaccaccaagcacaagaaaaaagagaatactggaatctcacaacaataccttagttgacccttgtgaggagcataagaagaagaacccagatgcttcagtcaagttctcagagtttttaaagaagtgctcagagacatggaagaccatttttgctaaagagaaaggaaaatttgaagatatggcaaaggcggacaaggcccattatgaaagagaaatgaaaacctatatccctcctaaaggggagaaaaaaaagaagttcaaggatcccaatgcacccaagaggcctcctttggcctttttcctgttctgctctgagtatcgcccaaaaatcaaaggagaacatcctggcctgtccattgatgatgttgtgaagaaactggcagggatgtggaataacaccgctgcagctgacaagcagttttatgaaaagaaggctgcaaagctgaaggaaaaatacaaaaaggatattgctgcatatcgagctaaaggaaagcctaattcagcaaaaaagagagttgtcaaggctgaaaaaagcaagaaaaagaaggaagaggaagaagatgaagaggatgaacaagaggaggaaaatgaagaagatgatgataaataagttgcttctagtgcagtttttttcttgtctataaagcatttaagctgcctgtacacaactcactccttttaaagaaaaaaacttcaacgtaagactgtgtaagatttgtttttaaaccgtacactgtgtttttttgtatagttaaccactaccgaatgtgtcttcagatagccctgtcctggtggtatttagccactaacctttgcctggtacagtatgggggttgtaaattggcatggaaatttaaagcaggttcttgttagtgcacagcacaaattagttgtatatgaggatggtagttttttcaccttcagttgtctctgatgtagcttatacaaaacatttgttgttctgttaactgaatgccactctgtaattgcaaaaaaaaaaaacagttgcagctgttttgttgacattctgaatgcttctaagtaaatacaatttttaaaaaaccgtatgagggaactgtgtagacaaggtaccaggtcagtcttcttccatgtctattagctccacaaagccaatctcaatccctcaaaacaatcttgtcatacttgaaaatatgacactctagtcaaagccttggtaaaataatcagtgtttccaatctgtcctgttacaaaagaaacagattattattgaacttatgcaaataaccattgtcataagaatgtttatgaatagtttccaaattatggcaaattcatgtagagagagaaaagtaactgttttggttttgctcacaaaagtctactttacctaagggctgtcagatataagtaacttaaaagaaagagaagttttcttgacttttgaaaacaaaatatgaaaagaatcggcaatgtttcaaacaaaaagtcataaaagtcactttattcctccatcaa

SEQ ID NO: 4855 - DNA, 3510 bp, Homo sapiens
cggtgtgctaagcgaggagtccgagtgtgtgagcttgagagccgcgcgctagagcgacccggcgagggatgcggccaccgggaccgcggccgccgcagccacgggcaggctcctgcttctgctgctggtgggctccacgcgcctgccttggcgctggccggctacatcgaggctcttgcagccaatgccggaacaggatttgctgttgctgagcctcaaatcgcaatgttttgtgggaagttaaatatgcatgtgaacattcagactgggaaatgggaacctgatccaacaggcaccaagagctgctttgaaacaaaagaagaagttcttcagtactgtcaggagatgtatccagagctacagatcacaaatgtgatggaggcaaaccagcgggttagtattgacaactggtgccggagggacaaaaagcaatgcaagagtcgctttgttacacctttcaagtgtctcgtgggtgaatttgtaagtgatgtcctgctagttccagaaaagtgccagtttttccacaaagagcggatggaggtgtgtgagaatcaccagcactggcacacggtagtcaaagaggcatgtctgactcagggaatgaccttatatagctacggcatgctgctcccatgtggggtagaccagttccatggcactgaatatgtgtgctgccctcagacaaagattattggatctgtgtcaaaagaagaggaagaggaagatgaagaggaagaggaagaggaagatgaagaggaagactatgatgtttataaaagtgaatttcctactgaagcagatctggaagacttcacagaagcagctgtggatgaggatgatgaggatgaggaagaaggggaggaagtggtggaggaccgagattactactatgacaccttcaaaggagatgactacaatgaggagaatcctactgaacccggcagcgacggcaccatgtcagacaaggaaattactcatgatgtcaaagttcctccaactcctctgccaaccaatgatgttgatgtgtatttcgagacctctgcagatgataatgagcatgctcgcttccagaaggctaaggagcagctggagattcggcaccgcaaccgaatggacagggtaaagaaggaatgggaagaggcagagcttcaagctaagaacctccccaaagcagagaggcagactctgattcagcacttccaagccatggttaaagctttagagaaggaagcagccagtgagaagcagcagctggtggagacccacctggcccgagtggaagctatgctgaatgaccgccgtcggatggctctggagaactacctggctgccttgcagtctgacccgccacggcctcatcgcattctccaggccttacggcgttatgtccgtgctgagaacaaagatcgcttacataccatccgtcattaccagcatgtgttggctgttgacccagaaaaggcggcccagatgaaatcccaggtgatgacacatctccacgtgattgaagaaaggaggaaccaaagcctctctctgctctacaaagtaccttatgtagcccaagaaattcaagaggaaattgatgagctccttcaggagcagcgtgcagatatggaccagttcactgcctcaatctcagagacccctgtggacgtccgggtgagctctgaggagagtgaggagatcccaccgttccaccccttccaccccttcccagccctacctgagaacgaaggatctggagtgggagagcaggatgggggactgatcggtgccgaagagaaagtgattaacagtaagaataaagtggatgaaaacatggtcattgacgagactctggatgttaaggaaatgattttcaatgccgagagagttggaggcctcgaggaagagcgggaatccgtgggcccactgcgggaggacttcagtctgagtagcagtgctctcattggcctgctggtcatcgcagtggccattgccacggtcatcgtcatcagcctggtgatgctgaggaagaggcagtatggcaccatcagccacgggatcgtggaggttgatccaatgctcaccccagaagagcgtcacctgaacaagatgcagaaccatggctatgagaaccccacctacaaatacctggagcagatgcagatttaggtggcagggagcgcggcagccctggcggagggatgcaggtgggccggaagatcccacgattccgatcgactgccaagcagcagccgctgccaggggctgcgtctgacatcctgacctcctggactgtaggactatataaagtactactgtagaactgcaatttccattcttttaaatgggtgaaaaatggtaatataacaatatatgatatataaaccttaaatgaaaaaaatgatctattgcagatatttgatgtagttttcttttttaaattaatcagaaaccccacttccattgtattgtctgacacatgctctcaatatataataaatgggaaatgtcgattttcaataatagacttatatgcaggctgtcgttccggttatgttgtgtaagtcaactcttcagcctcattcactgtcctggcttttatttaaagaaaaaaaaggcagtattccctttttaaatgagctttcaggaagttgctgagaaatggggtggaatagggaactgtaatggccactgaagcacgtgagagaccctcgcaaaatgatgtgaaaggaccagtttcttgaagtccagtgtttccacggctggatacctgtgtgtctccataaaagtcctgtcaccaaggacgttaaaggcattttattccagcgtcttctagagagcttagtgtatacagatgagggtgtccgctgctgctttccttcggaatccagtgcttccacagagattagcctgtagcttatatttgacattcttcactgtctgttgtttacctaccgtagctttttaccgttcacttccccttccaactatgtccagatgtgcaggctcctcctctctggactttctccaaaggcactgaccctcggcctctactttgtcccctcacctccaccccctcctgtcaccggccttgtgacattcactcagagaagaccacaccaaggaggcggccgctggcccaggagagaacacggggaggtttgtttgtgtgaaaggaaagtagtccaggctgtccctgaaactgagtctgtggacactgtggaaagctttgaacaattgtgttttcgtcacaggagtctttgtaatgcttgtacagttgatgtcgatgctcactgcttctgctttttctttctttttattttaaatctgaaggttctggtaacctgtggtgtatttttattttcctgtgactgtttttgttttgtttttttcctttttcctcccctttgaccctattcatgtctctacccactatgcacagattaaacttcacctacaaactccttaatatgatctgtggagaatgtacacagtttaaacacatcaataaatactttaacttcc

SEQ ID NO: 4856 - DNA, 1842 bp, Homo sapiens
gctaagcgaggagtccgagtgtgtgagcttgagagccgcgcgctagagcgacccggcgagggatgcggccaccgggaccgcggccgccgcagccacgggcaggctcctgcttctgctgctggtgggctccacgcgcctgccttggcgctggccggctacatcgaggctcttgcagccaatgccggaacaggatttgctgttgctgagcctcaaatcgcaatgttttgtgggaagttaaatatgcatgtgaacattcagactgggaaatgggaacctgatccaacaggcaccaagagctgctttgaaacaaaagaagaagttcttcagtactgtcaggagatgtatccagagctacagatcacaaatgtgatggaggcaaaccagcgggttagtattgacaactggtgccggagggacaaaaagcaatgcaagagtcgctttgttacacctttcaagtgtctcgttcctccaactcctctgccaaccaatgatgttgatgtgtatttcgagacctctgcagatgataatgagcatgctcgcttccagaaggctaaggagcagctggagattcggcaccgcaaccgaatggacagggtaaagaaggaatgggaagaggcagagcttcaagctaagaacctccccaaagcagagaggcagactctgattcagcacttccaagccatggttaaagctttagagaaggaagcagccagtgagaagcagcagctggtggagacccacctggcccgagtggaagctatgctgaatgaccgccgtcggatggctctggagaactacctggctgccttgcagtctgacccgccacggcctcatcgcattctccaggccttacggcgttatgtccgtgctgagaacaaagatcgcttacataccatccgtcattaccagcatgtgttggctgttgacccagaaaaggcggcccagatgaaatcccaggtgatgacacatctccacgtgattgaagaaaggaggaaccaaagcctctctctgctctacaaagtaccttatgtagcccaagaaattcaagaggaaattgatgagctccttcaggagcagcgtgcagatatggaccagttcactgcctcaatctcagagacccctgtggacgtccgggtgagctctgaggagagtgaggagatcccaccgttccaccccttccaccccttcccagccctacctgagaacgaaggatctggagtgggagagcaggatgggggactgatcggtgccgaagagaaagtgattaacagtaagaataaagtggatgaaaacatggtcattgacgagactctggatgttaaggaaatgattttcaatgccgagagagttggaggcctcgaggaagagcgggaatccgtgggcccactgcgggaggacttcagtctgagtagcagtgctctcattggcctgctggtcatcgcagtggccattgccacggtcatcgtcatcagcctggtgatgctgaggaagaggcagtatggcaccatcagccacgggatcgtggaggttgatccaatgctcaccccagaagagcgtcacctgaacaagatgcagaaccatggctatgagaaccccacctacaaatacctggagcagatgcagatttaggtggcagggagcgcggcagccctggcggagggatgcaggtgggccggaagatcccacgattccgatcgactgccaagcagcagccgctgccaggggctgcgtctgacatcctgacctcctggactgtaggactatataaagtactactgtagaactgcaatttccattcttttaaatgggtgaaaaatggtaatataacaatatatgatatat

SEQ ID NO: 4857 - DNA, 1218 bp, Homo sapiens
ctcgcgccagcagtttttggctttcaccccccatcagtgaccaaagacttgaccactcaaagtccagctccccagaacactgctcgacatggaaaccagtgtgattgaaggtggattaaatatcactctcaccatccgactacttatgcatggaaaggaagttggcagtatcatcggaaagaaaggagaatcagttaagaagatgcgcgaggagagtggtgcacctatcaacatctcagaagggaattgtcctgagagaattatcacttttgctggacctgctaatgccgtcttcaaaggctttgctatgatcattgacaaactggaagaggacataagcagctctatgaccagtagcacagctgccagtagacccccagtcaccctgaggctggtggtccctgctagtcagtgtggctctctcattggaaaaggtggttgcaagatcaaggaaatacgagagagtacaggggctcaggtctagatggcaggggatatgctacccaactcaactgagcaggccatcactattgctggcatcccacaatccatcattgagtgtgtcaaacagatctgtgtggtcatgttggagtcccccccgaagggcgtgaccatcccgtaccagctcaagccttccagctctccggtcatctttgcaggcggtcaggcctatacccttcaaggacagtttgccattccacagccagatttgaccatgctgcaccagttggcaatgcaacagtctcattttcccatgacgcatggcaacactggattcagtgcaggtttggatacatctgctcagactacttctcatgaacttaccattccaaacgatttgattggctgcataatcgggcgtcaaggcgccaaaataaatgagatccgtcagatgtctggggcacagatcaaaattgcgaacccagtggaaggatctactgataggcaggttaccatcactggatctgctgccagcattagcctggctcaatatctaatcaatgtcaggctttcctcggagacgggtggcatggggagcagctagaacaatgcagatttatccacaatccctttctgctgttcaccaccacccatgatccatctgtgtagtttctgaacagtcagcgatttcaggttttaaatagtttgtaaattttcagtttctacacactttatcatccactcgtgattttttacttaaagtgttttaattccttt

SEQ ID NO: 4858 - DNA, 5524 bp, Homo sapiens
tggatttcgaggtcggggataaaatccgaattctggcgaccttggaagatggctggctggaaggatccctgaagggcaggacaggcatctttccttaccggtttgtgaaattatgtcctgacacacgggtggaggaaaccatggctctgccccaggaaggcagccttgccaggatcccggaaacttctttggattgtttggagaacaccttaggagtagaggaacaaagacatgaaaccagtgaccatgaggccgaggagcctgactgcattatttctgaagcacccacttctcccctcggtcatctgacttcagagtatgacacagacagaaactcttatcaggacgaggacaccgcaggagggcccccgagaagcccaggcgtggagtgggaaatgcctcttgccacagactctcccacatctgaccctacagaagtagtcaatggtatttcctcccaacctcaggtcccttttcatcccaacttgcagaaaagccagtattattctacagtgggagggagccacccgcactcagaacagtaccccgaccttcttcccctagaagcaaggactagagactatgccagcctacctcccaaaagaatgtattcccagctaaaaactcttcagaagccagtgctccctctttacaggggctcttctgtttcagcttcaagggtagtcaaacccagacaatcaagtcctcagctccacaacctagcaagttatactaaaaagcaccacacgtccagtgtttactccatctcagagagattggagatgaagcctggtccgcaagcccaagggcttgttatggaagcagcaacacattcacagggagacggcagcactgacctggactcgaagctgacacaacagctgatcgagtttgagaagagcttggcagggcccggcacagagccagataaaattttacgccacttttcaatcatggactttaactctgagaaggatattgtccgaggttcctcaaagttaatcaccgagcaggagctgccggaaaggagaaaggccctaaggccaccgccacctcgtccctgtactccggtatccacttctccccatttgctggttgaccagaacctaaaacctgcaccacccttggtggtgcgaccctctcgcccagctcccctgcctccctcagcacagcagagaacgaatgcggtatcccccaagctcctatctcgacaccgtcctacctgtgagaccttagaaaaggagggccctggtcatatgggaaggagtctggaccagacctccccatgccccttagtgctggtgaggattgaggaaatggagcgggacttggatatgtacagtagagctcaagaagagctaaacctcatgctggaggagaagcaggatgaatcatcaagagcagagaccctcgaggatctcaagttctgtgaaagtaacattgaaagtttgaatatggaactccagcaactaagagaaatgacgctcctctcctcccagtcttcatcactggtggccccttctgggtctgtgtctgccgaaaatccagagcagaggatgctggagaagagagccaaggtcatagaagaacttcttcagacagaaagagactacattcgggatctggaaatgtgtattgagcggatcatggtacccatgcagcaggcacaggtaccaaacattgattttgagggactttttggaaatatgcagatggtgattaaggtctcgaagcaattattggctgctctggaaatcagcgatgctgtaggacctgtgtttcttggtcaccgggatgagcttgagggaacatacaagatttactgccagaatcatgatgaggccattgcgctgcttgaaatctacgagaaggatgagaagatccagaagcatcttcaggactccttggcagatctgaagagcctatacaacgaatggggatgcacaaattatattaacctgggctccttcctcatcaaaccagtacagagagtaatgcgttacccgctgttgctaatggagttgctgaattccaccccagaatcccacccagataaagtgcctttaaccaatgcagtccttgcggtcaaggaaatcaacgttaacattaatgaatataaacggcgaaaggacctggtcctcaagtaccgtaagggtgatgaagatagccttatggagaaaatttccaaactgaacatccactccatcatcaagaaatccaaccgagttagcagtcacctgaagcatctcactggctttgctcctcagataaaagatgaagtatttgaagaaacagaaaaaaacttccgaatgcaagaaagattgattaagtcttttatccgagacctgtctctctacctccagcacatccgggagtccgcatgtgtgaaagtggtggctgctgtgagcatgtgggatgtgtgcatggagagaggacaccgggacctggagcagtttgagagggtgcatcgctacatcagtgaccagctcttcacaaactttaaggagaggacagagcggcttgtcatctcccccttaaatcagttactgagcatgtttacagggccccataagctggtacagaaacgctttgacaagctcctggacttctataactgtacagaacgggcagaaaagctaaaggacaagaagaccctggaggagctgcagtcggcccggaacaactatgaggccctgaatgcacagctgctggatgagctgcccaagttccaccagtacgcccagggcctcttcaccaactgtgtccacggctatgctgaagcccactgtgactttgtgcaccaggctctggagcaattaaagccactgctttcgttactcaaagtggctggcagagagggaaaccttattgccatcttccacgaagagcacagcagagttctgcagcaactccaggtttttaccttcttcccggagtctcttccagctaccaagaagccatttgagaggaaaaccattgaccgccagtctgctcgaaagccactcctgggcctgccaagttacatgctacagtcagaagaactccgggcctccctcctggccaggtatccccctgaaaaactcttccaggcagaacggaacttcaatgctgctcaagacttggatgtctcacttttggaaggtgacctggtgggtgtgattaagaaaaaagaccccatgggcagccagaaccgctggctgattgacaatggagtcaccaaaggcttcgtgtacagctctttcctaaagccctacaatcctcgccgcagccactccgatgcctccgtgggtagccactcctccacagagtctgagcacggcagctcctcccccaggttcccacgccagaacagcggcagcaccctgaccttcaaccccagcagcatggctgtatcctttacctcggggtcttgccagaagcagcctcaagatgcatctcctccgccaaaagaatgtgaccaaggaactctcagtgcatccctaaatccgagtaattcagagagtagtccttccagatgcccttcagacccagactccacctcccagccaaggtcaggggactctgcagatgtagctagagatgtaaagcaacccactgccacgccgaggagctaccggaacttcaggcatccagaaatagttggctactccgtaccaggacgaaatgggcaaagtcaagacctcgtcaaaggatgtgcaagaacagcccaggctccggaagacagaagtacagagccagatggcagtgaggcagaaggcaaccaggtctattttgctgtctacaccttcaaggcacgaaacccaaatgagctgagcgtgtcagccaatcagaaactcaagatcctcgagtttaaagatgttacaggaaatacagagtggtggttagctgaggttaacgggaagaagggctacgttccctccaattatatccgcaaaaccgagtacacctgagcccacgttgcctgccacccagccttgctgcctttgctttcagtccgccgagggttctggcggcccaccgagagggcgcctgctcctgagacacaggccctgtctgcgttgcttaaccatggcatggtggagcacaccacagatcttgttctcctcgattgggttgtaaaccttgatgctcactagaatctctagaatttgaaatggaccctggggctttgcaaatgacttagtgactatgagaagagagacaagtcttagagctggcttttggaaaggagaaacttgcagtcagaagcccagtgtcctatgtatgcaggaagctgtgctctagcaatagacagtgttggtaatggttgtgctgtacggcgtttggggtggccccatgttccatgctcagctgaccggatgccaactcagatgaaaagaattcatggctctgggcaccccgtgaggcagtgcttgcacatggctgggagtttgtcgggattgaaccaaacctagtgcttcaaagctcctgggacacctccagtgtccagcacacattctcatacatactgcccctaatttctaaagtccctaaagcactacattctgtaaccttgtttcttttactccattcccagattagttatgcaaaattcaactgcgttctacttttagaagtgtttagggtctttattttctgttgacccttcatctgaaagattctcttcccttgttaggtacaatcactgcccccccgcttttttttttgagatggggtcttgctatgttgcccaggctggtcttaaacgcctgggctcaagcaaccctcccgcctccctgctgagattacaggtgtaagccaccataccgcaacctcaatgacacctttctgatggtctttacacagtctgtgatgtctggtggcccccctgccctggactcaataattgatagattttcctagagtaacagtatgagagctccagccattccattaaaagtattagttctgctttgagctgaaaccagttgagcctaatggaagactggatgtctttcttcttcatccaagcaccctaatgactgtttagttacatccatagatgcagacaacataacacctgtgacttacttgaattgggataagccattccagaagtagcttatcctagacttggaaataagatttttttcaccactaacttccatgcttcagagatgacattcaaagccagattcccaagtgcctgatcatacctcccagtctcaggaagatatttgcttaccccttagaccaagaatcttaagatcttccccagctatgaagcctatcttggaatgggaaaccatgaaatttgtcttttaaaagaaagggaagaaatagccttacagcccctgttcctccaagtgcacatttagccttaaaatcctgggagtcgggagacaccgtggagtcctaacatccacagtgtctgctggtcgtggtcagaaggcagtaatgcaagagtccttttgtgaagagtgtttctatgtagagatgtttatatttaagtagttcttttataaataaaagcatttctaatggc

SEQ ID NO: 4859 - DNA, 5159 bp, Homo sapiens
catttggattctcaggaagatttctgaaactggaaagccatagcataactgaatcaaaatcgttgattccagtagcttggacatccctgacacagatgcttttggaagcacctggtattttcttattgggtcaaagaaaaagattctcaaccatgccagaaacagaaacacatgagagagagactgaattgttttcaccaccttctgatgtccgaggcatgacaaaacttgatagaacagcttttaaaaagacagtcaacattccagtgcttaaagtgaggaaagaaatagtcagtaaattgatgcgatccctaaaaagggcagcattgcagcgcccaggcataagacgtgtgattgaagatccggaagataaagaaagtagactaatcatgttggatccctataaaatatttactcatgattcctttgagaaagcagaactcagtgttttagagcagcttaatgtcagtccacagatctctaaatacaatttggaactaacatatgaacactttaagtcagaagaaatcttgagagctgtgcttcctgaaggtcaagatgtaacttcagggtttagcaggattggacatattgcacacctaaaccttcgagatcatcagctgtctttcaaacatttaattggccaggttatgattgacaaaaatccaggaatcacctcagcagtaaataaaataaataatattgacaatatgtaccgaaatttccaaatggaagtgctatctggagagcagaacatgatgacaaaggttcgagaaaacaactacacctatgaatttgatttttcaaaagtctattggaatcctcgtctgtctacagaacacagccgtatcacagaacttctcaaacctggggatgtcctatttgatgtttttgctggggttgggccctttgccattccagtagcaaagaaaaactgcactgtatttgccaatgatctcaatcctgaatctcataaatggctgttgtacaactgtaaattaaataaagtggaccaaaaggtgaaagtcttcaacttggatgggaaagacttcctccaaggaccagtcaaagaagagttaatgcagctgctgggtctgtcaaaagaaagaaaaccctctgtgcacgttgtcatgaacttgccagcaaaagctatagagtttcttagtgctttcaagtggcttttagatgggcagccatgcagcagtgagttccttcccatagtgcattgttatagcttttccaaagatgctaaccctgctgaggatgttcggcaaagggctggagctgtgttaggcatttctctggaggcatgcagttcagttcacctggtaagaaatgtggccccaaacaaggaaatgctgtgcatcacgtttcagattcctgcctctgtcctctacaagaaccagaccagaaatccagagaatcatgaagatccacctcttaaaaggcagaggacggctgaagccttttcagacgaaaaaacacaaattgtttcaaacacttaattggaaatgttttctccatctccctaccagacttacatgtagtgaaatagaatttgtattatttaataaaattttagggtttggtttttactattgaacccttgtactttgccttattttacaaattgaggattaccaattaaactttaactgaactaaggctaccaaatacattccctgttatctaaattataacatacaattattttataacaaaatatatctaatttttattggataaatatgaataaatattttctctcagggaaaataatttttgaaagtagggtgattgagtactaactaggaaggtattaacaccactttgtagttgtcctttacgtaactactcctttactgccaattaactatcaccataaaagtaataaaaaatgaaattatttagaacggggcaggcaaactacatcctgcaggccaaatctgtcccaccacctgttttcatatggcctgtggcctaataatgttcttacgttttccattggttgaaaaataatcaaaagaacattttgtgacgtgaaaattttatgacatctattatgtatcagttttaaaaattagaattgtatgaaattaagagtttcagagttcataaagtttgattggaacataccatgctcatttgtttacatatcatctgcagctgttttttgtttttaatatggaacgcttcacgaatttgcatgtcatccttgcgcagggaccattctgatcttctctgtaccattccagttttttagtatatgtgctgctgaagtgaggactgcagctgctttcttgaacaatagcagagttgagtggttgcaacacacactgaatgtgactgtcatcacttcacactgctgtttgacacatcacaaatcactgatgtggttgtaacgacagcattttgagtgccatgtatatcacatgaacccacattttattttttattaccagagcatatctattatagcaaaacaagaaaagtggactttgttgttatttttaaagtacagtagggtgtgaattattttgatgttgaattagacgacaaagcatctatatagctaagctaaaagaataaccattgacattaccagacaaaccactcatcacagtattcccaactcacaggcaagcaactgttagaaaaattagaaaatttaaaatggaaataacaaagcagaatttcttcacaaaatgaaaatgaggctgcaacaacagtaagtctctaagtcaatcatttgttagccaagcaaagccatttattgatggtgtgaattaattatgtttggatgcagcagctgaatatatccagagaaaataaacttaagattactggcctttggcaagaacagttgcttaaagagttaaggacattgaaagcgacataaatagtcactttaaaaaggaaatgattctggatggttctttgactctatttttatttttacttagagacagggtcttgctctgttgcccaggctggagtgtagagacacagttacacctcaatgtaaccttgaactcctaggcttgagatcttcccatctcggcttcccaatgtgtgaaggttacaggtgtgagcccttatatgtggccctcgtgaatggtttagcactatccccttggtggtgtccttaagataatgagttatgagatcttgttgtttcaaagtatgtggcactcgccccccacactctcttgctcctgccttcgccatgtgaagtgccttctcctattttgccttctaccatgagtaaaagcttcctgaggcttccccagaagcagatgccagtgctatgcttcctatagcctggagaactgtgagccaattatacctcttttcttataaattacccagtatcaagtatttctttatagcaatgcaagaatggcctaaaacacaaggcaaaacaactttgatatggtacagtcattttgacaatcgatatttgaatcacaatatttgatgacaatatccttacacatttgtcatactatcaaagagaaagaaacaagatttccattcccacaaattttagtgagtatattttctgagttcagcatttttagggacctaggtgcaagtgcaaaggaaatttccctgtttcaaaatctatttaactgcaattgaggtgattcaacctaattttcagtaagaagtgattaaaataatgacatgctaaaaggcaaatttcaagggaagaaatgtaaaagaattttacaaatgctttccaagtgatgaatatgctcagttaatttcatatgctcctggattgatagcagtatttggcaatacctatctgtatgagaagacatttttaaagatgaaatgtgtaaaatcttattaccattagtattaatggttaatgatggttaatgataaccattaataggcaatcatttacaactgattttgatcacagggaacacttacttagaaccctgattagaggcaatgttattctcaccaaaaaaggcattacaaaaaattgggctatattttgaattttgtcaattaaaaaagcgtgggagcagtgtgaaggagaagaggcaagaacgacccctggaccgaccaaagcccgcgcgctgctgcgtcccacacccggtgcccacatcccgccgccgccgccgccgccatgcccaagagaaagactgaaggggatgctaaaggagataaagccaaggtgaaggatgaatcacagagaagatctgcgaggttgtctgctaaacctgctcctccaaagccagagcccaagcctaaaaaggcccctgcaaagaagggagagaaggtacccaaagggaaaaagagaaaagctgatgctggcaaggagcgggaaggtgctggagatcccaagtgaagtgtgtgcattttttataactgtacttctggtgactgtacagtttgaaatattctttatcaagttttataaaaatgcagaattttgttttactttttttaagctatgttgttagcacacagaacacttcattgttgtttttgggggaaggggtatgtgtcactaatagaatatctctgaagctggattgatacggggaaaacatctttcccttctagttttgagagacttcctcttggctcccaggaggagggatttcctgactttgacacacatggccaccttggcacaaaagccttgtggtatggaaaaacaaattcgtttttatgtcttcttttccctttccatctttcagcatagacttaatccccttaagcccagacatctgttgggacctgacccccggtcattggttaccagtgtgtctggcaatctggactttccagtgatgccactgagatggcacctgtcaaaagagcagtggttccatttctagattatggatcttcggataaattctgccattttcatttcacttcctgaaagtcagggttggcttgtgaaaagttgttaaacaacatgctaaatgtgaaatgttaaccctctaaactttccctgttcagagcatcagatgaggacttcattgggttttatagcggctgatttttggtagtccattgaagaagagagtttgaaagttgtatactgttaatgactgtctgcccatgtcctgcctgaaataccatgattgtttatggaaagtatctttaataaagctggatacagtttg

SEQ ID NO: 4860 - DNA, 1194 bp, Homo sapiens
gcttagggttcggaattacaaaaccaaattccctgctaaggctaaagttgatctgaacaaaagtaagggcaaggcaaagagaatagacattagacagggacctgaaaggatccagaaatgggactttacatcccacagaggaaacagaatgggagctgactgatatggtggtgtgggtgactggagcctcgagtggaattggtgaggagctggcttaccagttgtctaaactaggagtttctcttgtgctgtcagccagaagagtgcatgagctggaaagggtgaaaagaagatgcctagagaatggcaatttaaaagaaaaagatatacttgttttgccccttgacctgaccgacactggttcccatgaagcggctaccaaagctgttctccaggagtttggtagaatcgacattctggtcaacaatggtggaatgtcccagcgttctctgtgcatggataccagcttggatgtctacagaaagctaatagagcttaactacttagggacggtgtccttgacaaaatgtgttctgcctcacatgatcgagaggaagcaaggaaagattgttactgtgaatagcatcctgggtatcatatctgtacctctttccattggatactgtgctagcaagcatgctctccggggtttttttaatggccttcgaacagaacttgccacatacccaggtataatagtttctaacatttgcccaggacctgtgcaatcaaatattgtggagaattccctagctggagaagtcacaaagactataggcaataatggagaccagtcccacaagatgacaaccagtcgttgtgtgcggctgatgttaatcagcatggccaatgatttgaaagaagtttggatctcagaacaacctttcttgttagtaacatatttgtggcaatacatgccaacctgggcctggtggataaccaacaagatggggaagaaaaggattgagaactttaagagtggtgtggatgcagactcttcttattttaaaatctttaagacaaaacatgactgaaaagagcacctgtacttttcaagccactggagggagaaatggaaaacatgaaaacagcaatcttcttatgcttctgaataatcaaagactaatttgtgattttactttttaatagatatgactttgcttccaacatggaatgaaataaaaaataaataat

SEQ ID NO: 4861 - DNA, 1304 bp, Homo sapiens
tcagtataatatcaatacagaagaattatattcctacctaaaggaattcatccacatactatatttcaggcatctattggtgaatcccagagaccgccgagttgtgattatcgaatcggtattatgtccttctcacttcagagagacactcactcgtgttcttttcaaatattttgaggttccatctgtcttgcttgctccaagtcatctaatggctcttctgacgcttggaattaattctgccatggtcctagattgtggatatagggaaagcctggtgttacccatatatgaaggaatcccagttctaaattgttggggagcactacccctaggaggaaaagctcttcacaaagagttggaaactcaactattggaacaatgtactgttgacacaagtgttgctaaagaacagagccttccctcagtgatggcgcgtacttgctttgtaagtgatctgaagcgaggactaaaaatccaagcagcaaaatttaatattgatgggaataatgagcgtccctccccacccccaaatgttgactatccattagatggagagaagattttacatatccttggatcaatcagagattcagttgtggaaattctttttgaacaagataatgaagagcaatcagttgccactttaatattggattcccttatacagtgtccgatagacaccaggaagcaactagcagagaatttggtagtcataggtggcacttctatgttgccaggatttctccacagattgcttgcagaaataaggtatttggtagaaaaaccaaaatataaaaaagcacttggcactaagacatttcgaattcatactccacctgcaaaagctaattgtgtggcctggttgggaggggctatttttggagcattacaagatatacttgggagccgttctgtttcaaaggaatattataatcagacgggccgtatacctgattggtgttctctcaataacccacctttggaaatgatgtttgatgtcgggaaaactcaaccacctctgatgaagagagcattttccactgagaaatagaagtttgattaaaaatcaaccttgcttcatatcaaatatttaaccaattataagcaaattgtacaaagtatgtaggatgttttgttatagaggactatagtggaagtgaaagcattctgtgtttactctttgcattaatatataattcttttgactttgtttctcttgtgtagtggtaaaatggtagctggtgcttattgagatttgctgtatttatatcaataaagtatagtaaagcagtttgattttg

SEQ ID NO: 4862 - DNA, 1534 bp, Homo sapiens
gcttccttcgttattggagccaggcctacaccccagcaaccatgtccaagggacctgcagttggtattgatcttggcaccacctactcttgtgtgggtgttttccagcacggaaaagtcgagataattgccaatgatcagggaaaccgaaccactccaagctatgtcgcctttacggacactgaacggttgatcggtgatgccgcaaagaatcaagttgcaatgaaccccaccaacacagtttttgatgccaaacgtctgattggacgcagatttgatgatgctgttgtccagtctgatatgaaacattggccctttatggtggtgaatgatgctggcaggcccaaggtccaagtagaatacaagggagagaccaaaagcttctatccagaggaggtgtcttctatggttctgacaaagatgaaggaaattgcagaagcctaccttgggaagactgttaccaatgctgtggtcacagtgccagcttactttaatgactctcagcgtcaggctaccaaagatgctggaactattgctggtctcaatgtacttagaattattaatgagccaactgctgctgctattgcttacggcttagacaaaaaggttggagcagaaagaaacgtgctcatctttgacctgggaggtggcacttttgatgtgtcaatcctcactattgaggatggaatctttgaggtcaagtctacagctggagacacccacttgggtggagaagattttgacaaccgaatggtcaaccattttattgctgagtttaagcgcaagcataagaaggacatcagtgagaacaagagagctgtaagacgcctccgtactgcttgtgaacgtgctaagcgtaccctctcttccagcacccaggccagtattgagatcgattctctctatgaaggaatcgacttctatacctccattacccgtgcccgatttgaagaactgaatgctgacctgttccgtggcaccctggacccagtagagaaagcccttcgagatgccaaactagacaagtcacagattcatgatattgtcctggttggtggttctactcgtatccccaagattcagaagcttctccaagacttcttcaatggaaaagaactgaataagagcatcaaccctgatgaagctgttgcttatggtgcagctgtccaggcagccatcttgtctggagacaagtctgagaatgttcaagatttgctgctcttggatgtcactcctctttcccttggtattgaaactgctggtggagtcatgactgtcctcatcaagcgtaataccaccattcctaccaagcagacacagaccttcactacctattctgacaaccagcctggtgtgcttattcaggtttatgaaggcgagcgtgccatgacaaaggataacaacctgcttggcaagtttgaactcacaggcatgccaggaggaatgcctgggggatttcctggtggtggagctcctccctctggtggtgcttcctcagggcccaccattgaagaggttgattaagccaaccaagt

SEQ ID NO: 4863 - DNA, 2732 bp, Homo sapiens
ggttgccaggcaacggaggcacggcccggcccgcgttaaggaggagggcgcagaccgaaggacactgaaagagctgtaacaaccccactttcgattggttgaagagctctcagccttctcatgagccaatgagaagaggcacgcggatggcgtcagacgctatgcgactcctcccacccacgctctggcaatgcgattggagaccgcggaggcctacgtcggacccggaggccctgaatgccccatgcgcaccccacagctcgcgctcctgcaagtgttctttctggtgttccccgatggcgtccggcctcagccctcttcctccccatcaggggcagtgcccacgtctttggagctgcagcgagggacggatggcggaaccctccagtccccttcagaggcgactgcaactcgcccggccgtgcctggactccctacagtggtccctactctcgtgactccctcggcccctgggaataggactgtggacctcttcccagtcttaccgatctgtgtctgtgacttgactcctggagcctgcgatataaattgctgctgcgacagggactgctatcttctccatccgaggacagttttctccttctgccttccaggcagcgtaaggtcttcaagctgggtttgtgtagacaactctgttatcttcaggagtaattccccgtttccttcaagagttttcatggattctaatggaatcaggcagttttgtgtccatgtgaacaactcaaacttaaactatttccagaagcttcaaaaggtcaatgcaaccaacttccaggccctggctgcagagtttggaggcgaatcattcacttcaacattccaaactcaatcaccaccatctttttacagggctggggaccccattcttacttacttccccaagtggtctgtaataagcttgctgagacaacctgcaggagttggagctgggggactctgtgctgaaagcaatcctgcaggtttcctagagagtaaaagtacaacttgcactcgttttttcaagaacctggctagtagctgtaccttggattcagccctcaatgctgcctcttactataacttcacagtcttaaaggttccaagaagcatgactgatccacagaatatggagttccaggttcctgtaatacttacctcacaggctaatgctcctctgttggctggaaacacttgtcagaatgtagtttctcaggtcacctatgagatagagaccaatgggacttttggaatccagaaagtttctgtcagtttgggacaaaccaacctgactgttgagccaggcgcttccttacagcaacacttcatccttcgcttcagggcttttcaacagagcacagctgcttctctcaccagtcctagaagtgggaatcctggctatatagttgggaagccactcttggctctgactgatgatataagttactcaatgaccctcttacagagccagggtaatggaagttgctctgttaaaagacatgaagtgcagtttggagtgaatgcaatatctggatgcaagctcaggttgaagaaggcagactgcagccacttgcagcaggagatttatcagactcttcatggaaggcccagaccagagtatgttgccatctttggtaatgctgacccagcccagaaaggagggtggaccaggatcctcaacaggcactgcagcatttcagctataaactgtacttcctgctgtctcataccagtttccctggagatccaggtattgtgggcatatgtaggtctcctgtccaacccgcaagctcatgtatcaggagttcgattcctataccagtgccagtctatacaggattctcagcaagttacagaagtatctttgacaactcttgtgaactttgtggacattacccagaagccacagcctccaaggggccaacccaaaatggactggaaatggccattcgacttctttcccttcaaagtggcattcagcagaggagtattctctcaaaaatgctcagtctctcccatccttatcctgtgcctcttactacttggagttctcaacctagagactatgtgaagaaaagaaaataatcagatttcagttttccctatgagaaactctgaggcagccacttatcttggctaaatagaacctcacctgctcatgaccagagagcatttaggataatagaggacctaactgaaggaatccttgtatatgaaaggagttattttagaaaagcaataaaaatattttattcatcatagctctctgctttgggctctgcaggccaccagatacacatgaggcccctacttctcaagctgggaaggccaagagccttccttcagcctttctggttatgttacacctagctgaatgtttacaaggtctggatccatcagccctcaggcacagttgggccaagcagaaagagagaaacacttctgctgtcaccttgaatgaactcaggaatagcttccctctggactgtagaggagctaactgtttggaacagaaaactgctggctgttgattttgtctggttcctttgccaacatctgggcacaccctttgcccagacacgagtggggaaagcagttctttctcctcagtttccaaagtaaatggggaatcccagctttcttttctactagcaaatgaccctaccatttatttctgcctttttcttccgttcattgtgaggaaaaataaaactggttgagagctttgttgtact

SEQ ID NO: 4864 - DNA, 1229 bp, Homo sapiens
acaatttctccttcctctggaaacctctgttttcttagatttggagcagggtggtcacactgaccttgcagagttctgagagtcagagacagaacatgaaaggcctggaaaacattctccaaaaagaagctgcaacatgtgtggacaatgggcttttcatgcctctcttactgtctcttactgtctgttgacctggtgcaagaaacatgctctggtgatggctgtgagggaggaatgaggatagacatagacactcctgtgtctcaaacatgcttctttattactctgttatgactctgtcttccctggggcaggaccccagcctgcctacatttgcagacagacacagtggcatgtggagacaacagtgtgtcccaatgacttttctttaccccccagctgtcggcagtactcagtggaagggtgatattatgacactgatactgctattttgaaacctggaggatggaaaggtgcaaaaatctatcaccagcaacagaaggtgcagactgtgttggtggtggtaattttgtccatcaaatgaatatgtgtgaaaacattccctcctttggccctacaggtcagaatggcggcagcggagcatcgtcattcttcaggattgccctactggctctacctcacagctgaaactttaaaaaacaggatgggccgccagccacctcctccaactcaacaacattctataactgataactccctgagcctcaagacacctcctgagtgtctgctcactccccttccaccctcagtggatgataatatcaaggagtgtcctcttgctcctcttccaccctctcctcttccaccctcagtggatgataatctgaaggaatgtctctttgtcccgcttccaccctctcctcttccaccctcagtggatgataatctgaaggaatgtctctttgtcccgcttccaccctctcctcttccaccctcagtggatgataatctcaagactcctcccttagctactcaggaggccgaggtggaaaaaccacccaaacccaagaggtggagggtggatgaggtggaacaatcaccgaaacccaagaggcggagggtggatgaggtggaacaatcgcccaagcccaagaggcagagggaggccgaggcacaacaattacccaaacccaagaggcggaggttgagtaagctgagaacacgccattgcactcaagcctgggcaataagaataaatccgtaggtcg

SEQ ID NO: 4865 - DNA, 1455 bp, Homo sapiens
cctgcggtgtgactcgcgggctcagctggtccggccgtagcacctccgcgccgtcgccatgtcgcggtttttcaccaccggttcggacagcgagtccgagtcgtccttgtccggggaggagctcgtcaccaaacctgtcggaggcaactatggcaaacaggccattgttgctgagcgaggatgaagaagataccaagagagttgtccgcagtgccaaggacaagaggtttgaggagctgaccaaccttatccggaccatccgtaatgccatgaagattcgtgatgtcaccaagtgcctggaagagtttgagctcctgggaaaagcatatgtgccatcctctgccacatctaccaccatgctctgcactcgcgctggtaccaggcccgcgacctcatgctcatgagccacttgcaggacaacattcagcatgcagacccgccagtgcagatcctttacaaccgcaccatggtgcagctgggcatctgtgccttccgccaaggcctgaccaaggacgcacacaacgccctgctggacatccagtcgagtggccgagccaaggagcttctgggccagggcctgctgctgcgcagcctgcaggagcgcaaccaggagcaggagaaggtggagcggcgccgtcaggtccccttccacctgcacatcaacctggagctgctggagtgtgtctacctggtgtctgccatgctcctggagatcccctacatggccgcccatgagagcgatgcccgccgacgcatgatcagcaagcagttccaccaccagctgcgcgtgggcgagcgacagcccctgctgggtccccctgagtccatgcgggaacatgtggtcgctgcctccaaggccatgaagatgggtgactggaagacctgtcacagttttatcatcaatgagaagatgaatgggaaagtgtgggaccttttccccgaggctgacaaagtccgcaccatgctggttaggaagatccaggaagagtcactgaggacctacctcttcacctacagcagtgtctatgactccatcagcatggagacgctgtcagacatgtttgagctggatctgcccactgtgcactccatcatcagcaaaatgatcattaatgaggagctgatggcctccctggaccagccaacacagacagtggtgatgcaccgcactgagcccactgcccagcagaacctggctctgcagctggccgagaagctgggcagcctggtggagaacaacgaacgggtgtttgaccacaagcagggcacctacgggggctacttccgagaccagaaggacggctaccgcaaaaacgagggctacatgcgccgcggtggctaccgccagcagcagtctcagacggcctactgagctctccactctgtttcccgcctgggccatccaaccttgaagtcctaaaccacacctcagtcactaaaggtctgtttaaagtt

SEQ ID NO: 4866 - DNA, 1845 bp, Homo sapiens
ggagcttaccatctttatcctgagactggccatttacatcctgacatttcccttgtacctgctgaactttctgggcttgtggagctggatatgcaaaaaatggttcccctacttcttggtgaggttcactgtgatatacaacgaacagatggcaagcaagaagcgggagctcttcagtaacctgcaggagtttgcgggcccctccgggaaactctccctgctggaagtgggctgtggcacgggggccaacttcaagttctacccacctgggtgcagggtgacctgtattgaccccaaccccaactttgagaagtttttgatcaagagcattgcagagaaccgacacctgcagtttgagcgctttgtggtagctgccggggagaacatgcaccaggtggctgatggctctgtggatgtggtggtctgcaccctggtgctgtgctctgtgaagaaccaggagcggattctccgcgaggtgtgcagagtgctgagaccgggaggggctttctatttcatggagcatgtggcagctgagtgttcgacttggaattacttctggcaacaagtcctggatcctgcctggcaccttctgtttgatgggtgcaacctgaccagagagagctggaaggccctggagcgggccagcttctctaagctgaagctgcagcacatccaggccccactgtcctgggagttggtgcgccctcatatctatggatatgctgtgaaatagtgtgagctggcagttaagagctgaatggctcaaagaatttaaagcttcagttttacatttaaaatgctaagtgggagaagagaaaccttttttttggggggcggtttttttggtttgttgttggttttttttttttttttggcgggaagaaagagttttgctcttgttgcccaggctggagtgcaatgacgtgatctccgctcactgcaacctccacctcgcgggtttaagcgattcttctgcctcagcctccctggtgcctgtaatcccaggtacttggaaggctgaggcaggagaatctcttgaacccagaaggcgaaggttgcagtgaaccgagatcatgccattgtactctagcctgggtgacaagagcaagactccgtctcaaaaaaaaaaaaaaaaaaaaaaagaagtagagacagggagacagggtctcactgtgttgcctaggccggtcttgaactcctgggctcaagtgattctcccaccttgacctcctaaattgttgggattacaggtgtgagacagtgcacctggccgaaatagctcaagtttctgaaaaacaaatctgaatctatttgttattcttagcgtcactggtctggctttcagaattaacatacaaggttgccacacctagttctgcccagctttatgtcttttattccagtattccaccaaagtttgttttcctgcattccagttctcaagtcttaagataaagattgtacttgacagtttagtatatccataaaactatttgaggtggttaaggttcttgggttcattttccttaatactttgctgaatattgtagattgtaggcaatgaaaaagtctactaaattaggaaaaccttgaataattaggtatcctaggtaagagcccctaaacatcaagcaatctgtgagtctgtaaagaaataaatattttttggattattcttatctaattccacccctgttggaagatgatttctttgttctttgcaactatggaagctgtgaaaatcatcacaagtgcctctgaaagcgagtgttaggttggttagagggtttaatattttctgcaatggtttgtaggaattttaataaatgtagtatattttctgag

SEQ ID NO: 4867 - DNA, 2421 bp, Homo sapiens
ttaaaggagtcgggtctctaactgttgatctgtttttttcccttctgagcaatggagcttaccatctttatcctgagactggccatttacatcctgacatttcccttgtacctgctgaactttctgggcttgtggagctggatatgcaaaaaatggttcccctacttcttggtgaggttcactgtgatatacaacgaacagatggcaagcaagaagcgggagctcttcagtaacctgcaggagtttgcgggcccctccgggaaactctccctgctggaagtgggctgtggcacgggggccaacttcaagttctacccacctgggtgcagggtgacctgtattgaccccaaccccaactttgagaagtttttgatcaagagcattgcagagaaccgacacctgcagtttgagcgctttgtggtagctgccggggagaacatgcaccaggtggctgatggctctgtggatgtggtggtctgcaccctggtgctgtgctctgtgaagaaccaggagcggattctccgcgaggtgtgcagagtgctgagaccgggaggggctttctatttcatggagcatgtggcagctgagtgttcgacttggaattacttctggcaacaagtcctggatcctgcctggcaccttctgtttgatgggtgcaacctgaccagagagagctggaaggccctggagcgggccagcttctctaagctgaagctgcagcacatccaggccccactgtcctgggagttggtgcgccctcatatctatggatatgctgtgaaatagtgtgagctggcagttaagagctgaatggctcaaagaatttaaagcttcagttttacatttaaaatgctaagtgggagaagagaaaccttttttttggggggcggtttttttggtttgttgttggttttttttttttttttggcgggaagaaagagttttgctcttgttgcccaggctggagtgcaatgacgtgatctccgctcactgcaacctccacctcgcgggtttaagcgattcttctgcctcagcctccctagtagctgggattacaggtgcccaccaccatgcccagctaatttgtatttttagttgagacagggtttcactacgttggccaggctggtcttgaactcctgatctcaggcaatccacccacctcagcctcccaaagtgctgggatgacaggcgtgagcaaccgcacccagcttaaggtttttttgttttgttttgagacggagttttcgctcttgttgcccaggctggagtgcaatgctgtgatctcagcttaccacaacctccacctcccgggttcaagtgattcacctgcctcagcctcctgagtagctggtattacaggcatgcgtcaccacgccggctaattttgtacttttagtagagatggtgtttccccacgttggtcagtctggccaacatggcaaaaccctactaaagatacaaaaaaaaaaaaaaattagccaggcgtggtggtgggtgcctgtaatcccaggtacttggaaggctgaggcaggagaatctcttgaacccagaaggcgaaggttgcagtgaaccgagatcatgccattgtactctagcctgggtgacaagagcaagactccgtctcaaaaaaaaaaaaaaaaaaaaaaagaagtagagacagggagacagggtctcactgtgttgcctaggccggtcttgaactcctgggctcaagtgattctcccaccttgacctcctaaattgttgggattacaggtgtgagacagtgcacctggccgaaatagctcaagtttctgaaaaacaaatctgaatctatttgttattcttagcgtcactggtctggctttcagaattaacatacaaggttgccacacctagttctgcccagctttatgtcttttattccagtattccaccaaagtttgttttcctgcattccagttctcaagtcttaagataaagattgtacttgacagtttagtatatccataaaactatttgaggtggttaaggttcttgggttcattttccttaatactttgctgaatattgtagattgtaggcaatgaaaaagtctactaaattaggaaaaccttgaataattaggtatcctaggtaagagcccctaaacatcaagcaatctgtgagtctgtaaagaaataaatattttttggattattcttatctaattccacccctgttggaagatgatttctttgttctttgcaactatggaagctgtgaaaatcatcacaagtgcctctgaaagcgagtgttaggttggttagagggtttaatattttctgcaatggtttgtaggaattttaataaatgtagtatattttctgagatgattttgtaaaagtactattttaaatatcaaatcaaccaataaattcacatttgtgttaggaacag

SEQ ID NO: 4868 - DNA, 2137 bp, Homo sapiens
tgagcaatggagcttaccatctttatcctgagactggccatttacatcctgacatttcccttgtacctgctgaactttctgggcttgtggagctggatatgcaaaaaatggttcccctacttcttggtgaggttcactgtgatatacaacgaacagatggcaagcaagaagcgggagctcttcagtaacctgcaggagtttgcgggcccctccgggaaactctccctgctggaagtgggctgtggcacgggggccaacttcaagttctacccacctgggtgcagggtgacctgtattgaccccaaccccaactttgagaagtttttgatcaagagcattgcagagaaccgacacctgcagtttgagcgctttgtggtagctgccggggagaacatgcaccaggtggctgatggctctgtggatgtggtggtctgcaccctggtgctgtgctctgtgaagaaccaggagcggattctccgcgaggtgtgcagagtgctgagaccgggaggggctttctatttcatggagcatgtggcagctgagtgttcgacttggaattacttctggcaacaagtcctggatcctgcctggcaccttctgtttgatgggtgcaacctgaccagagagagctggaaggccctggagcgggccagcttctctaagctgaagctgcagcacatccaggccccactgtcctgggagttggtgcgccctcatatctatggatatgctgtgaaatagtgtgagctggcagttaagagctgaatggctcaaagaatttaaagcttcagttttacatttaaaatgctaagtgggagaagagaaaccttttttttggggggcggtttttttggtttgttgttggttttttttttttttttggcgggaagaaagagttttgctcttgttgcccaggctggagtgcaatgacgtgatctccgctcactgcaacctccacctcgcgggtttaagcgattcttctgcctcagcctccctagtagctgggattacaggtgcccaccaccatgcccagctaatttgtatttttagttgagacagggtttcactacgttggccaggctggtcttgaactcctgatctcaggcaatccacccacctcagcctcccaaagtgctgggatgacaggcgtgagcaaccgcacccagcttaaggtttttttgttttgttttgagacggagttttcgctcttgttgcccaggctggagtgcaatgctgtgatctcagcttaccacaacctccacctcccgggttcaagtgattcacctgcctcagcctcctgagtagctggtattacaggcatgcgtcaccacgccggctaattttgtacttttagtagagatggtgtttccccacgttggtcagtctggtctcaaattcctgacctcaggtgatctgcctgcctcggcctcccaaagtgctgtgattacagacgtcagccaccatgcctggcctgaaaccttttttaggtaaagttgaattccatccttaaaagtttctgttatatcctatttagccattttctattgtctcccaaagaattcacatcaaaaaaacagctttgaactcccccttcaaaggaaacagtcgactttcataattagcatctaccattatccccaaatcttattttattcattgacttgaaattttttccaattgcttttttttttttttttttaaggttaagagcagaggtttactaggccaaagaaagagaatagctctctgttgcagagaggggtcctggagaaatgggttaccccagttgtcttatttaaatggttacccatcagattttaattttatcttctctttgagagcttggtaataagaagcacttaaatcactccaaagaagactttaaaaagggagcagtgaaaaggtcttaataatttattgattgaattaagaaatactagctaattaagaatctgagtctaaacagcacagattttttctttctgcttttaaattgtgttttaaaaaaagagacagggggctgggcgtggtggctcacgcctgtaatcctagcactttgggaggccgaggcgggtggatcacgaggtaggagttaaagaccagcctggccaacatggcaaaaccctactaaagatac

SEQ ID NO: 4869 - DNA, 2085 bp, Homo sapiens
gtgagaggaggctgcaacaccgagcggaggaggcaggaaccggagcgcgagcagtagctgggtgggcaccacggctgggatcaccaccattgaggcggtgaagcgcaagatccaggttctgcagcagcaggcagatgatgcagaggagcgagctgagcgcctccagcaagaagttgagggagaaaggcgggcccggaaacaggctgaggctgaggtggcctccttgaaccgtaggatccagctggttgaagaagagctggatcgtcctcaggagcgcctggccactgccctgcaaaagctggaagaagcagaaaaagctgctggtgagagtgagagaggtatgaaggttattgaaaaccgggctttaaaagatgaagaaaagatggaactccaagaactccaactcaaagaagctaagcacattgcagaagaggcagataggaagtatgaagaggtggctcgtaagttggtgaccattgaaggagacttggaacgcacagaggaacgagctgagctgacagagtcccgttgccgagagatggatgagcagattagactgatggaccagaacctgaagtgtctgagtgctgctgaagaaaagtactctcaaaaagaagacaaatatgaggaagaaatcaagatttttactgataaacccaaggaggcagagacctgtgctgagtttgctgagcgatcggtagccaagctggaaaagacaattgatgacttggaagataaactgaaatgcaccaaagaggagcacctctgtacacaaaggatgctggaccagactctgcttgacctgaatgagatgtagaatgccccagtcccaccctgctgctgctcctccctgtgacccagactccgcctgaggccagcctgccagaagctgacctttaactgagggctgatctttaactggaaggctgctttctcctttcaccgccccctccttccctgtgtctttttcgccaaactgtctctgccttttcccggagaatccagctgggctagaggctgagcacctttggaaacaacatttaagggaatgtgagcacaatgcataatgtctttaaaaagcgtgttgtgatgtacacattttgtaattaccttttttgttgttttgtagcaaacatttgtaaaacattccaaataattccacagccctgaagcagcaatcaaatccctttctcacttttggaaggtgacttttcaccttaatgcatattcccctctccatagaggagaggaaaaggtataggcttgccttgctgagagccaaacagagcccagggagactccactgtgggaaacctcattgctctgtacaaagtactagctaaaccagaaaggtgattccaggaggagttagcccaacaacaacaaaaacaaaaatgtgctgttcaagttttcagctttaagatatctttggataatattatttctattttttatttttttcattagaaatgatcaaattaagatggttaagacctctgagaccaaaactttctctcatctctaccccctcccaactgctcacagaacggatcatgtcccccttatgttgaggtgaccacttaattgctttcctgcctccttgaaagaaagaagattgtgttttctccactgatttagccatgtgaaactcatctcattacccttttctgggtttcaagctgctgtctctagaagtgccatctcattgtgcttcgtatcagtcagtgctggagaaatcttgaatagcttatgtacaaaactttttaaattttatattattttaaaactttgcttctttgggtttgtggcaccctggccaccccatgtggctgtgacagcctctgcagtccgtgggctggcagtttgctgatctgttaaaatttctttccctacccagtccccattttctggtaaggtttctaggaggtctgttaggtgtacatcctgcagcttattggcttaaaatgtactctccttttatgtcgtctctttggggctgattgggagaaagagaaatcaatagtgcaactgttttgatactgaatattgacaagtgtctttttgaaataaagaaccagtccctcc

SEQ ID NO: 4870 - DNA, 2145 bp, Homo sapiens
ggacaaggcagggcagggcagcgggcggatgggcatcctttcggaaaaaattcatagagcgcagagggccttggctgtggtgtttggcactaacgagcttccctctctcctagatggcggactgtggcggcctcccgcagatctcccagccggccaagctcgctgaggccttcaagtacttcgtgcagggcatgggatacatgccctcggctagcatgacccgcctgatgcggtcccgcacagcctctggttccagcgtcacttctctggatggcacccgcagccgctcccacaccagcgagggcacccgaagccgctcccacaccagcgagggcacccgcagccgctcgcacaccagcgagggggcccacctggacatcacccccaactcgggtgctgctgggaacagcgccgggcccaagtccatggaggtctcctgctaggcggcctgcccagctgccgcccccggactctgatctctgtagtggccccctcctccccggccccttttcgccccctgcctgccatactgcgcctaactcggtattaatccaaagcttattttgtaagagtgagctctggtggagacaaatgaggtctattacgtgggtgccctctccaaaggcggggtggcggtggaccaaaggaaggaagcaagcatctccgcatcgcatcctcttccattaaccagtggccggttgccactctcctcccctccctcagagacaccaaactgccaaaaacaagacgcgtagcagcacacacttcacaaagccaagcctaggccgccctgagcatcctggttcaaacgggtgcctggtcagaaggccagccgcccacttcccgtttcctctttaactgaggagaagctgatccagtttccggaaacaaaatccttttctcatttggggaggggggtaatagtgacatgcaggcacctcttttaaacaggcaaaacaggaagggggaaaaggtgggattcatgtcgaggctagaggcatttggaacaacaaatctacgtagttaacttgaagaaaccgatttttaaagttggtgcatctagaaagctttgaatgcagaagcaaacaagcttgatttttctagcatcctcttaatgtgcagcaaaagcaggcgacaaaatctcctggctttacagacaaaaatatttcagcaaacgttgggcatcatggtttttgaaggctttagttctgctttctgcctctcctccacagccccaacctcccacccctgatacatgagccagtgattattcttgttcagggagaagatcatttagatttgttttgcattccttagaatggagggcaacattccacagctgccctggctgtgatgagtgtccttgcaggggccggagtaggagcactggggtgggggtggaattggggttactcgatgtaagggattccttgttgttgtgttgagatccagtgcagttgtgatttctgtggatcccagcttggttccaggaattttgtgtgattggcttaaatccagttttcaatcttcgacagctgggctggaacgtgaactcagtagctgaacctgtctgacccggtcacgttcttggatcctcagaactctttgctcttgtcggggtgggggtgggaactcacgtggggagcggtggctgagaaaatgtaaggattctggaatacatattccatgggactttccttccctctcctgcttcctcttttcctgctccctaacctttcgccgaatggggcagcaccactgacgtttctgggcggccagtgcggctgccaggttcctgtactactgccttgtacttttcattttggctcaccgtggattttctcataggaagtttggtcagagtgaattgaatattgtaagtcagccactgggacccgaggatttctgggaccccgcagttgggaggaggaagtagtccagccttccaggtggcgtgagaggcaatgactcgttacctgccgcccatcaccttggaggccttccctggccttgagtagaaaagtcggggatcggggcaagagaggctgagtacggatgggaaactattgtgcacaagtctttccagaggagtttcttaatgagatatttgtatttatttccagaccaataaatttgtaactttgc

SEQ ID NO: 4871 - DNA, 1563 bp, Homo sapiens
gctggccgcgctccctcccggtgccggcttctctgagtcaccaacctgaggctgccccggccgcctgcgcacccggcagcaccatgacagatcaggcctttgtgacactaaccacaaacgatgcctacgccaaaggtgccctggtcctgggatcatctctgaaacagcacaggaccaccaggaggctggtcgtgctcgccacccctcaggtctcagactccatgagaaaagttttagagacagtctttgatgaagtcatcatggtagatgtcttggacagtggcgattctgctcatctaaccttaatgaagaggccagagttgggtgtcacgctgacaaagctccactgctggtcgcttacacagtattcaaaatgtgtattcatggatgcagatactctggtcctagcaaatattgatgatctttttgacagagaagaattgtcagcagcaccagacccagggtggcctgactgcttcaattccggagtcttcgtttatcagccttcagttgaaacatacaatcagctgttgcatcttgcttctgagcaaggtagttttgatggtggggaccaaggcatactgaacacattttttagcagctgggcaacaacagatatcagaaaacacctgccgtttatttataacctaagcagcatctctatatactcctacctcccggcatttaaagtgaagatgtctcaggagccatatcacatctgtcccttggggagatcccagctatggcacagccgtttgtatcctcggaagaacggaaggaacgatgggaacagggccaggctgattatatgggagcagattcctttgacaacatcaagaggaaacttgacacttacctccagtagaaacactgcatttttctgtgaacacatccacttcacaagccttgtttctgatacttagtatctagagctgggttgagaaaagtctgttacagttgctagaggttttcattaaaacttatcagatgagaggcttttttaggataagaggtgagaactgggcaaaagttgtgaagcagcaattctgttatatggacagtgttctgctttttaatcctatttagcttgtttcagaaattctcacttttgttgactgccaacatacaaagtaagggaaactcaagatattaagatggctgtatcagttcttaaaatctgcagagcctggttcaaaatcagtcactcccttcagaagcagacatggcatctgttccttgcttgcttgttggttgtgtacctttcacgagacctgaattttagaattgcccagtgctgccagagtgagtgagtgtaattctcctttcaggtaaagataggctatctcaacactgctgagtgattcataaacatatcaaccaatagcattaacccattttatttcctgtccttagtgtctgaagatgctcaccagttttctgtgtacagtaaggcagcatgctaaaatgcttttgttcagttctgtatatttgaaaatagcagtgtgttctctgatggttacctgcagtggcaccctgtacaaaaaataaaagacttattgctgt

SEQ ID NO: 4872 - DNA, 1376 bp, Homo sapiens
agcaggtcctactatcgcctccctctagtctctgcttctctggatccctgaggagggcagaaggaagaaaacagcccaaagatgagagtgattcgcgtgggtacccgcaagagccagcttgctcgcatacagacggacagtgtggtggcaacattgaaagcctcgtaccctggcctgcagtttgaaatcattgctatgtccaccacaggggacaagattcttgatactgcactctctaagattggagagaaaagcctgtttaccaaggagcttgaacatgccctggagaagaatgaagtggacctggttgttcactccttgaaggacctgcccactgtgcttcctcctggcttcaccatcggagccatctgcaagcgggaaaaccctcatgatgctgttgtctttcacccaaaatttgttgggaagaccctagaaaccctgccagagaagagtgtggtgggaaccagctccctgcgaagagcagcccagctgcagagaaagttcccgcatctggagttcaggacgggggaaacctcaacacccggcttcggaagctggactattatctcgagttcagtgccatcatcctggcaacagctggcctgcagcgcatgggctggcacaaccgggtggggcagatcctgcaccctgaggaatgcatgtatgctgtgggccagggggccttgggcgtggaagtgcgagccaaggaccaggacatcttggatctggtgggtgtgctgcacgatcccgagactctgcttcgctgcatcgctgaaagggccttcctgaggcacctggaaggaagctgcagtgtgccagtagccgtgcatacagctatgaaggatgggcaactgtacctgactggaggagtctggagtctagacggctcagatagcatacaagagaccatgcaggctaccatccatgtccctgcccagcatgaagatggccctgaggatgacccacagttggtaggcatcactgctcgtaacattccacgagggccccagttggctgcccagaacttgggcatcagcctggccaacttgttgctgagcaaaggagccaaaaacatcctggatgttgcacggcagcttaacgatgcccattaactggtttgtggggcacagatgcctgggttgctgctgtccagtgcctacatcccgggcctcagtgccccattctcactgctatctggggagtgattaccccgggagactgaactgcagggttcaagccttccagggatttgcctcaccttggggccttgatgactgccttgcctcctcagtatgtgggggcttcatctctttagagaagtccaagcaacagcctttgaatgtaaccaatcctactaataaaccagttctgaaggt

SEQ ID NO: 4873 - DNA, 6639 bp, Homo sapiens
ctccagctccagaaatcccagtacctgcaactgggccccagccgaggccagtactatggcgggtccctgcccaacgtgaaccagatcgggagtggcaccatggacctgcccttccagcccagcggatttctgggggaggccctggcagcggctcctgtctctctgacccccttccaatcctcgggcctggacaccagccggaccacccggcaccatgggctggtggacagggtgtaccgggagcgtggccggctcggctccccacaccgccggcccctgtcagtggacaaacacggacggcaggccgacagctgcccctatggcaccatgtacctctcaccacccgcggacaccagctggagaaggaccaattctgactccgccctgcaccagagcacaatgacgcccacgcagccagaatcctttagcagtgggtcccaggacgtgcaccagaaaagagtcttactgttaacagtcccaggaatggaagagaccacatcagaggcagacaaaaacctttccaagcaagcatgggacaccaagaagacggggtccaggcccaagtcctgtgaggtccccggaatcaacatcttcccgtctgccgaccaggaaaacactacagccctgatccccgccacccacaacacaggggggtccctgcccgacctgaccaacatccacttcccctccccgctcccgaccccgctggaccccgaggagcccaccttccctgcactgagcagctccagcagcaccggcaacctcgcggccaacctgacgcacctgggcatcggtggcgccggccagggaatgagcacacctggctcctctccacagcaccgcccagctggcgtcagccccctgtccctgagcacagaggcaaggcgtcagcaggcatcgcccaccctgtccccgctgtcacccatcactcaggctgtagccatggacgccctgtctctggagcagcagctgccctacgccttcttcacccaggcgggctcccagcagccaccgccgcagccccagcccccgccgcctcctccacccgcgtcccagcagccaccacccccgccacccccacaggcgcccgtccgcctgccccctggtggccccctgttgcccagcgccagcctgactcgtgggccacagccgcccccgcttgcagtcacggtaccgtcctctctcccccagtcccccccagagaaccctggccagccatcgatggggatcgacatcgcctcggcgccggctctgcagcagtaccgcactagcgccggctccccggccaaccagtctcccacctcgccagtctccaatcaaggcttctccccagggagctccccgcaacacacttccaccctgggcagcgtgtttggggacgcgtactatgagcagcagatggcggccaggcaggccaatgctctgtcccaccagctggagcagttcaacatgatggagaacgccatcagctccagcagcctgtacagcccgggctccacactcaactactcgcaggcggccatgatgggcctcacgggcagccacgggagcctgccggactcgcagcaactgggatacgccagccacagtggcatccccaacatcatcctcacagtgacaggagagtccccccccagcctctctaaagaactgaccagctctctggccggggtcggcgacgtcagcttcgactccgacagccagtttcccctggacgaactcaagatcgaccccctgaccctcgacggactgcacatgctcaacgaccccgacatggttctggccgacccagccaccgaggacaccttccggatggaccgcctgtgagcgggcacgccggcaccctgccgctcagccgtcccgacggcgcctccccagcccggggacggccgtgctccgtccctcgccaacggccgagcttgtgattctgagcttgcaatgccgccaagcgccccccgccagcccgcccccggttgtccacctcccgcgaagcccaatcgcgaggccgcgagccgggccgtccacccacccgcccgcccagggctgggctgggatcggaggccgtgagcctcccgcccctgcagaccctccctgcactggctccctcgcccccagccccggggcctgagccgtcccctgtaagatgcgggaagtgtcagctcccggcgtggcgggcaggctcaggggaggggcgcgcatggtccgccagggctgtgggccgtggcgcattttccgactgtttgtccagctctcactgccttccttggttcccggtcccccagcccatccgccatccccagcccgtggtcaggtagagagtgagccccacgccgccccagggaggaggcgccagagcgcggggcagacgcaaagtgaaataaacactattttgacggctgtcttttatatttctgagcacacacagagccctggcgtccaccggggcaggcgcaaagtggacagagcatgcagggcggcggacccccccacgaccctcctcgccctgtctccatcccctcgaagccctgcctcaccgcaggcaggcccatcggtggccacctttgccgggaagtgaccggaaggccccgtgaggggtcgaacgcggaggcaggggttacctcttggggctttacaatccgtggcccctcctgtcctgcactgtggtcaccggtcctgtcatagatgctgttaatttaaggtacaggcagaggtggccaggggagtttcattgtggtttttttttccttttagtttctagttacattttggttgtagatgactcgcttaatcttttaagccaacacttgcctgagagcatgtttttatttcagaaatccaactttacctattttttaagctaactggaaatggaggccatgcgccccaaagcagcccgccacccacctgagtgtaagaagtgagtccggcttttgggtttcaccccaagttatctcaaaacaaaagggctggtcaggctgggcagggccttgtcaggagctcacggtaggcagaggtgcctctgccagggccacagaacagacttccgggaaggggccttggcttttattgagggtctctcaaagacccagcctgccagcctctcccagaggtgcctgctagtccttagagtgtgtgtgtgaagatgccatgaccagtggcagctgagacctctctgccccaagagtgtgggggactggcagggagcgagggtccccgagacgaggaccacggtcctccctgagaacctgggtggaactggcatttcatcccctctccaccctaccctctggctcctagcccacaccccctctcttgggcagcgtggtctgctggctgccccttcttggcagctcagggtcgtggcaggtggacttggagacacacagcagtgtgtgttttagtggcaggtttcaggagcacctctaagaccagggtgacagggtacttgggagctgtcctggaccctccccataccacgggccctgcaagggaggcatcagggctggctttgttttctgctgttcttggaataggaactgctgttctgatccccccaaaactgcattgcggctctcgctcgctcctgcctgccgggacagcgccttctgctgagtccgtttatttgtagtgtcatggctgctgctttcactggggtcctgggcaccctggcttctgtcctcagagctgggtttgatcctagcaaccatcccttcctctctttgcccggcaatgcctttggcatgtgtctgagcagccaagtggccactcataggagaaggctccctggtcacgttgctcctgctgccgtcttgttccaaggtgcgggggggacactgttggtctgtccaggtcaaggtccctttctcttaccatgacagaggctgggggcagacagcggggacttttttttttttttaagaaaaactacatgtacataggagagtttcattaccattagacttgtatgtaggacttaaaaaaaaatggccttaataaaattacaagcaacccgcctggatgcggttttcaaaagaaggcattgaggaccatgctaggaaacctcataccccatccgtccaacctccggcgggcgccactgcttgtcctctggtcttcggtgtggacagataggagaggagggatgcccacctcggagcatcccaggcccgtggcccattttcagcatcctgaagccagattcacagtgacattgtgttaacgtgacgaccttggtccattatggagttctttttccaataagaacctggtggaccgaggtccgagcttgccagggacagtggggcccacgcgagtacccggggcccagccaggagccagcagccaggcgtccctgtgttccagaaggattcacgcccctcctggacctgggcgggcctcccagggggtctgtatcacggccttttgtgtgtgcgtacgtgtggtttttttaaatatcactactacatattcttgaattgccaagactttctgaaacaagacagcttaagggaatcagccttttgctttgtgatgtgaaaatactgtgatttgacgagccgcttcctgaggggcaggcccacgtggggaggttgcgccgtgtacatagacccgccgtctgtgtccttggtcaggcccggatgcttggtctacactgggttagaggctgctctccccacgcacccatgtgctcatggcttctgcagaccctctgctgggtacatcggtcccctacggcgaagttcagccagggctctccctcctgagagcatggcgtccccaccttcctgtttcgccgacgtcactacccagggtggcaagtcttgcaggcagagggtgtagcccaagttcagcctctctctgtgtcctccagagaagagggttctttgccctcatcagggccctgcttgtgggttttcggctctggggaggagagtgttggcatcagtgtgtttggcctgatttcttcagggggccaagctcccgggaggacccctagccaggagggccccccatgtccatccatccctcctgctggggcttggatgtcaggcttgggggctgtgagctgggacctcgcctgagcccggtcaggtgggacaggagcctgccagaagcccatggggggccaggccgggtggcttctattttatttttttagagatggggtcttgctgtgttgcccaggctggtctcggactcctgggctcaagcagtcctccctcctcggcctcccaaagttctggggctacaggtgtgagccacttctgcccagcatcccaggcctgaacagccttggcaggacccgtccctagagggggctctggtgcctcccttaggtgggccttgagctggtttttaaccaaacatccttccaaactcgggctgcgacctgcttcctgagttttctgtatttccaaggagccctccgaccagggagaggctggtggagtaaggtccagcggtattcgggggtcctctgtcacctcgccctgaaaacagcagctcccatcaccttcactgggtcccgatggagccgtctcagaggccgaggggccctctgtgtgggggtgggacgcaggggctctcagagcaagggccacaaagccgatggcacagatgtgcccctgggcctggcccgtcacccacatgtggtgccctgggccagggcgtgcgggcgccagagccttccctacacagcctaagagcaggggcaagactcggcccctcactcaccctgggaggcctgcctgggctacatggacacctgggtctctttctacccccattcaccatggaccaggggcctccatttcctgggggctcttgcggcatgtgatttgggggtccctgggacattctcccgtcagctccacctgagccaagtgtcctgttccctgcggcccttggccttccagggtcctggccaggcaggggtcaggcaccccatactcttccgtgtggcacaggtgtccacccacccccactggccacagacaccattctccccctgggagcaggaggtggagtaagttgtacccccaggcctgggtgctggggagttcctgagggcatgggtggggcaggagtgagtgcctcgtgatcccagcctcagtttctctcttgtcactttctcaaacctgcaggtctcagggccccgggctcctcctgggcaggatggggggcaggggctgggccttggggtggtgctggctctgatgattccagagcctgtatccaccttctgggctcctggccagcaccccacccccaggagccagggacaggtggcatgtgttggggtcgggggatggcccccatctcgaagtgttctggaatttgggggcaacccttgcccagcccagccatcaagaacttctgatctcctgcccaccaggaggggacttagccatggacttggccagtaggcctggggagggagggctttggcagccaaagtccactggccctgccgtgcccctgagtaggaaactgtcccctaggggctgggtggccccactgatatatgcaaacccgccggtccgagccctgttcctgcctgtgctcctctgtgcccaggctggctctcccccaaccctagcatgtatactctgccacggacgtcccgtgggccatgattgt

SEQ ID NO: 4874 - DNA, 3512 bp, Homo sapiens
cctggaccctggggcgtgaggagggcgcggtgcgtcccgtggttgtgcttggaagccccccgagggtgcgcgcgcgtgggtatgagtgcgtgcgtgtgcctgggtgtgcgtgtgtgtaagtgtgcacgtgtgtgtgtgagagtgcgcgcggggaaggaggcacagagacagcccggacaggccactgcgcagccctggtggcccccgctccacctctcgctccgcagacccgcgccagggaggcctctgggccgcagcgggcaccggagcggagcgggcgcggcagcgggcgctgggaggtggggctgggggaggagagggggagggagagaggcgggcgggaggggaggatccgggaagctccggggtatttgacaggagcgagggcggacgcaaagaacgcggaggacctctgggtgcctgcaggggagctgctccagccgggccgccgggagcggtggggagagcatcgcggagccgcccctccacgcgcccgcccagccgcgctcgcccactgggctctcccggctgcagtgccagggcgcaggacgcggccgatctcccgctcccgccacctccgccaccatgctgctcccccagctctgctggctgccgctgctcgctgggctgctcccgccggtgcccgctcagaagttctcggcgctcacgtttttgagagtggatcaagataaagacaaggattgtagcttggactgtgcgggttcgccccagaaacctctctgcgcatctgacggaaggaccttcctttcccgttgtgaatttcaacgtgccaagtgcaaagatccccagctagagattgcatatcgaggaaactgcaaagacgtgtccaggtgtgtggccgaaaggaagtatacccaggagcaagcccggaaggagtttcagcaagtgttcattcctgagtgcaatgacgacggcacctacagtcaggtccagtgtcacagctacacgggatactgctggtgcgtcacgcccaacgggaggcccatcagcggcactgccgtggcccacaagacgccccggtgcccgggttccgtaaatgaaaagttaccccaacgcgaaggcacaggaaaaacagtctccttgcaaatcttttccgttctgaattcagatgatgccgcagctccagcgttggagactcagcctcaaggagatgaagaagatattgcatcacgttaccctaccctttggactgaacaggttaaaagtcggcagaacaaaaccaataagaattcagtgtcatcctgtgaccaagagcaccagtctgccctggaggaagccaagcagcccaagaacgacaatgtggtgatccctgagtgtgcgcacggcggcctctacaagccagtgcagtgccacccctccacggggtactgctggtgcgtcctggtggacacggggcgccccattcccggcacatccacaaggtacgagcagccgaaatgtgacaacacggccagggcccacccagccaaagcccgggacctgtacaagggccgccagctacaaggttgtccgggtgccaaaaagcatgagtttctgaccagcgttctggacgcgctgtccacggacatggtccacgccgcctccgacccctcctcctcgtcaggcaggctctcagaacccgaccccagccataccctagaggagcgggtggtgcactggtacttcaaactactggataaaaactccagtggagacatcggcaaaaaggaaatcaaacccttcaagaggttccttcgcaaaaaatcaaagcccaaaaaatgtgtgaagaagtttgttgaatactgtgacgtgaataatgacaaatccatctccgtacaagaactgatgggctgcctgggcgtggcgaaagaggacggcaaagcggacaccaagaaacgccacacccccagaggtcatgctgaaagtacgtctaatagacagccaaggaaacaaggataaatggctcataccccgaaggcagttcctagacacatgggaaatttccctcaccaaagagcaattaagaaaacaaaaacagaaacacatagtatttgcactttgtactttaaatgtaaattcactttgtagaaatgagctatttaaacagactgttttaatctgtgaaaatggagagctggcttcagaaaattaatcacatacaatgtatgtgtcctcttttgaccttggaaatctgtatgtggtggagaagtatttgaatgcatttaggcttaatttcttcgccttccacatgttaacagtagagctctatgcactccggctgcaatcgtatggctttctctaacccctgcagtcacttccagatgcctgtgcttacagcattgtggaatcatgttggaagctccacatgtccatggaagtttgtgatgtacggccgaccctacaggcagttaacatgcatgggctggtttgtttcttgggattttctgttagtttgtcttgttttgctttccagagatcttgctcatacaatgaatcacgcaaccactaaagctatccagttaagtgcaggtagttcccctggaggaaataatattttcaaactgtcgttggtgtgatactttggctcaaaggatctttgcttttccattttaagcttctgttttgagttttgccctggggcttgaatgagtcccagagagtcgttcggatggtgggaggctgcctaggaggcagtaaatccagtcacagtgcctgggaggggcccatccttccaaaatgtaaatccagtcgcggtgtgaccgagctggctaacaggcttgtctgcctggttttcctcctacacgtggacattattctcctgatcctcctacctggtccaccccagggctaccggaaggtaaaatcttcacctgaaccaattatgagcagtctccttactgaaggtacagccggatacgtggtgcccccggggctggtgttggcagccggggggaggtgcctgagggtccccacggttcctttctgcttttctgaatgcatcaagggtacgagaacttgccaatgggaaattcatccgagtggcactggcagagaaggataggagtggaatgcccacacagtgaccaacagaactggtctgcgtgcataaccagctgccaccctcaggcctgggccccagagctcagggcacccagtgtcttaaggaaccatttggaggacagtctgagagcaggaacttcaagctgtgattctatctcggctcagacttttggttggaaaaagatcttcatggccccaaatcccctgagacatgccttgtagaatgattttgtgatgttgtgatgcttgtggagcatcgcgtaaggcttcttgcttatttaaactgtgcaaggtaaaaatcaagcctttggagccacagaaccagctcaagtacatgccaatgttgtttaagaaacagttatgatcctaaactttttggataatcttttatatttctgacctttgaatttaatcattgttcttagattaaaataaaatatgctattgaaact

SEQ ID NO: 4875 - DNA, 901 bp, Homo sapiens
tcataacctcatcagaaacgcctttagccacactcctgaccttctagatgagtaacaaaaaaatgaaataagttcttggaaattaagccatttattttaatttgctatttttttcaatgttctaggtatctttaaatttgttattgtggaatcattttcctgccagatacctttatcaaaattattggcctcatgagagctgaagtaagtcagctttttggtgaactttagtggacttctgtgagattgtagttgtactttgtatctctaaatctaaagatagttttttaaaactcccaaagaaaatctgctctcctttctgatctaaaaactcatctttggggtaaagagttaagtgtccaaaggttgtcacagttcatgaggtcagagggagctagcctggcacctggactctgcccatccacagctgacagattccaacagaagtgtatttaaattctccagtagacaatgctgggtaagggagggggtagggctgggttattaagatacaggctgctgtattttacattggttgtgggggaaggggagcctggagaaaacaaagtcactattcccttttttgaaacaggaaataataattattttttgttcagtaaaaatggtagagaatccaatgtccctagccacaagggaccagttccactgagaagtgaacagtgggaactcaaaatttcagaaacattgggggaagggaaaattggctttctcttaattggcagatgttccagtggggcgggggggctctgtttttgttgggatgtgttatgttgtatgtacgcatatatggaccggagtctgctgagtttataaggttccaaaaatatggtaaaatcttggtttttgttaatttatctcaataaaagcccactggaactcc

SEQ ID NO: 4876 - DNA, 1303 bp, Homo sapiens
gatcatgtctgtaagccaggattcctgatccagagacaatggccccgatgggatggagcccgaaggcgtcatcgagagtaactggaatgagattgttgacagctttgatgacatgaacctctcggagtcccttctccgtgacatctatgcctatggttttgagaagccctctgccatccagcagcaagccattctaccttgtatcaggggttataatgtaatcgctcaagcctgatctgggactgggaaaatggccacatttgccatatcgattctgcagcagattgcattagatctaaaagccacccaggccttggtcctagcacccactcgagaattggctcagcagatacagaaggtggtcatggcactagtagactacatgggtgcctcctgtcatgcctgtatcaggggcaccaatgtgcgtgctgaggtgcagaaactgcagatggaagctccccacatcatcgtgggtacccctagctgtgtgtttgatatgcttaaccggagatacctatctcccaaatacatcaagatgtttgtactggatgaagctgacgaaatgttaagccgtggattcaaggaccagatctatgacatattccaaaagctcaacagcaacacccaggtagttttgctgtcagctacaatgccttctgatgtgcttgaggtgatcaagaagttcatgagggaccccattcggattcttgtcaagaaggaagagttgaccctggagggtatccgccaattctacatcaacgtggaacgagaggagtggaagctggacacactatgtgacttgtatgaaaccctgaccatcacccaggcagtcatcttcatcaatacccggaggaaggtggactggctcaccgagaagatgcatgctcgagatttcactgtctccgccatgcatggagatatggaccaaaaggagcgagacgtgatcacgagggagtttcgttctggctctagcagagttttgattaccactgacctgctgggaaaactatatccacagaatcagtcgaggtggacagtttggccgtaaagatgtggctattaacatggtgacagaagaagacaagaggactcttcgagacattgagaccttctacaacacctccattgaggaaatgcccccaatgttgctgacctcatctgaggggctgtcctgccacccagccccagccagggctcaatctcggggggctgaggagcagcaggagaggggaaggaagggagccaagggatagacatcttgtcattttttttctttgaataaatgtcactttttgaggcaaaa

SEQ ID NO: 4877 - DNA, 1303 bp, Homo sapiens; identical to SEQ ID NO: 4876

SEQ ID NO: 4878 - DNA, 2470 bp, Homo sapiens
tgtttttgagcactatttgggggatgacatgaaaagggaaaatccacctgtggaggacagcagtgatgaggatgacaaaagaaaccaaggaaatttgtatgataaggcaggtaaagtgaggaaacatgcaactgaacaggaaaaaactgaagagggattaggccctaatataaaaagcattgtcaccatgttgatgctgatgctattgatgatgtttgctgtccactgtacctgggtcacaagcaatgcctactctagtccaagtgtagtcctggcctcatacaatcatgatggcaccaggaatatcttagatgattttagagaagcttacttttggctaaggcaaaatacagatgaacatgcacgagtaatgtcttggtgggattatggctatcagatagctggaatggctaatagaactacgttggtggataataacacctggaataacagccacatagcactggtgggaaaagctatgtcttctaatgaaacagcagcctataaaatcatgaggactctagatgtagattatgttttggttatttttggaggggttattggctattctggtgatgatatcaacaaatttctctggatggttaggatagctgaaggagaacatcccaaagacattcgggaaagtgactattttaccccacagggagaattccgtgtagacaaagcaggatcccctactttgttgaattgccttatgtataaaatgtcatactacagatttggagaaatgcagctggattttcgtacacccccaggttttgaccgaacacgtaatgctgagattggaaataaggacattaaattcaaacatttggaagaagcctttacatcagaacactggcttgttaggatatataaagtaaaagcacctgataacagggagacattagatcacaaacctcgagtcaccaacattttcccaaaacagaagtatttgtcaaagaagactaccaaaaggaagcgtggctacattaaaaataagctggtttttaagaaaggcaagaaaatatctaagaagactgtttaaatgcactgttctggttcctaacttgaagcagttgtccttgtgagaaccggtctttgcctttagctcatgtcgtgtttcacagcaaagagggtacagaaccatcactggtccaggttaatgtacaaaattttctggcaatgcctgattaaaaaaataaaattggcttgttgagaacagctgttttcgatttctaatgtgaagcaagacagagcactgctgtaaatgtctagcagcagattttttttttattggtacatattatccttcaaatctgagaatttggactaactgcaccaaagaaccctctaatttggtccctggcacatgcatacttgtcaatgtttttattcttttacaagacctgcattttatttgaattacccgaatagcaatatgtaaaatacaagtgacaaaatgtgatgagagcttcttgaaccggtaaactagtacaggtctgagaaagacatattagaagaatcattatacttccttgaattatatttattttcatgtttctctaatgcaaagaatgtttcatcaaatgtatattttctgttgcttactgtttgctctgagaagaagctgctgtttcaaagatggacctctgagtagctaattgattcaagtagtttttttatgttgacacattattactgctgttagcagtcgttttcaccaggtacttacagagcagatttcatacatcattcattcaagggctaaatttatattttttggaaatcatggcaactacacaggatgttgcttaccaggacggagttttggtatcttagtactgaagttagcactatgtttacatgcaaaagattaaggaaaaaacccttaaagtggacaggtatccaaagttcattttctgtgactcatcaaagtgacaaaagacttgtaacaactttgcctggacttttttcattttacaacagttcatccattcacaatgattttgttctctgctccatattttttaatcccttaagcatttgatgaaacactctttagtgctatatgcattttcttacttttgttaaaaatgtgacagttgtcaaaaaatgcactaaaatgtaaatggagattgaacaagttcactttccagcttataggcaactttatacagacttgaacattttctccagttgtttagtaaaagtgaaagagaaagggtttttcctgccacaggatataacttttttttatataacaagcataacacaccactgcttttggtggaaaagtgcagaatagtatgtaccttttatgaagaaaaatgtaatttacaatattcagtgagaatgttactgctgattttcttttccaaggtgtagaatattctttgatttatagaattcatttttgacccagatgatggttcctttacagaacaataaaatggctgaacattttcac

SEQ ID NO: 4879 - DNA, 1670 bp, Homo sapiens
cagcgtgcctgccagtgtagagccggtggagcagctgggctcggcgctgaggtttcgccctggctacaacgaccccatgtcagggttcggagcgaccttggccgttggcctgaccatctttgtgctgtctgtcgtcactatcatcatctgcttcacctgctcctgctgctgcctttacaagacgtgccgccgaccacgtccctccaagtgtgccgcccagctaccctggaccaagctaccagggctaccacaccatgccgcctcagccagggatgccagcagcaccctacccaatgcagtacccaccaccttacccagcccagcccatgggcccaccggcctaccacgagaccctggctggaggagcagccgcgccctaccccgccagccagcctccttacaacccggcctacatggatgccccgaaggcggccctctgagcattccctggcctctctggctgccacttggttatgttgtgtgtgtgcgtgagtggtgtgcaggcgcggttccttacgccccatgtgtgctgtgtgtgtccaggcacggttccttacgccccatgtgtgctgtgtgtgtcctgcctgtatatgtggcttcctctgatgctgacaaggtggggaacaatccttgccagagtgggctgggaccagactttgttctcttcctcacctgaaattatgcttcctaaaatctcaagccaaactcaaagaatggggtggtggggggcaccctgtgaggtggcccctgagaggtgggggcctctccagggcacatctggagttcttctccagcttaccctagggtgaccaagtagggcctgtcacaccagggtggcgcagctttctgtgtgatgcagatgtgtcctggtttcggcagcgtagccagctgctgcttgaggccatggctcgtccccggagttgggggtacccgttgcagagccagggacatgatgcaggcgaagcttgggatctggccaagttggactttgatcctttgggcagatgtcccattgctccctggagcctgtcatgcctgttggggatcaggcagcctcctgatgccagaacacctcaggcagagccctactcagctgtacctgtctgcctggactgtcccctgtccccgcatctcccctgggaccagctggagggccacatgcacacacagcctagctgcccccagggagctctgctgcccttgctggccctgcccttcccacaggtgagcagggctcctgtccaccagcacactcagttctcttccctgcagtgttttcattttattttagccaaacattttgcctgttttctgtttcaaacatgatagttgatatgagactgaaacccctgggttgtggagggaaattggctcagagatggacaacctggcaactgtgagtccctgcttcccgacaccagcctcatggaatatgcaacaactcctgtaccccagtccacggtgttctggcagcagggacacctgggccaatgggccatctggaccaaaggtggggtgtggggccctggatggcagctctggcccagacatgaatacctcgtgttcctcctccctctattactgtttcaccagagctgtcttagctcaaatctgttgtgtttctgagtctagggtctgtacacttgtttataataaatgcaatcgtttgg

SEQ ID NO: 4880 - DNA, 1907 bp, Homo sapiens
ggggaggaaattgaaactgagtggcccacgatgggaagaggggaaagcccaggggtacaggaggcctctgggtgaaggcagaggctaacatggggttcggagcgaccttggccgttggcctgaccatctttgtgctgtctgtcgtcactatcatcatctgcttcacctgctcctgctgctgcctttacaagacgtgccgccgaccacgtccggttgtcaccaccaccacatccaccactgtggtgcatgccccttatcctcagcctccaagtgtgccgcccagctaccctggaccaagctaccagggctaccacaccatgccgcctcagccagggatgccagcagcaccctacccaatgcagtacccaccaccttacccagcccagcccatgggcccaccggcctaccacgagaccctggctggtgagtgcccctgccaactctagccctgcccgacttcccgagtctctgccagcatccctcgggcacccatcccaaactacatcactcaacaggcctctgcccctttctgcttgcctgccactcacacggcagcccaccatgctcacagccaaccagggtcctctctgctttcaggaggagcagccgcgccctaccccgccagccagcctccttacaacccggcctacatggatgccccgaaggcggccctctgagcattccctggcctctctggctgccacttggttatgttgtgtgtgtgcgtgagtggtgtgcaggcgcggttccttacgccccatgtgtgctgtgtgtgtccaggcacggttccttacgccccatgtgtgctgtgtgtgtcctgcctgtatatgtggcttcctctgatgctgacaaggtggggaacaatccttgccagagtgggctgggaccagactttgttctcttcctcacctgaaattatgcttcctaaaatctcaagccaaactcaaagaatggggtggtggggggcaccctgtgaggtggcccctgagaggtgggggcctctccagggcacatctggagttcttctccagcttaccctagggtgaccaagtagggcctgtcacaccagggtggcgcagctttctgtgtgatgcagatgtgtcctggtttcggcagcgtagccagctgctgcttgaggccatggctcgtccccggagttgggggtacccgttgcagagccagggacatgatgcaggcgaagcttgggatctggccaagttggactttgatcctttgggcagatgtcccattgctccctggagcctgtcatgcctgttggggatcaggcagcctcctgatgccagaacacctcaggcagagccctactcagctgtacctgtctgcctggactgtcccctgtccccgcatctcccctgggaccagctggagggccacatgcacacacagcctagctgcccccagggagctctgctgcccttgctggccctgcccttcccacaggtgagcagggctcctgtccaccagcacactcagttctcttccctgcagtgttttcattttattttagccaaacattttgcctgttttctgtttcaaacatgatagttgatatgagactgaaacccctgggttgtggagggaaattggctcagagatggacaacctggcaactgtgagtccctgcttcccgacaccagcctcatggaatatgcaacaactcctgtaccccagtccacggtgttctggcagcagggacacctgggccaatgggccatctggaccaaaggtggggtgtggggccctggatggcagctctggcccagacatgaatacctcgtgttcctcctccctctattactgtttcaccagagctgtcttagctcaaatctgttgtgtttctgagtctagggtctgtacacttgtttataataaatgcaatcgtttgg

SEQ ID NO: 4881 - DNA, 1330 bp, Homo sapiens
gtgcttcctgtggctgacgtcatctggaggagatttgctttctttttctccaaaaggggaggaaattgaaactgagtggcccacgatgggaagaggggaaagcccaggggtacaggaggcctctgggtgaaggcagaggctaacatggggttcggagcgaccttggccgttggcctgaccatctttgtgctgtgtgtgtccaggcacggttccttacgccccatgtgtgctgtgtgtgtcctgcctgtatatgtggcttcctctgatgctgacaaggtggggaacaatccttgccagagtgggctgggaccagactttgttctcttcctcacctgaaattatgcttcctaaaatctcaagccaaactcaaagaatggggtggtggggggcaccctgtgaggtggcccctgagaggtgggggcctctccagggcacatctggagttcttctccagcttaccctagggtgaccaagtagggcctgtcacaccagggtggcgcagctttctgtgtgatgcagatgtgtcctggtttcggcagcgtagccagctgctgcttgaggccatggctcgtccccggagttgggggtacccgttgcagagccagggacatgatgcaggcgaagcttgggatctggccaagttggactttgatcctttgggcagatgtcccattgctccctggagcctgtcatgcctgttggggatcaggcagcctcctgatgccagaacacctcaggcagagccctactcagctgtacctgtctgcctggactgtcccctgtccccgcatctcccctgggaccagctggagggccacatgcacacacagcctagctgcccccagggagctctgctgcccttgctggccctgcccttcccacaggtgagcagggctcctgtccaccagcacactcagttctcttccctgcagtgttttcattttattttagccaaacattttgcctgttttctgtttcaaacatgatagttgatatgagactgaaacccctgggttgtggagggaaattggctcagagatggacaacctggcaactgtgagtccctgcttcccgacaccagcctcatggaatatgcaacaactcctgtaccccagtccacggtgttctggcagcagggacacctgggccaatgggccatctggaccaaaggtggggtgtggggccctggatggcagctctggcccagacatgaatacctcgtgttcctcctccctctattactgtttcaccagagctgtcttagctcaaatctgttgtgtttctgagtctagggtctgtacacttgtttataataaatgcaatcgtttgg

SEQ ID NO: 4882 - DNA, 2035 bp, Homo sapiens
tgcaagtctgcagccagcagagctcacagttgttgcaaagtgctcagcactaagggagccagcgcacagcacagccaggaaggcgagcgagcccagccagcccagccagcccagccagcccggaggtcatttgattgcccgcctcagaacgatggatctgcatctcttcgactactcagagccagggaacttctcggacatcagctggccatgcaacagcagcgactgcatcgtggtggacacggtgatgtgtcccaacatgcccaacaaaagcgtcctgctctacacgctctccttcatttacattttcatcttcgtcatcggcatgattgccaactccgtggtggtctgggtgaatatccaggccaagaccacaggctatgacacgcactgctacatcttgaacctggccattgccgacctgtgggttgtcctcaccatcccagtctgggtggtcagtctcgtgcagcacaaccagtggcccatgggcgagctcacgtgcaaagtcacacacctcatcttctccatcaacctcttcggcagcattttcttcctcacgtgcatgagcgtggaccgctacctctccatcacctacttcaccaacacccccagcagcaggaagaagatggtacgccgtgtcgtctgcatcctggtgtggctgctggccttctgcgtgtctctgcctgacacctactacctgaagaccgtcacgtctgcgtccaacaatgagacctactgccggtccttctaccccgagcacagcatcaaggagtggctgatcggcatggagctggtctccgttgtcttgggctttgccgttcccttctccattatcgctgtcttctacttcctgctggccagagccatctcggcgtccagtgaccaggagaagcacagcagccggaagatcatcttctcctacgtggtggtcttccttgtctgctggctgccctaccacgtggcggtgctgctggacatcttctccatcctgcactacatccctttcacctgccggctggagcacgccctcttcacggccctgcatgtcacacagtgcctgtcgctggtgcactgctgcgtcaaccctgtcctctacagcttcatcaatcgcaactacaggtacgagctgatgaaggccttcatcttcaagtactcggccaaaacagggctcaccaagctcatcgatgcctccagagtctcagagacggagtactctgccttggagcagagcaccaaatgatctgccctggagaggctctgggacgggtttacttgtttttgaacagggtgatgggccctatggttttctagagcaaagcaaagtagcttcgggtcttgatgcttgagtagagtgaagaggggagcacgtgccccctgcatccattctctctttctcttgatgacgcagctgtcatttggctgtgcgtgctgacagttttgcaacaggcagagctgtgtcgcacagcagtgctgtgcgtcagagccagctgaggacaggcttgcctggacttctgtaagataggattttctgtgtttcctgaattttttatatggtgatttgtatttaaattttaagactttattttctcactattggtgtaccttataaatgtatttgaaagttaaatatattttaaatattgtttgggaggcatagtgctgacatatattcagagtgttgtagttttaaggttagcgtgacttcagttttgactaaggatgacactaattgttagctgttttgaaattatatatatataaatatatataaatatataaatatatgccagtcttggctgaaatgttttatttaccatagttttatatctgtgtggtgttttgtaccggcacgggatatggaacgaaaactgctttgtaatgcagtttgtgacattaatagtattgtaaagttacattttaaaataaacaaaaaactgttctggactgcaaatctgcacacacaacgaacagttgcatttcagagagttctctcaatttgtaagttatttttttttaataaagatttttgtttcct

SEQ ID NO: 4883 - DNA, 3157 bp, Homo sapiens
gctgtgcgtccggaagtgtctcgcagatagtaaataatctcggaaaggcgagaaagaagctgtctccatcttgtctgtatccgctgctcttgtgacgttgtggagatggggagcgtcctggggctgtgctccatggcgagctggataccatgtttgtgtggaagtgccccgtgtttgctatgccgatgctgtcctagtggaaacaactccactgtaactagattgatctatgcacttttcttgcttgttggagtatgtgtagcttgtgtaatgttgataccaggaatggaagaacaactgaataagattcctggattttgtgagaatgagaaaggtgttgtcccttgtaacattttggttggctataaagctgtatatcgtttgtgctttggtttggctatgttctatcttcttctctctttactaatgatcaaagtgaagagtagcagtgatcctagagctgcagtgcacaatggattttggttctttaaatttgctgcagcaattgcaattattattggggcattcttcattccagaaggaacttttacaactgtgtggttttatgtaggcatggcaggtgccttttgtttcatcctcatacaactagtcttacttattgattttgcacattcatggaatgaatcgtgggttgaaaaaatggaagaagggaactcgagatgttggtatgcagccttgttatcagctacagctctgaattatctgctgtctttagttgctatcgtcctgttctttgtctactacactcatccagccagttgttcagaaaacaaggcgttcatcagtgtcaacatgctcctctgcgttggtgcttctgtaatgtctatactgccaaaaatccaagaatcacaaccaagatctggtttgttacagtcttcagtaattacagtctacacaatgtatttgacatggtcagctatgaccaatgaaccagaaacaaattgcaacccaagtctactaagcataattggctacaatacaacaagcactgtcccaaaggaagggcagtcagtccagtggtggcatgctcaaggaattataggactaattctctttttgttgtgtgtattttattccagcatccgtacttcaaacaatagtcaggttaataaactgactctaacaagtgatgaatctacattaatagaagatggtggagctagaagtgatggatcactggaggatggggacgatgttcaccgagctgtagataatgaaagggatggtgtcacttacagttattccttctttcacttcatgcttttcctggcttcactttatatcatgatgacccttaccaactggtacaggtatgaaccctctcgtgagatgaaaagtcagtggacagctgtctgggtgaaaatctcttccagttggattggcatcgtgctgtatgtttggacactcgtggcaccacttgttcttacaaatcgtgattttgactgagtgagacttctagcatgaaagtcccactttgattattgcttatttgaaaacagtattcccaacttttgtaaagttgtgtatgtttttgcttcccatgtaacttctccagtgttctggcatgaattagattttactgcttgtcattttgttattttcttaccaagtgcattgatatgtgaagtagaatgaattgcagaggaaagttttatgaatatggtgatgagttagtaaaagtggccattattgggcttattctctgctctatagttgtgaaatgaagagtaaaaacaaatttgtttgactattttaaaattatattagaccttaagctgttttagcaagcattaaagcaaatgtatggctgccttttgaaatatttgatgtgttgcctggcaggatactgcaaagaacatggtttattttaaaatttataaacaagtcacttaaatgccagttgtctgaaaaatcttataaggttttacccttgatacggaatttacacaggtagggagtgtttagtggacaatagtgtaggttatggatggaggtgtcggtactaaattgaataacgagtaaataatcttacttgggtagagatggcctttgccaacaaagtgaactgttttggttgttttaaactcatgaagtatgggttcagtggaaatgtttggaactctgaaggatttagacaaggttttgaaaaggataatcatgggttagaaggaagtgtttgaaagtcactttgaaagttagttttgggccagcacggtagctcacccttgtaatcccagcactttgggaggctgaggtgggtagattacttgagcccaggaattcaagaccagcctgggcaacatggtgaaaccctgtttctataaaaaataatctgggctttgtagcatatgcctgtggtcccagctactgaggaggctgaggtgggaggattgcttgagcccaggaggcagaggttgcagtgagccaaggtcacgtcactgcactctagcctgggcaacagagtaagacaaaaaaatatatatatattgaaaatcaaaggaggcaaaattttgacagggaaggaagtaactgcaaaacactaggctttagtaggtacttatataaaatctagtccagttctctcatttaaaaaaatgaagacactgaaatacagacttaaatagctcagatagctaattaggaaatttcaagttggccaataatagcattctctctgacatttaaaaataatttctattcaaaatacatgcataattgattttacacctcattactggtggataatttatgtgatgtggattgctggtgtccagcatgacccataaacaggtcagaagaatgatggaatgttttagaataaactcctgcttatagtatactacacagttcaaaagatgtttaaaatgcttttgtatttactgccatgtaattgaaatatatagattattgtaacctttcaacctgaaaatcaagcagtatgagagtttagttatttgtatgtgtcactagtgtctaatgaagcttttaaaatctacaatttcttctttaaaaatatttattaatgtgaatggaatataacaattcagcttaattccccaaccttattctgtgtgtagacattgtattccacaattttgaatggctgtgttttacctctaaataaatgaattcagag

SEQ ID NO: 4884 - DNA, 943 bp, Homo sapiens
agctgctgccgtagctgccgccgccgctaccaccgcgttcgggtgtagaatttggaatccctgcgccgcgttaacaatgaagcagagttcgaacgtgccggctttcctcagcaagctgtggacgcttgtggaggaaacccacactaacgagttcatcacctggagccagaatggccaaagttttctggtcttggatgagcaacgatttgcaaaagaaattcttcccaaatatttcaagcacaataatatggcaagctttgtgaggcaactgaatatgtatggtttccgtaaagtagtacatatcgactctggaattgtaaagcaagaaagagatggtcctgtagaatttcagcatccttacttcaaacaaggacaggatgacttgttggagaacattaaaaggaaggtttcatcttcaaaaccagaagaaaataaaattcgtcaggaagatttaacaaaaattataagtagtgctcagaaggttcagataaaacaggaaactattgagtccaggctttctgaattaaaaagtgagaatgagtccctttggaaggaggtgtcagaattacgagcaaagcatgcacaacagcaacaagttattcgaaagattgtccagtttattgttacattggttcaaaataaccaacttgtgagtttaaaacgtaaaaggcctctacttctaaacactaatggagcccaaaagaagaacctgtttcagcacatagtcaaagaaccaactgataatcatcatcataaagtaattttttagttagggtctattttatatttattgtctcagactaaattttattatggcagtgtttcatgcattcaaagaagtgtggtgaataacaattcaagtgttcatcccacagctttgttaaattgtgacattttttattatttgctttagattattgtaagaaataaatcatcacaaatc

SEQ ID NO: 4885 - DNA, 2851 bp, Homo sapiens
gcttcctgttccggcgccaggaggagccgcgcgctgctggtgctgttgccgccgctgctctagctgccgtcagtcaggctgcgcccgcgtcttcagggcccagtccctcggacccatcgccgcttctagaccctactgcggtctcggatattgccggttggcagatgcactacctgaacactcccctgccaaaacctctgctgtgagcaatacaaaacctggccaacctcctcaaggctggccaggctccaacccttggaataatccgagtgctccatcttcagtgccatctggactcccaccaagtgcaacaccctccactgtgccttttggaccagcaccaacaggaatgtatccctccgtgcctcccaccggaccacctccaggacccccagcaccctttcctccttccggaccatcatgtcccccacctggtggtccttatccagccccaactgtgccgggccctggccccacagggccatatcctacaccaaatatgccctttccagagctacccagaccatatggtgcacccacagatccagctgcagctggtcctttaggtccatggggatccatgtcttctggaccttgggcgccaggaatgggagggcagtatcctacccctaatatgccatatccatctccaggcccatatcccgctcctcctcctccccaagcccctggggcagcaccacctgttccatggggcaccgttccaccaggagcctggggaccaccagcaccatatcctgcccctacaggatcgtatcccacaccaggactctatcctactcccagtaatcctttccaagtgccttcaggaccttctggtgctccaccaatgcctggtggcccccattcttaccattaagttaacaatggacgaagagatgacgctttgctttttgaagtacatgtatatgcacatgaatgcatatataaaaattgctggtttcactattagagggcattcatgaaagaacaactcttgcacctctcagagaagataactgcctcttgtacttggatgcgtagtacatcatatgtatacaatcagataaaagcatagaagtaaatcattcggatgtgatttttatttggttttcatggaaagttaaagtgataaagtatattgaatagttctttgacagaatttgtttaaactatgaaactacacacttaaaaatctaagatgtggattattgttagaatctgcaacttcattggcaaattatttcaagtatttttctataatcactttccccttctaaataaataaacttcgagaataacccatcataatccaaacaaatgatgcctcaacattttgagctgctctgtcggacaaataaacctggtcctcttgaggttatattttggatatacatttttaaactgtcagtaattattgtcagatgtggagttcaatagccagccagtgttcatttttatccttgagcttttagtaaaaacttcctggttttatttttagtcattgggtcatacagcactaaagtctgctatttatggaaactaacttttttgtttttaatccaggccaacatgtatgtaaattaaatttttagataattgattatctctttgtactacttgagatttgattatgagatgtgcatattgctttgggaagagctcgaggaaggaaataattctctcctttgttttgaacctcaaactagataaaccctaggaattgcttaactgcaacaagtaattttcattcccacaaaaacctgaggcagctcttttgcccagagcgttccctgtagccacccccaccccacttgcccttggttctttagaaggagcacacacatcccttgattcctccctgatgtggtaaactggcacactccaggggtctaaaacataaaacagttgtgtttagggaaccttaagtcatgcagacatgactgttctctttgtacaagtgtgaatcaaaatatgtatctctttttcagagtctggttaagctatgtcattgtctactgcatagtttcctgagtctgtttgtaaagtgcttatggctaacagttcagttctgtatttgttgacaggtaaataagtggagttgagtgccatctttgaaaaaattaccctctagctctaacactgaaaataataataaattgtagatctctgcaactaagtttaaagcagtgtgactgtgttgcttaaatatcaagtattgtttataaccaccaaaaaaaaaaagccctggtagttttttggcaccttatgtttaaatcagattcttagatttggagtagacctgaccttgttatttattagataacattttgaatgtatccattggatttctaaaatgtattgtgaatttctcagacaaacaggatttatgctggagctctgttttgcttagaaataaaatatttagtagtttatttctgctctaattaaaatgtcactttacccctggataaaggcactttcactgcctgtcactgatcagcagatactgacttgttgccattaagtgaacttgacttcttatgtgtgctctatgagtttgttgtaattttcttcttgaaattgtgatttttcactgacagtaatgacaaatttaatgtatgtaattgtctatgcattttaagttaaactgcctaaaatgtgatttgagacatatacatatgtttgtattataaattgtaagcaatcagtttgagatactaggttttatcacctgctgctgtatttgtaaacaaagacaaatgttgctttaagaagtaattataattaggaataggctatggatgtgatacttggtattttttaagataaacttgtttgcttttgtgtatta

SEQ ID NO: 4886 - DNA, 3382 bp, Homo sapiens
gggagccagcgcgcccagcccagccaggctcggacagagggggcggggagagggtggagcgcggggagccaggcgaggggccgcgacgacgggactccattagccgctccggccacaggcagcgcttcgccagccgaggaaccggacgcggacaccgccgccccgcgagcctccagcccctcgcctgttgccgcgcgagtcccgggcccggagcgctaggagcgcgcggaaggagccatggctctggacgggataaggatgccagatggctgctacgcggacgggacgtgggaactgagtgtccatgtgacggacctgaaccgcgatgtcaccctgagagtgaccggcgaggtgcacattggaggcgtgatgcttaagctggtggagaaactcgatgtaaaaaaagattggtctgaccatgctctctggtgggaaaagaagagaacttggcttctgaagacacattggaccttagataagtatggtattcaggcagatgctaagcttcagttcacccctcagcacaaactgctccgcctgcagcttcccaacatgaagtatgtgaaggtgaaagtgaatttctctgatagagtcttcaaagctgtttctgacatctgtaagacttttaatatcagacaccccgaagaactttctctcttaaagaaacccagagatccaacaaagaaaaaaaagaagaagctagatgaccagtctgaagatgaggcacttgaattagaggggcctcttatcactcctggatcaggaagtatatattcaagcccaggactgtatagtaaaacaatgacccccacttatgatgctcatgatggaagccccttgtcaccaacttctgcttggtttggtgacagtgctttgtcagaaggcaatcctggtatacttgctgtcagtcaaccaatcacgtcaccagaaatcttggcaaaaatgttcaagcctcaagctcttcttgataaagcaaaaatcaaccaaggatggcttgattcctcaagatctctcatggaacaagatgtgaaggaaaatgaggccttgctgctccgattcaagtattacagcttttttgatttgaatccaaagtatgatgcaatcagaatcaatcagctttacgagcaggccaaatgggccattctcctggaagagattgaatgcacagaagaagaaatgatgatgtttgcagccctgcagtatcatatcaataagctgtcaatcatgacatcagagaatcatttgaacaacagtgacaaagaagttgatgaagttgatgctgccctttcagacctggagattactctggaagggggtaaaacgtcaacaattttgggtgacattacttccattcctgaacttgctgactacattaaagttttcaagccaaaaaagctgactctgaaaggttacaaacaatattggtgcaccttcaaagacacatccatttcttgttataagagcaaagaagaatccagtggcacaccagctcatcagatgaacctcaggggatgtgaagttaccccagatgtaaacatttcaggccaaaaatttaacattaaactcctgattccagttgcagaaggcatgaatgaaatctggcttcgttgtgacaatgaaaaacagtatgcacactggatggcagcctgcagattagcctccaaaggcaagaccatggcggacagttcttacaacttagaagttcagaatattctttcctttctgaagatgcagcatttaaacccagatcctcagttaataccagagcagatcacgactgatataactcctgaatgtttggtgtctccccgctatctaaaaaagtataagaacaagcagataacagcgagaatcttggaggcccatcagaatgtagctcagatgagtctaattgaagccaagatgagatttattcaagcttggcagtcactacctgaatttggcatcactcacttcattgcaaggttccaagggggcaaaaaagaagaacttattggaattgcatacaacagactgattcggatggatgccagcactggagatgcaattaaaacatggcgtttcagcaacatgaaacagtggaatgtcaactgggaaatcaaaatggtcaccgtagagtttgcagatgaagtacgattgtccttcatttgtactgaagtagattgcaaagtggttcatgaattcattggtggctacatatttctctcaacacgtgcaaaagaccaaaacgagagtttagatgaagagatgttctacaaacttaccagtggttgggtgtgaataggaatactgtttaatgaaactccacggccataacaatatttaactttaaaagctgtttgttatatgctgcttaataaagtaagcttgaaatttatcattttatcatgaaaacttctttgccttaccagaccagttaatatgtgcactaaacaagcacgactattaatctatcatgttatgatataataaacttgaatttgtcacacattccttagggccatgaattgaaaactgaaatagtgggcaaatcaggaacaaaccatcactgatttactgatttaagctagccaaactgtaagaaacaagccatctattttaaagctatccagggcttaacctatatgaactctatttatcatgtctaatgcatgtgatttaatgtatgtttaatttgatatcatgttttaaaatatcctacttctggtagccatttaattcctccccctacccccaaataaatcaggcatgcaggaggcctgatatttagtaatgtcattgtgtttgaccttgaaggaaaatgctattagtccgtcgtgcttgatttgtttttgtccttgaataagcatgttatgtatattgtctcgtgtttttatttttacaccatattgtattacacttttagtattcaccagcataatcactgtctgcctaaaatatgcaactctttgcattacaatatgaagtaaagttctatgaagtatgcattttgtgtaactaatgtaaaaacacaaattttataaaattgtacagttttttaaaaactactcacaactagcagatggcttaaatgtagcaatctctgcgttaattaaatgcctttaagagatataattaacgtgcagttttaatatctactaaattaagaatgacttcattatgatcatgatttgccacaatgtccttaactctaatgcctggactggccatgttctagtctgttgcgctgttacaatctgtattggtgctagtcagaaaattcctagctcacatagcccaaaagggtgcgagggagaggtggattaccagtattgttcaataatccatggttcaaagactgtataaatgcattttattttaaataaaagcaaaacttttattt

SEQ ID NO: 4887 - DNA, 2920 bp, Homo sapiens
ctcactaaatgcaggagaacgaggatgtttttgtcttgatttctcccacaatggaagaatattagcagcagcttgtgccagccgggatggatatccaattattttatatgaaattccttctggacgtttcatgagagaattgtgtggccacctcaatatcatttatgatctttcctggtcaaaagatgatcactacatccttacttcatcatctgatggcactgccaggatatggaaaaatgaaataaacaatacaaatactttcagagttttacctcatccttcttttgtttacacggctaaattccatccagctgtaagagagctagtagttacaggatgctatgattccatgatacggatatggaaagttgagatgagagaagattctgccatattggtccgacagtttgatgttcacaaaagttttatcaactcactttgttttgatactgaaggtcatcatatgtattcaggagattgtacaggggtgattgttgtttggaatacctatgtcaagattaatgatttggaacattcagtgcaccactggactataaataaggaaattaaagaaactgagtttaagggaattccaataagttatttggagattcatcccaatggaaaacgtttgttaatccataccaaagacagtactttgagaattatggatctccggatattagtagcaaggaagtttgtaggagcagcaaattatcgggagaagattcatagtactttgactccatgtgggacttttctgtttgctggaagtgaggatggtatagtgtatgtttggaacccagaaacaggagaacaagtagccatgtattctgacttgccattcaagtcacccattcgagacatttcttatcatccatttgaaaatatggttgcattctgtgcatttgggcaaaatgagccaattcttctgtatatttacgatttccatgttgcccagcaggaggctgaaatgttcaaacgctacaatggaacatttccattacctggaatacaccaaagtcaagatgccctatgtacctgtccaaaactaccccatcaaggctcttttcagattgatgaatttgtccacactgaaagttcttcaacgaagatgcagctagtaaaacagaggcttgaaactgtcacagaggtgatacgttcctgtgctgcaaaagtcaacaaaaatctctcatttacttcaccaccagcagtttcctcacaacagtctaagttaaagcagtcaaacatgctgaccgctcaagagattctacatcagtttggtttcactcagaccgggattatcagcatagaaagaaagccttgtaaccatcaggtagatacagcaccaacggtagtggctctttatgactacacagcgaatcgatcagatgaactaaccatccatcgcggagacattatccgagtgtttttcaaagataatgaagactggtggtatggcagcataggaaagggacaggaaggttattttccagctaatcatgtggctagtgaaacactgtatcaagaactgcctcctgagataaaggagcgatcccctcctttaagccctgaggaaaaaactaaaatagaaaaatctccagctcctcaaaaggtaaaataaaacaaaacagctcacagagacacctccttcttccccctgcttctgcctccatgagtaactacctatatgacgtgctgctgctgagaccaaggaatgaatagtgccaaatcttgctgaagaatgatcttgcagaaatctgattgtgaagaaggaaatctaaaaaggccaaacaagcttcagtagagataacaccaggaaagcagttactcaaacaagactgaaagagaagcaatcaatcaataagaacaagtcccaggacttcagactaggctcagaatctatgacacattctgaaatgagaaaagaacagagccatgaggaccaaggacacataatggatacacggatgaggaagaacaagcaagcaggcagaaaagtcactctaatagagtgtgccagctgtcacttttctcaggagtggtcgatggagttgactgctaccttaaccagatttgccatcgttctgaaactgccgtgtgttttctaaggacaaccaggtgttaagcctttctctttagaagaaggacagtaacctttctgttaaagaattgaagaaaagttaagagctgccgaaatgcacagaggtgaaaatgacaaaccaaatggaatttctcttcagagttcagaattttcagatactaaggaggaagaaaggatccactacttcttgttcttatgaatgactctagaaaaatcagaatcaagttgtgggtggaaaaatcaacgtggcctttgagttcagttgttataaaccattgtgactattgttggtcaaagtattggtacttatattgttagtaattgcatcataattacattaccagtgttggaaaactaatgaagaaaacactgtaattgctactcagcaaatgtgaataaaaggtgtttgcgttattaggatgtctgttaagtaatcatttaatattattatattggtaatggttgtatgtgtgatgctatgcccagaatatgaagtatctgtttttgaaattcactttatttaaaagataagcagctgactgggcacggtgcctcatgcctgtaatcctagcaccttgggaggctgaggcaggtggatcacctaaggtcaggagttcaacaacaccagcctgaccaacatggtgaaaccccatctctactaaaaatacaaaaatcagccgggtctcatggcaggcacctgtaatcccatctactgaggcaggagaattgcttgacccaggaggcagaggttgcagtgagccaagatcacgccattgcactccagcctgggggacagagcaagactctatctcc

SEQ ID NO: 4888 - DNA, 2228 bp, Homo sapiens
ctgcatgtgtgtgtctcatagacacttcagatttaccaagcctaaaatggatcttgtccttagtttcatatctcacagttaatgcatcatcatctcacattttcccctttctgtcattagtcttcactttccttaccactccaaacttgttattccttattcccgaattcttgagtttattccctttctgtagtaagtttgtgcatttgtatcagcctctactctaagacagaaataccatcaccttacttctccggtcacaatatttactggcttcctattacttaactgcaggatgaaatttaaaccctaagcgtgatttatgagacccctttattatttctcccttgcctatctctgttgcctcctgtcttaccttttcttcattattctatatggtcccctccccatggcccccacaagtgacacatgactcttagcccatcccacatttggttatgcctttgcccacacagtttcctggggcagcagtgtcttcctttttctccctactcatgcatacaagctacctaataaacacttattccttcttcagagtgccagatgtctattctcaccatcatggattctttggtgcacctttgtgtttctattgtatattttacatattatttgtctcaggacaatgtaattgtttccatctttctcttcactagtataatatctttatgggcagggacttacatttttatttttttttatccccagagtttagtataatatctggtactacgtatttattatttctcaataaatatttgagaaaggaatgaacctttctttggtaatatgagtatttttatttgcaaaaaaaaaaagtaaagtgtggtatgccatatttagtagagatgttaattctgaaatgattattatttaatgtccattgaactactagttttatatgactacttgagaactaagtatagttaacggtattaatcatcagataacattgctgtatgaaccataagattttggtatgttttgcagatcaaggatctggattttgcataactggtaaaatagaagctggttatatccaaactggtgaccgactactggcaatgcctcctaatgaaacttgtaccgtgaaaggaatcactctgcatgatgaacctgtcgactgggcggcagcaggcgatcatgttagtcttactttggttgggatggatatcatcaaaatcaatgttggctgcatattttgtggccccaaagtacccattaaagcttgcactcgtttcagagcccgaatcctcatctttaatattgaaattcctatcactaaaggatttcctgtgctgttacactaccaaactgtcagtgaacccgccgttattaaacgattgattagtgtcttaaacaaaagcacgggtgaagtcacaaagaaaaagcctaagtttttgactaaaggccagaatgcattggtagagctacagacacaaagaccaatagctcttgagctatataaagactttaaagagctggggaggttcatgctacgttacggtggttctacaatagctgctggtgttgtcactgagataaaagaatgatgggtcagaatttctaccacgtttctggatacagtgaaatagctaacctctgtttcaagaatgcagttattaagtcaaaggaacaatgtgcaattgatatgtttttagatgagagagaaaaattaaagctaaaattagctgcaaagaagtattaataatcacctctgcaaaaattctaagttgccaactggcaaagaaagtctaatgttaaaaacaactttgcctttgaaacgttaataaatggatttactttgctaagatttatggcaagtgtcaaaaatagtatctgaagatactgaatcatcatgaaatgaactctacttctggccaaagcacaatgtatttgcagttttctcttttgattcaattatactgcacatgttttaaggaaaagtaacttaattgggtttttcaggcagttgatatttgacctaagctttttttttttttttttttccagttaatgctaagaaaagatttggggaaggttataataaaagtattttgtggtgaccataagaatgtccctccccaaacaagtaaacttgtgaaagtttaatttggaattagtggaagctgttcctttgaaagccaagatattatttaagttgtaaagccagctaataaaatgccttagtttgagcataatacaaa

SEQ ID NO: 4889 - DNA, 4208 bp, Homo sapiens
gggtaagcgcgtctagggcgctgcgcggcgcagcgaaaatggcggcttccaggtgggcgcgcaaggccgtggtcctgctttgtgcctctgacctgctgctgctgctgctactgctaccaccgcctgggtcctgcgcggccgaaggctcgcccgggacgcccgacgagtctaccccacctccccggaagaagaagaaggatattcgcgattacaatgatgcagacatggcgcgtcttctggagcaatgggagaaagatgatgacattgaagaaggagatcttccagagcacaagagaccttcagcacctgtcgacttctcaaagatagacccaagcaagcctgaaagcatattgaaaatgacgaaaaaagggaagactctcatgatgtttgtcactgtatcaggaagccctactgagaaggagacagaggaaattacgagcctctggcagggcagccttttcaatgccaactatgacgtccagaggttcattgtgggatcagaccgtgctatcttcatgcttcgcgatgggagctacgcctgggagatcaaggactttttggtcggtcaagacaggtgtgctgatgtaactctggagggccaggtgtaccccggcaaaggaggaggaagcaaagagaaaaataaaacaaagcaagacaagggcaaaaaaaagaaggaaggagatctgaaatctcggtcttccaaggaagaaaatcgagctgggaataaaagagaagacctgtgatggggcagcagtgacgcgctgtggggggacaggtggacgtggagagctctttgcccagctcctggggtgggagtggtctcaggcaactgcacaccggatgacattctagtgtcttctagaaagggtctgccacatgaccagtttgtggtcaaagaattactgcttaataggcttcaagtaagaagacagatgttttctaattaatactggacactgacaaattcatgtttactataaaatctccttacatggaaatgtgactgtgttgctttttcccatttacacttggtgagtcatcaactctactgagattccactcccctccaagcacctgctgtgattgggtggcctgctctgatcagatagcaaattctgatcagagaagactttaaaactcttgacttaattgagtaaactcttcatgccatatacatcattttcattatgttaaaggtaaaatatgctttgtgaactcagatgtctgtagccaggaagccagggtgtgtaaatccaaaatctatgcaggaaatgcggagaatagaaaatatgtcacttgaaatcctaagtagttttgaatttctttgacttgaatcttactcatcagtaagagaactcttggtgtctgtcaggttttatgtggtctgtaaagttaggggttctgttttgtttccttatttaggaaagagtactgctggtgtcgaggggttatatgttccatttaatgtgacagttttaaaggatttaagtagggaatcagagtcctttgcagagtgtgacagacgactcaataacctcatttgtttctaaacatttttctttgataaagtgcctaaatctgtgctttcgtatagagtaacatgatgtgctactgttgatgtctgattttgccgttcatgttagagcctactgtgaataagagttagaacatttatatacagatgtcatttctaagaactaaaattctttgggaaaaaccctcaattgtgattttaataaattaaaagtagcacattacatggttagaaaatgtcagtgttaaagaatggtacaaagtgaaaagtgtatccctctcttgccgccggtggtagcttgtcccagtggaagctgctgttaacaatttgtgcccccacatccccctccctgcccatccaccaaaaaaaagtacatttacttatgtaaatgtacttatggtgatgtatgtttgttttggcctcacagcatctgtttccccttaatttggtagctgctcacatttccctcgaaagaaccacaccctctgcattctcagttctctgctttggatgggacatttgccctgcagtccccccaccctccaggccatgccctctccagggtgaggcctgtgtgatctaccgtactagggtactaggccctgaaagaggcttttcttgttcctcctgcatcttgaacctggagcgggagctgttgtaggccccgcccttggagaagagaactgtctgacagtggggagagagcgccacaccctggtggcataaacgagtccctgaatcatgccgtggctgaaccaagccctgtctgtgggctttttctgttgtactcagggcagtttgatggggttactgtcctgcatagccataatggcccagtataaagcagctgttttgatgagataattgctttaattaagcaaaaggtagcaaagctttcactccgccctgtaccttctgtttccacttaggagccttcccatgtcagaatgtgcagatctgtctcattgtttcctgtgcagtgtgcccccacttcacccagtagtttctgtgtgtctgttatgtactaggtactacaaggtgccaggacggtgtagatacagcctctgctatcgtaaaactcaatgattcggtgggggaagacaaatgtcagtaatgtacaaagtaaaatggcagctgttagaagtatgaaaggggcagggtagggggaggtagaatcttccctgaccaggttaagaaaaccagaggccttctctgagggcaagaggaggagaggagaaatagagtaaggcaggcagaggaaacagtctgagctaagaccctgtggctagaagtggcagagggagaggcagcaggaaggccagcggggaggctggggcccagtgcaggcccaggttggaggagcgtagcacatggagtttggtaggagtttgggacgccctggtggatcttaattgtgatggggtgggtgtgaaaggcagtccaggttgcactggttgcacaggagaagtgatcagaagaggaccccagcaggtgtgagccgtgagctgggaggtgcttcagtagtgcaggccatagctgaaggtgtcctacatcagcagggtgatggtgaggtttgaaccactgtttcactgcatagtccctgctgatggacacttgagtgttcagattttttgctggtatattcagtgctgcagtggacattttcatacaaaatatttcggtacacttttgtttatatctgaaaggtaaattcctagcagtagaattattagagcaaacggaatttaacattttggtgtgtattgccaaattgccctcccaagtggtttagtcagcttacccttgccaacaatagatctatccttgccagccttgggcatcacatttaccagtttaatagattgtaaaaccatatcttaattggctaccctgaagccaccatactggagaggctgcgtacagtgtttcacgtagagagagggatacccaggaggcccacctgctccaaccccagctgcatgagtcttcccagcccaggcacagacatgtggataagatttaaacatttccagccccagccttcaagcaatcctagttgacactgaggggagccaacataagctgagctgagaaacagtctgcccagtctgcagattcatgagcaaaagaaatgttgggctgggtacagtggctcacgcctgtaatcccagtactttgggaggccgaggtgggtggatcagttgaggtcaggagtttgagaccagcctggccaacatggtgaagccctgtctctactaaaaattagccgagtgtggtggtgcgggcctgtaatcccagctactcaggtggctgaggcaggagaatggcttgaacccgggaggcggaggttgcagtgagccaagatcaggccactgcactccagcctggatgacgggatgagactctgtctcaaaaaaacgaaacaaaaattttttaagagaaatgtcatttgtttttgtttttgagacagggtctcactctgttgccctcactagagtgcagtaggatcacggctcactgaagtctctacctaccggctcaattgatcttcccaccacagcctcccaaatagctgggagaaatgtcctgtttttaatgaatttgtcttcctttttgtcttgtttgttttaatatctagtgatctaataaatttggatgatatcttttgactatc

SEQ ID NO: 4890 - DNA, 7080 bp, Homo sapiens
gagctagcgctcaagcagagcccagcgcggtgctatcggacagagcctggcgagcgcaagcggcgcggggagccagcggggctgagcgcggccagggtctgaacccagatttcccagactagctaccactccgcttgcccacgccccgggagctcgcggcgcctggcggtcagcgaccagacgtccggggccgctgcgctcctggcccgcgaggcgtgacactgtctcggctacagacccagagggagcacactgccaggatgggagctgctgggaggcaggacttcctcttcaaggccatgctgaccatcagctggctcactctgacctgcttccctggggccacatccacagtggctgctgggtgccctgaccagagccctgagttgcaaccctggaaccctggccatgaccaagaccaccatgtgcatatcggccagggcaagacactgctgctcacctcttctgccacggtctattccatccacatctcagagggaggcaagctggtcattaaagaccacgacgagccgattgttttgcgaacccggcacatcctgattgacaacggaggagagctgcatgctgggagtgccctctgccctttccagggcaatttcaccatcattttgtatggaagggctgatgaaggtattcagccggatccttactatggtctgaagtacattggggttggtaaaggaggcgctcttgagttgcatggacagaaaaagctctcctggacatttctgaacaagacccttcacccaggtggcatggcagaaggaggctatttttttgaaaggagctggggccaccgtggagttattgttcatgtcatcgaccccaaatcaggcacagtcatccattctgaccggtttgacacctatagatccaagaaagagagtgaacgtctggtccagtatttgaacgcggtgcccgatggcaggatcctttctgttgcagtgaatgatgaaggttctcgaaatctggatgacatggccaggaaggcgatgaccaaattgggaagcaaacacttcctgcaccttggatttagacacccttggagttttctaactgtgaaaggaaatccatcatcttcagtggaagaccatattgaatatcatggacatcgaggctctgctgctgcccgggtattcaaattgttccagacagagcatggcgaatatttcaatgtttctttgtccagtgagtgggttcaagacgtggagtggacggagtggttcgatcatgataaagtatctcagactaaaggtggggagaaaatttcagacctctggaaagctcacccaggaaaaatatgcaatcgtcccattgatatacaggccactacaatggatggagttaacctcagcaccgaggttgtctacaaaaaaggccaggattataggtttgcttgctacgaccggggcagagcctgccggagctaccgtgtacggttcctctgtgggaagcctgtgaggcccaaactcacagtcaccattgacaccaatgtgaacagcaccattctgaacttggaggataatgtacagtcatggaaacctggagataccctggtcattgccagtactgattactccatgtaccaggcagaagagttccaggtgcttccctgcagatcctgcgcccccaaccaggtcaaagtggcagggaaaccaatgtacctgcacatcggggaggagatagacggcgtggacatgcgggcggaggttgggcttctgagccggaacatcatagtgatgggggagatggaggacaaatgctacccctacagaaaccacatctgcaatttctttgacttcgatacctttgggggccacatcaagtttgctctgggatttaaggcagcacacttggagggcacggagctgaagcatatgggacagcagctggtgggtcagtacccgattcacttccacctggccggtgatgtagacgaaaggggaggttatgacccacccacatacatcagggacctctccatccatcatacattctctcgctgcgtcacagtccatggctccaatggcttgttgatcaaggacgttgtgggctataactctttgggccactgcttcttcacggaagatgggccggaggaacgcaacacttttgaccactgtcttggcctccttgtcaagtctggaaccctcctcccctcggaccgtgacagcaagatgtgcaagatgatcacagaggactcctacccggggtacatccccaagcccaggcaagactgcaatgctgtgtccaccttctggatggccaatcccaacaacaacctcatcaactgtgccgctgcaggatctgaggaaactggattttggtttatttttcaccacgtaccaacgggcccctccgtgggaatgtactccccaggttattcagagcacattccactgggaaaattctataacaaccgagcacattccaactaccgggctggcatgatcatagacaacggagtcaaaaccaccgaggcctctgccaaggacaagcggccgttcctctcaatcatctctgccagatacagccctcaccaggacgccgacccgctgaagccccgggagccggccatcatcagacacttcattgcctacaagaaccaggaccacggggcctggctgcgcggcggggatgtgtggctggacagctgccggtttgctgacaatggcattggcctgaccctggccagtggtggaaccttcccgtatgacgacggctccaagcaagagataaagaacagcttgtttgttggcgagagtggcaacgtggggacggaaatgatggacaataggatctggggccctggcggcttggaccatagcggaaggaccctccctataggccagaattttccaattagaggaattcagttatatgatggccccatcaacatccaaaactgcactttccgaaagtttgtggccctggagggccggcacaccagcgccctggccttccgcctgaataatgcctggcagagctgcccccataacaacgtgaccggcattgcctttgaggacgttccgattacttccagagtgttcttcggagagcctgggccctggttcaaccagctggacatggatggggataagacatctgtgttccatgacgtcgacggctccgtgtccgagtaccctggctcctacctcacgaagaatgacaactggctggtccggcacccagactgcatcaatgttcccgactggagaggggccatttgcagtgggtgctatgcacagatgtacattcaagcctacaagaccagtaacctgcgaatgaagatcatcaagaatgacttccccagccaccctctttacctggagggggcgctcaccaggagcacccattaccagcaataccaaccggttgtcaccctgcagaagggctacaccatccactgggaccagacggcccccgccgaactcgccatctggctcatcaacttcaacaagggcgactggatccgagtggggctctgctacccgcgaggcaccacattctccatcctctcggatgttcacaatcgcctgctgaagcaaacgtccaagacgggcgtcttcgtgaggaccttgcagatggacaaagtggagcagagctaccctggcaggagccactactactgggacgaggactcagggctgttgttcctgaagctgaaagctcagaacgagagagagaagtttgctttctgctccatgaaaggctgtgagaggataaagattaaagctctgattccaaagaacgcaggcgtcagtgactgcacagccacagcttaccccaagttcaccgagagggctgtcgtagacgtgccgatgcccaagaagctctttggttctcagctgaaaacaaaggaccatttcttggaggtgaagatggagagttccaagcagcacttcttccacctctggaacgacttcgcttacattgaagtggatgggaagaagtaccccagttcggaggatggcatccaggtggtggtgattgacgggaaccaagggcgcgtggtgagccacacgagcttcaggaactccattctgcaaggcataccatggcagcttttcaactatgtggcgaccatccctgacaattccatagtgcttatggcatcaaagggaagatacgtctccagaggcccatggaccagagtgctggaaaagcttggggcagacaggggtctcaagttgaaagagcaaatggcattcgttggcttcaaaggcagcttccggcccatctgggtgacactggacactgaggatcacaaagccaaaatcttccaagttgtgcccatccctgtggtgaagaagaagaagttgtgaggacagctgccgcccggtgccacctcgtggtagactatgacggtgactcttggcagcagaccagtgggggatggctgggtcccccagcccctgccagcagctgcctgggaaggccgtgtttcagccctgatgggccaagggaaggctatcagagaccctggtgctgccacctgcccctactcaagtgtctacctggagcccctggggcggtgctggccaatgctggaaacattcactttcctgcagcctcttgggtgcttctctcctatctgtgcctcttcagtgggggtttggggaccatatcaggagacctgggttgtgctgacagcaaagatccactttggcaggagccctgacccagctaggaggtagtctggagggctggtcattcacagatccccatggtcttcagcagacaagtgagggtggtaaatgtaggagaaagagccttggccttaaggaaatctttactcctgtaagcaagagccaacctcacaggattaggagctggggtagaactggctatccttggggaagaggcaagccctgcctctggccgtgtccacctttcaggagactttgagtggcaggtttggacttggactagatgactctcaaaggcccttttagttctgagattccagaaatctgctgcatttcacatggtacctggaacccaacagttcatggatatccactgatatccatgatgctgggtgccccagcgcacacgggatggagaggtgagaactaatgcctagcttgaggggtctgcagtccagtagggcaggcagtcaggtccatgtgcactgcaatgccaggtggagaaatcacagagaggtaaaatggaggccagtgccatttcagaggggaggctcaggaaggcttcttgcttacaggaatgaaggctgggggcattttgctggggggagatgaggcagcctctggaatggctcagggattcagccctccctgccgctgcctgctgaagctggtgactacggggtcgccctttgctcacgtctctctggcccactcatgatggagaagtgtggtcagaggggagcaatgggctttgctgcttatgagcacagaggaattcagtccccaggcagccctgcctctgactccaagagggtgaagtccacagaagtgagctcctgccttagggcctcatttgctcttcatccagggaactgagcacagggggcctccaggagaccctagatgtgctcgtactccctcggcctgggatttcagagctggaaatatagaaaatatctagcccaaagccttcattttaacagatggggaaagtgagcccccaagatgggaaagaaccacacagctaagggagggcctggggagccccaccctagcccttgctgccacaccacattgcctcaacaaccggccccagagtgcccaggcactcctgaggtagcttctggaaatggggacaagtcccctcgaaggaaaggaaatgactagagtagaatgacagctagcagatctcttccctcctgctcccagcgcacacaaacccgccctccccttggtgttggcggtccctgtggccttcactttgttcactacctgtcagcccagcctgggtgcacagtagctgcaactccccattggtgctacctggctctcctgtctctgcagctctacaggtgaggcccagcagagggagtagggctcgccatgtttctggtgagccaatttggctgatcttgggtgtctgaacagctattgggtccaccccagtccctttcagctgctgcttaatgccctgctctctccctggcccaccttatagagagcccaaagagctcctgtaagagggagaactctatctgtggtttataatcttgcacgaggcaccagagtctccctgggtcttgtgatgaactacatttatcccctttcctgccccaaccacaaactctttccttcaaagagggcctgcctggctccctccacccaactgcacccatgagactcggtccaagagtccattccccaggtgggagccaactgtcagggaggtctttcccaccaaacatctttcagctgctgggaggtgaccatagggctctgcttttaaagatatggctgcttcaaaggccagagtcacaggaaggacttcttccagggagattagtggtgatggagaggagagttaaaatgacctcatgtccttcttgtccacggttttgttgagttttcactcttctaatgcaagggtctcacactgtgaaccacttaggatgtgatcactttcaggtggccaggaatgttgaatgtctttggctcagttcatttaaaaaagatatctatttgaaagttctcagagttgtacatatgtttcacagtacaggatctgtacataaaagtttctttcctaaaccattcaccaagagccaatatctaggcattttcttggtagcacaaattttcttattgcttagaaaattgtcctccttgttatttctgtttgtaagacttaagtgagttaggtctttaaggaaagcaacgctcctctgaaatgcttgtcttttttctgttgccgaaatagctggtcctttttcgggagttagatgtatagagtgtttgtatgtaaacatttcttgtaggcatcaccatgaacaaagatatattttctatttatttattatatgtgcacttcaagaagtcactgtcagagaaataaagaattgtcttaaatgtc

SEQ ID NO: 4891 - DNA, 3618 bp, Homo sapiens
atcacagctgcattgtttgtggactgcctccaccacatgacctctaggtccgcctcccccatgagtgttaagataaggggactgaattccatcagtgttctcagattttttaaactttgcctccacagattcttccacaagcacatctcaggcagccaaaaagattgtgttgaattttatgttctgtgggtttctttccaaaataatagatatggtgagtatattggatacgctttctcaatccatggtctttctcccaaccccatattctaatactcctccaggtggtatggtcctgtagcatgtgatacgtttaacacctcttaagttctgattcccctttcttctggtaatatatcccaattttcctttgcggaacagccatttatccatttaatgcagtcttagaagaactttcaatgactgttcctgcctttcctagccaaagggtgagcacacaagccaccagcccaagcagatgctctctccctggaaggtgacttttgagcactatgtcccatggcctaagcatggttcttaaagatgatgccttaaggatacagtccattagttcctgctacccagatcccagaagctaccctgttccctgtccttttggaggttagttattcagcttatcctttagttctccaagttgaatagcctctcaataaattcctgttttgcttaagatagtcaagttggattctgttgctaacagccaaagaactctaattgatacataactccccctactaagaataattgacctggattatatttgaagtctctttttaccttcaacaatctgtgattccagtaacctccaataacataaattacaggacatctaaatcaagatttaggagaagaaaaagaaaaaccccaaactcacagatacaagagattaaaaattttgtagtagattgaataactgtctaacaaatattcacttcctccccctcaaacttggtgacagacatatgcttccctagcctatttgtgttgtgctttaccatgtgacttactttagccaatggaatgtgtgagaatgtgccatctttgagcctaggccttaagagttctgtgtttctgctcaccactaggagtttgcaatctcccccgtgagaagaatatgttttgggaagaatgggagtcatatggaagtgacttgaacccaactctcagcctggagtcaggctcagtctagagaagctgatccctagacaacctgcagatacatgagtaagaaataaagacctgtcatgaagttttaagattttttttgttatgcagcattattacagccatagctgactgatacagatttgttgtaacttcagtttactttaagcctaacaattttcagattcatccagtctaggaagggattagtaaaagtcctacctgccactttgacctggttgggggcgcaggatctgcagggaagcacctggaactcttctgcctggtacatggagtaatcagtactggcaatgaccagggtatctccaggtttccatgactgtacattatcctccaagttcagaatggtgctgttcacattggtgtcaatggtgactgtgagtttgggcctcactgtaacccaaaacaggaaagactgagatagagccctttgctcttggcaaacttttggctacctcttttttcccttcccctccctaaataactaaatgccaggtttgcctatccaaaacccagatcactggcttgctccatcccactcttggtaaaggtttttgaagtcaacaaaaaccctaccagaaaagagccattcattagctctgggcgggggaattttccactaacttcttagctggagttaaatgtggctgcctcaccccacccactttgctcaagatgtaaaacaaatatagttcctctcaactattattttcggtagccataaacttctccccctaaactttcattcctaatgactgccttctggagatggccaagtgcctccgagaacaacccgaccatttccaatctcttctaacaagcaccttaggtactggatttaaaataatagcacccaaagaggcaaagaactgcacatctctgcaggggagggcagctctgtccatttgtaccttgactgccttggaccaggcccttccccttcctgaaaggcttatgggcagggtggggttctgctgtctcctgccaactccaaggatcctcccactgctcccgtgtcacaaaagtgctctcctttgggagcactgtctcactgagaggtctggaagttgcctgcatagctgccagttcaaggaaccgagccatagttgcatctgtgtccccgacaaggggctgcttaccaggcttcccacagaggaaccgtacacggtagctccggcaggctctgccccggtcgtagcaagcaaacctataatcctggccttttttgtagacaacctcggtgctgaggttaactccatccattgtagtggcctgggaatgacacagaaattacagagcaaagtcgttttttttttatagagaaggaaggtgctgattaatgttctaaacatatactcagaagtctaaaattgtccctgctgcaacactatttacaacggcccgagatgattatcccaatgattgcccccatcagttttgttatgagaaagacagcctaaagtcttggaatagataaatgcctggcctgaggtcctacagtactcagtatcgaaaccagtgatctactgcttatggctgggtgaacattttacggagcatttacaataagtagccactcttctaggatctgggctggccactttttacaatttgcaccaccactaccagcaccatgaacagcggccaacagtccaaacatggttctgcatcccatggggaggagtctttaaaaaatactcatgcccagtccccatcctcggagcctcagatttgattgtgtctggggtgcagcatggacatctggactttgaaaagttgtccaggtgattctaatgggcaagaaagtttgagaaccactaaagctagatgtttacctatattatctcatttcatcttcatagcaaaactatgaggctgctgttagttttacagataaggaaactcatcctcagagaggttcagttacttacccaggatcacaaagccagtaggtggcagagctaaaacttgaacccagacttatgtaactacatcacaacacttctaagccccatccactcttgccctaaggtggaagccgcctaatgtcttttgttcaaatgtctgcctcctcccaccgcatggtgggctctgggtgggcaaggagctggtttttgcccccttgtccccagcattcagcccagggcctggcacagagtgaggtctcagtggatgagggctggctggtgagcagctacaaggccaggtggagaatttagggagcaggcctccagggagggcatgatccctgccagctggggcccatcccagagccagggtgtgtctgcatcctgaccatgactatcattcaaagacatgcaatttagagcaagggctgcagctgctgtcatctttggcatagagaccaaagggaccagactggggtaataaggaaggaaagtatagccagtc

SEQ ID NO: 4892 - DNA, 1518 bp, Homo sapiens
gctgcagtccgtatgctgagaacctggagcaggaatgcggggaagctgatttgtgttcgctattttcaaacatgtggtaatgttcatgttttgaagccaaattatgtgtgtttctttggttatccttcattcaagtatagtcatccacatcacttcctgaaaacaactgctgctctccgtggacaggttgttcagttcaagctctcagacattggagaagggattagagaagtaactgttaaagaatggtatgtaaaagaaggagatacagtgtctcagtttgatagcatctgtgaagttcaaagtgataaagcttctgttaccatcactagtcgttatgatggagtcattaaaaaactctattataatctagacgatattgcctatgtggggaagccattagtagacatagaaacggaagctttaaaagattcagaagaagatgttgttgaaactcctgcagtgtctcatgatgaacatacacaccaagagataaagggccgaaaaacactggcaactcctgcagttcgccgtctggcaatggaaaacaatattaagctgagtgaagttgttggctcaggaaaagatggcagaatacttaaagaagatatcctcaactatttggaaaagcagacaggagctatattgcctccttcacccaaagttgaaattatgccacctccaccaaagccaaaagacatgactgttcctatactagtatcaaaacctccggtattcacaggcaaagacaaaacagaacccataaaaggctttcaaaaagcaatggtcaagactatgtctgcagccctgaagatacctcattttggttattgtgatgagattgaccttactgaactggttaagctccgagaagaattaaaacccattgcatttgctcgtggaattaaactctcctttatgcctttcttcttaaagtattacttctcatggaaatcttaagatcaacatgtcagtgaggaaatcacctagaatttagacattttctttggaactttggctggtctgtatcattattttgaaaatctccttgatgtttacaagctacctgactactttatcttttattctttaatgattagggtgacctagttccacatggcctgaaggtaacattggcagtaatgtgactaggtacatgtagacttgaaattaaactcagcataaataagagttctctctctccctccttttatacctcttattgtttcaaattctctatcctttctaagttaaaagtactaaaattgcattctttttctgttaaacaggctgcttccttgggattactacagtttcctatccttaacgcttctgtggatgaaaactgccagaatataacatataaggttggctatgcagagtaaaaatgttcttattattaatagaagatggggcaaatgtgcttgtagattagagacttctattgtacctcaaatagtgatcttttttagactagaattaaaggtatggggtaaaacattaaacttaagtctaatt

SEQ ID NO: 4893 - DNA, 2744 bp, Homo sapiens
gagagagaatgttaaaggatgaagtttccaaatgtgtatgtcgctgtgaagatctggagaaacaaaacagattacttcatgatcagatcgaaaaattaagtgacaaggtcgttgcctctgtgaaggaaggtgtacaaggtccactgaatgtatctctcagtgaagaaggaaaatctcaagaacaaattttggaaattctcagatttatacgacgagaaaaagaaattgctgaaactaggtttgaggtggctcaggttgagagtctgcgttatcgacaaagggttgaacttttagaaagagagctgcaggaactgcaagatagtctaaatgctgaaagggagaaagtccaggtaggtatactaagctttaagaaagcacttgttaaatcaaaagagaagcactcatttatatctctaccatttaacgtaatgtaaaatttaacttgaagtaagcattcttctaaacttgtaaattcattaagcatttgttaaacactaatatagtatagtgcttaaaagtaaaggctctgtaaccaaactgcctggtttcagattctagcttcataccattagctgtggccttgggtacattgtttaacttccctgctcttagtttcttcatctgtaatatttggataataatgaggtttaattgagtttgtgcacatgaagcatttagaagcatgtctggtatgtagtgggtgcttaataaattccagctatcttaatttattatagttatggattatacgtgtggatagtcattctaggataaagtgatttaaactgctacagaatatctttctcacccaaggagcaaaaagtagtaaaaactaacaaccaaaggaaaagaagctgtggtagtgaaatggatgataataagacaagcttgactccttaccccacactaccacccaaagcttattgttgagttacttcattcttaggagctacagtaatatacccccacctctagaaggaaggaaattaagatcttaaaacatttatcttcttttaactgatgagtagtcaaaatgactgttaagaagaaaccattggacagggaaaagtaaataatgaattttatgggatttatgtgttcagcaaaagctaaaggttccagaattatatcctgtttaattcaaatgtatctcaccatggaaataatagagcctccagttcaatagagttaatacttggaggaaaagggacagaatcagagtctctaacaaagactgcatattgtttcagtcttttccgcttcattttttattcctttgggctatagaaagtaaatactagaaaatgcccgcctacgaatgagttcatagggggaaaccaaccttaaatacaggaagaagagagtcaacaagtaacatagattatataaaaaataatataatgggccgggcatggtggctcatgcctgtaatcccagcactttgggaggccgaggcgggtggatcacgaggttaggagattgagaccatcctggctaacacggtgaaaccccgtctctactaaaaatacaaaaaaattagctgggcatggtggtggcaggcacctgtagtcccagctactcgggaggctgaggcaggagaacggcgtaaatccgggaggcggagcttgcagtgagccgagatcacaccactggactccagtctgggcgacagagcgagactccgtctcaaaaaaaaaaaaaaattataatagtaatgtaatgtctgtctaagcatgaacagtgtagcatggcaaccatgaaatatgctatagctttaaaaacagtgggggaagaaagtaataccaagtgcagaagatggataattataacctatgagaaggaaaaaattcttcacagataattcagtaaaatttctcatggccaaagtgatgaaacaatggatcaaaatgagagatttctgaacaagagggaataaactgaggattagaataacattttagaactaataaatttagtgcagcaaggaaaaaaagatacagaaaggtaaatagagatttggattaatgtttttacctaatgttaatactttgttggtgggatttgtagcatcttttcacttttgtctttgtaattcttgtatttgtttaaagtctgcagttcgcatgcctcacagaaaagtaaacgtgaactttcaaaaattttagttctaaaagttgaaacttaaatcctctttattttgtcatagggaggatttgagctcataggaacaggtagactttcaactattgttagatgttggtatgtatatttatttgaaatgtttaggtaactgcaaaaacaatggctcagcatgaagaactgatgaagaaaactgaaacaatgaatgtagttatggagaccaataaaatgctaagagaagagaaggagagactagaacaggatctacagcaaatgcaagcaaaggtgaggaaactggagttagatattttacccttacaagaagcaaatgctgagctgagtgagaaaagcggtatgttgcaggcagagaagaagctcttagaagaggatgtcaaacgttggaaagcacgtaaccagcatctagtaagtcaacagaaagatccagatacagaagaatatcggaagctcctttctgaaaaggaagttcatactaagcgtattcaacaattgacagaagaaattggtagacttaaagctgaaattgcaagatcaaatgcatctttgactaacaaccagaacttaattcagagtctgaaggaagatct

SEQ ID NO: 4894 - DNA, 2771 bp, Homo sapiens
aggcaggccgggccctcaagatggcggcgggcgcccagagcggctcggcccggcagtagtggtgggacggcactagctgctggggcctgccgccccgggagtggctgcagcagcgccaggaatcgaggatggtaaaatgacccaggggaagaagaagaaacgggccgcgaaccgcagtatcatgctggccaagaagatcatcattaaggacggaggcacgcctcaaggaataggttctcctagtgtctatcatgcagttatcgtcatctttttggagttttttgcttggggactattgacagcacccaccttggtggtattacatgaaacctttcctaaacatacatttctgatgaacggcttaattcaaggagtaaagggtttgttgtcattccttagtgccccgcttattggtgctctttctgatgtttggggccgaaaatccttcttgctgctaacggtgtttttcacatgtgccccaattcctttaatgaagatcagcccatggtggtactttgctgttatctctgtttctggggtttttgcagtgactttttctgtggtatttgcatacgtagcagatataacccaagagcatgaaagaagtatggcttatggactggtttcagcaacatttgctgcaagtttagtcaccagtcctgcaattggagcttatcttggacgagtatatggggacagcttggtggtggtcttagctacagcaatagctttgctagatatttgttttatccttgttgctgtgccagagtcgttgcctgagaaaatgcggccagcatcctggggagcacccatttcctgggaacaagctgacccttttgcgtccttaaaaaaagtcggccaagattccatagtgctgctgatctgcattacagtgtttctctcctacctaccggaggcaggccaatattccagcttttttttatacctcagacagataatgaaattttcaccagaaagtgttgcagcgtttatagcagtccttggcattctttccattattgcacagaccatagtcttgagtttacttatgaggtcaattggaaataagaacaccattttactgggtctaggatttcaaatattacagttggcatggtatggctttggttcagaaccttggatgatgtgggctgctggggcagtagcagccatgtctagcatcacctttcctgctgtcagtgcacttgtttcacgaactgctgatgctgatcaacagggtgtcgttcaaggaatgataacaggaattcgaggattatgcaatggtctgggaccggccctctatggattcattttctacatattccatgtggaacttaaagaactgccaataacaggaacagacttgggaacaaacacaagccctcagcaccactttgaacagaattccatcatccctggccctcccttcctatttggagcctgttcagtactgctggctctgcttgttgccttgtttattccggaacataccaatttaagcttaaggtccagcagttggagaaagcactgtggcagtcacagccatcctcataatacacaagcgccaggagaggccaaagaacctttactccaggacacaaatgtgtgacgactgaaatcaggaagatttttctatcagcacccaggtcttagttttcacctctagttctggatgtacattccatttccatccacagtgtactttaagattgtcttaagaaatgtatctgcatgaactccgtgggaactaaaggaagtgggaacttagaaccagacagttttccaaagatgttacaatttcttttgaaaaaccttttgtttattagcaccaatttcttgccactaagctatttgttttattatacatcctttaattaaaaactatatatgtaacttcttagatattagcaaatgtctctgctaccatttccttaaggtgttgagctttaactctatgctgactcagtgagacacagtaggtagtatggttgtggacctatttgttttaacattgtaaaattttgagtcagattttaatattgtaaaatcttgggtcaaataattcaaagccttaatgcagatgcactaaaacaaagaaatggtaaatgaattgtttgcatttaaaaaaaaaaactcttaagaaaactgtactaaatctgaatcatgttttgagcttgtttgcagtacttttaaacattattcactactgtttttgaagtgagaaagtatcagccatttagcatttaagttggggtatttagagcctgtaatctaaatgctggctcaaatttattccccagctacttcttataccactattcttttaatgtttgcataatcataagcacctcaacacttgaatacataatctaaaaattatatagtaaagctggtagccttgaaaatgtcagtgtgatatctattatgtagataaatatatatagtggcctttcaggactgtcacagtaacactttatttacagagctaatgtttgtcctaaattttcaggaccctagaggagagctttatacaattaccgatgtgaatttctctaaagtgtatatttttgtgtccagttatattatttaaaaaagtgttactttgtaaaaattgtatataaagaactgtatagtttacactgttttcatcttgtgtgtggttattgcttaatgctttttaaacttggaacactcactatggttaaataaggtcttaaaagaaatgtaaatattctgttaataaagttaaatattttaatgatttttttttt

SEQ ID NO: 4895 - DNA, 2196 bp, Homo sapiens
ataccagctgaagagcgacaagccgctggcagccgcggatctcaccgccgctcaggagatctgttggtaatctgaggatttttattctacgtcgtcttgacagatggaaaacctgaagtttttagaacttcagccataaaaatgggcagaattttccttgatcatatcggtggtacccgtctgttttcttgtgcaaactgtgatacgatcctgaccaaccgctcagaactcatctccactcgtttcacaggcgccactggcagagcatttctttttaacaaggtagttaacctgcagtacagtgaagttcaagatcgggtcatgctcactggccgccacatggttcgagatgtgagctgcaaaaactgcaatagcaaactgggatggatctatgagtttgccactgaagacagccagcgatataaggaaggccgcgtgatcctggaacgtgctctagttcgagagagtgagggctttgaggagcatgtaccatctgataactcttgaagatacagagagaaatccatcttttcccaggtctccttcactgaaaacaaaaatctacttacatacactgtcaccttagcatcagagtcggattaatgaactgcggaacaagaggttgtgagaatctaagatggaacctttctttctttctttctttttttttaaattttgtattttccatccaacagcagtgtgtagagagaatattatgcagatgccgttaattttttaccctatgtttacatcttgaggcagcagagtctgtctgcagctatgtggtgagctatgtaaggaaaaaaatctgggctgttagagtgaaaaagtgtgttttatgtcaattgtgaaaggaaaatgttaggagtatggtttttaaacttgggcttcattttaaacttttttttttaaacccagttatttcacttgatttgctagcttcagagaagagatccgaatctgtgcccagcgctaaaggctcagtgttagcatggcttgtgctggccggtgtgccatattcttgttggagatgaaccgtagcaccagagcccattcttccttgtcagtcttggcccaaagatgtcaccattcctagttatttgtcaccacataattggtgttgattggaaactttttctgagatgggacagaactgctgggttgtctttttccatgtaacttaagcatagtaatataaataaagtaatagttggatgcttttggtcctgtgttgcttttaaaaacaccttataaaagaggagagtatttgataagcaattttcatagtagtaaagttttttttcatctcttaaactaaattgaccatgcatataatattctttgtttaaatgaaagcatactgttgaaacccgcagtgttgcatttagaaaacagttgaacagaatgtcaatgtgcattcatgcaaaaaaacatttaatctgcatctgttttagaaaagggggaaatgaagcaacttgtctaaaaatactgctttacaaagcatttcagcctttccccctcagttttgcattgattttttgacaagtctgtagagcctaatagtttccatcaaaggcctagatctcttatttagcatttttttcagctcttctctcagaagttcagctgttgaaacgaaaactgtactttgtaccctcacatacaaagggatcaaatttgacctggtgttattttagccccaaatttatgacattacacaatattaaaatgtaaatgtttctttacccaaactacttctagatattctagtatttgcttctggtggaattaaatgacggtaaaattggctaattatttgaatgaatgaatggatggatgttttgcatgctcaatttctaggtcctttgtctagaaaggaaatttgcctcagttgaattagtgaaatatttctgtcgttgatattaaaagtgacttctgagtacagttaagttcctcctatttgccactgggctgttggttagaagcataggtaactgattaagtaggtatgatactgcatttgaaataagtggacacaaactatcctttctccaccatggactcaatctgagaacaacagcattcatttccattcatttccatactggcttttgattatatgcagattcctagtagcatgccttacctacagcactatgtgcatttgctgtcacaataaagtatattttgtcttgc

SEQ ID NO: 4896 - DNA, 2478 bp, Homo sapiens
gaggccgcagcagtcgccgcgcgaacatggcggccgaaatccactccaggccgcagagcagccgcccggtgctgctgagcaagatcgaggggcaccaggacgccgtcacggccgcgctgctcatccccaaggaggacggcgtgatcacggccagcgaggataatggagctgtaatggaatttcacgtttctgaagattttaataaaatgaactttatcaagacctacccagctcatcagaaccgggtgtctgcgattatcttcagcttggccacagagtgggtgatcagtaccggccacgacaagtgtgtgagctggatgtgcacgcggagcgggaacatgctcgggaggcacttcttcacgtcctgggcttcgtgtctgcaatatgactttgacactcagtatgctttcgttggtgattattctgggcagatcaccctgctgaagcttgaacagaacacgtgttcagtcatcacaaccctcaaaggacatgaaggtagtgtcgcctgcctctggtgggaccctattcagcggttactcttctcaggagcatctgacaacagcatcatcatgtgggacatcggaggaaggaaaggccggacgctgttacttcagggccatcatgacaaggtgcagtcgctgtgctaccttcagctcaccaggcagctcgtctcctgttcctcggacggcggaattgcagtgtggaacatggatgttagcagagaagaggctcctcagtggttggaaagtgattcttgtcagaaatgtgagcagccatttttctggaacataaagcagatgtgggacaccaagacgctggggctaagacaacatcactgcaggaaatgcgggcaggctgtctgcgggaagtgcagcagcaagcgctcaagttacccagtcatgggcttcgagttccaagtccgggtttgtgattcttgttacgactccatcaaagatgaagatcggacttctctagcgacctttcatgaaggaaaacataacatttcccacatgtccatggacattgccaggggactgatggtgacctgtgggaccgaccgcattgtaaagatctgggacatgacacctgtggtgggctgcagtctggcgactgggttttctccgcactgatctgagagctgggcggcgtccacacctaagaacagcagctccaccaaatgaagtccctctcacgcagctccacagcgctgtctcgtgaatggacagtagccacttacaaacaaatcaacatttttaaaaagaaaatgtaaaggtgtgttttggggcatttgtggaacttacccatggggactaatatggaaaaggtctgtccatagtggttccctgaagactggaattacttcagcaaaacttccccatgaacagctaatgtgtagtgaaagaatgagctagcaaatgagttttagcggggacaaaaaatcaaacaaaaaagtgaatgcttagaaccttctcaaagcagtcacaagtacagacacttcacttagcctagggggccttccagggttcttgtggctgttgtcagagcaggagctgggggagggaagacttgttctctctttcttgaggggtggcattaggaacttacgaaaccagagacctttccctatgacttggcagtatgtgaatatcctctacacttagttattgataaacttcttaaagagatctgttattttcaggtagtgccataatctgcacttagcattggcttgcttcagttgtttctcttcccagccagtatgccacaggtgaactttcggggttgtcattaagtaagttgtgaaatttctgtaataacaaaggcagtccgcattcttccctttcccccaaattcctagggcaaaacttttttatggtgctgttaacatgggagtcacacaagccgcctgactttttctcattgccattagtaatgactgatggaaaacccagccaccactgtgatgcgaaatgatcagtctgttgcctgaaacagcccagtcctcttaactgaaacagcattctacttcttgttccaagatgagcctctgcaatattctggcaatttaatataccccctacaaaagcactccacagcttttacactattttgactttgagttataactagtattattcatgttttcataaaaagaagttagtgacccagagctataatcatccatcaagtcttccacaataattcccaactcataaattgctttcctaacaactagcaaaagctattgttcataatggcatttctaaagcttttgggcactgtgtaccaggatgaggaagagaagaaatgaggagcctgtcttttaatattccagtatttgtgtgtttgattttttttgacaacagtacatatatctatttctctagggatatggaagtaagtggagaagggcctacctttttaaaggacaaatataaaaatagcaacagtatctttgctaatcttactaatagatat

SEQ ID NO: 4897 - DNA, 4584 bp, Homo sapiens
gaggaggccgcagcagtcgccgcgcgaacatggcggccgaaatccactccaggccgcagagcagccgcccggtgctgctgagcaagatcgaggggcaccaggacgccgtcacggccgcgctgctcatccccaaggaggacggcgtgatcacggccagcgaggacagaaccatccgggtatggctgaaaagagacagtggtcaatactggcccagcatttaccacacaatggcctctccttgctctgctatggcttaccatcatgacagcagacggatatttgtgggccaggataatggagctgtaatggaatttcacgtttctgaagattttaataaaatgaactttatcaagacctacccagctcatcagaaccgggtgtctgcgattatcttcagcttggccacagagtgggtgatcagtaccggccacgacaagtgtgtgagctggatgtgcacgcggagcgggaacatgctcgggaggcacttcttcacgtcctgggcttcgtgtctgcaatatgactttgacactcagtatgctttcgttggtgattattctgggcagatcaccctgctgaagcttgaacagaacacgtgttcagtcatcacaaccctcaaaggacatgaaggtagtgtcgcctgcctctggtgggaccctattcagcggttactcttctcaggagcatctgacaacagcatcatcatgtgggacatcggaggaaggaaaggccggacgctgttacttcagggccatcatgacaaggtgcagtcgctgtgctaccttcagctcaccaggcagctcgtctcctgttcctcggacggcggaattgcagtgtggaacatggatgttagcagagaagaggctcctcagtggttggaaagtgattcttgtcagaaatgtgagcagccatttttctggaacataaagcagatgtgggacaccaagacgctggggctaagacaacatcactgcaggaaatgcgggcaggctgtctgcgggaagtgcagcagcaagcgctcaagttacccagtcatgggcttcgagttccaagtccgggtttgtgattcttgttacgactccatcaaagatgaagatcggacttctctagcgacctttcatgaaggaaaacataacatttcccacatgtccatggacattgccaggggactgatggtgacctgtgggaccgaccgcattgtaaagatctgggacatgacacctgtggtgggctgcagtctggcgactgggttttctccgcactgatctgagagctgggcggcgtccacacctaagaacagcagctccaccaaatgaagtccctctcacgcagctccacagcgctgtctcgtgaatggacagtagccacttacaaacaaatcaacatttttaaaaagaaaatgtaaaggtgtgttttggggcatttgtggaacttacccatggggactaatatggaaaaggtctgtccatagtggttccctgaagactggaattacttcagcaaaacttccccatgaacagctaatgtgtagtgaaagaatgagctagcaaatgagttttagcggggacaaaaaatcaaacaaaaaagtgaatgcttagaaccttctcaaagcagtcacaagtacagacacttcacttagcctagggggccttccagggttcttgtggctgttgtcagagcaggagctgggggagggaagacttgttctctctttcttgaggggtggcattaggaacttacgaaaccagagacctttccctatgacttggcagtatgtgaatatcctctacacttagttattgataaacttcttaaagagatctgttattttcaggtagtgccataatctgcacttagcattggcttgcttcagttgtttctcttcccagccagtatgccacaggtgaactttcggggttgtcattaagtaagttgtgaaatttctgtaataacaaaggcagtccgcattcttccctttcccccaaattcctagggcaaaacttttttatggtgctgttaacatgggagtcacacaagccgcctgactttttctcattgccattagtaatgactgatggaaaacccagccaccactgtgatgcgaaatgatcagtctgttgcctgaaacagcccagtcctcttaactgaaacagcattctacttcttgttccaagatgagcctctgcaatattctggcaatttaatataccccctacaaaagcactccacagcttttacactattttgactttgagttataactagtattattcatgttttcataaaaagaagttagtgacccagagctataatcatccatcaagtcttccacaataattcccaactcataaattgctttcctaacaactagcaaaagctattgttcataatggcatttctaaagcttttgggcactgtgtaccaggatgaggaagagaagaaatgaggagcctgtcttttaatattccagtatttgtgtgtttgattttttttgacaacagtacatatatctatttctctagggatatggaagtaagtggagaagggcctacctttttaaaggacaaatataaaaatagcaacagtatctttgctaatcttactaatagatattgattaaaaaaaaaaaacctcagtactgcatcactgtgttgggatcataccaggacaatagggtcattccatatgataaaactaaaggactaaatttgttttataatgatgtcttagagggactgaaaggtttaaggaggcgatcaaactaaaatgtcttaatggctgtgtgacacacgtaaggaaaggaaagggggtcacgcacatcatgtactggaatgatctgcattaaacatagacttgtcttcagaaataagactgaagggttttgttgttccttagagttttcgtgttacatcacctaaagagatttcttttaaaaactttctagactctttgcaaaatgtatattactaacatagtttggaagaaaaattgagtagtggtaagttttgttcaagcacaatgttgaatgttaagcttcctgtattaattttagttcagttaatggttcagcccatacaaaggtgctatcctagggattttatgaattcctgaaaggaaaatagaatatgatcaattccttgccctgtggaagagtgcagaactgtggttttgttttcctttgacttctgtaaaatgtgaccgtttgacatctgtggtagattgaacggaatatcacagctgctgagtttactccatagctttcaaaccttttttattttaagaaattcttgaaaaaccctatgttccatgggaacataaagttattatagtgcctcctaaggggttaatataaatcaaggaggaagtttatatttaaggaagaattggagtgacgtatcttagaaaaggaaaggctgatgtttccatatagcttgctctccaccaggcctatcatttttctttttagagacaaacgtgacaggctagtcttgtctctctcatatgctaggtagcaaatggggtgatatttttatagaagtgggcaaaaattattttctcaattttactgagtaggcacagaagaaaagtacagataggctgatggttattgccttattttgactgcatttctcttaaatggatcatttaaattagttcttcaagtaacagtttactggttgttccattcctgaatatgcaggctaatttgtacagatagggattaaggaatacagactattagagaagatccttatatttacatctagtatatatgtggtaaggaaatgccgattcttcattataaacaagttttaaaattgttctttcttagttcaaatgatagcaatacccctatagcattaggtagaaacaaattattcattacatcgtaaatctctttactatgtcctagctctgtcctgctacctaaaggatataaagaaatactattgctctagaatgtattactttgttctcccatgaaagaattcagtttgttagtacctatatttttaaactggtgaaactgacccaaatatgtaataaataccatagtagctcagacccaaggagatatttttctaaaatcagttttcgttaaagtacttctacttccgttattggatatggtatctcctaaagtgtaaaaaaaatctgttactatatagtgataaaccatctgctcatcgtaagtgtaaggcttaacaaataagtaatacatgctatatttattcaagtgtctattgcttaattgttaattgtgagcagatttattgaatgcctattctattttctgcagtttacaatacaataactctttgagtaagttgaagtttaattgtgcaacaaatttgtattagagtacaatttaaagtgtttttctctatagccttttttgactggggaagcaaggggtaatgttaattagtacactttgttcttgtactagctatgtttctataagatatggtgccctgtgtatcccagagatgctagaaaactgttctttgctcctatttgtgggttctgtttttgtgggtttttttttttgagaaaatgtacacaataaaacattccttgcttgtt

SEQ ID NO: 4898 - DNA, 1690 bp, Homo sapiens
gacgccggagccctctgaccgcacctctgaccacaacaaacccctactccacccgtcttgtttgtcccacccttggtgacgcagagccccagcccagaccccgcccaaagcactcatttaactggtattgcggagccacgaggcttctgcttactgcaactcgctccggccgctgggcgtagctgcgactcggcggagtcccggcggcgcgtccttgttctaacccggcgcgccatgaccgtcgcgcggccgagcgtgcccgcggcgctgcccctcctcggggagctgccccggctgctgctgctggtgctgttgtgcctgccggccgtgtggggtgactgtggccttcccccagatgtacctaatgcccagccagctttggaaggccgtacaagttttcccgaggatactgtaataacgtacaaatgtgaagaaagctttgtgaaaattcctggcgagaaggactcagtgatctgccttaagggcagtcaatggtcagatattgaagagttctgcaatcgtagctgcgaggtgccaacaaggctaaattctgcatccctcaaacagccttatatcactcagaattattttccagtcggtactgttgtggaatatgagtgccgtccaggttacagaagagaaccttctctatcaccaaaactaacttgccttcagaatttaaaatggtccacagcagtcgaattttgtaaaaagaaatcatgccctaatccgggagaaatacgaaatggtcagattgatgtaccaggtggcatattatttggtgcaaccatctccttctcatgtaacacagggtacaaattatttggctcgacttctagtttttgtcttatttcaggcagctctgtccagtggagtgacccgttgccagagtgcagagaaatttattgtccagcaccaccacaaattgacaatggaataattcaaggggaacgtgaccattatggatatagacagtctgtaacgtatgcatgtaataaaggattcaccatgattggagagcactctatttattgtactgtgaataatgatgaaggagagtggagtggcccaccacctgaatgcagaggaaaatctctaacttccaaggtcccaccaacagttcagaaacctaccacagtaaatgttccaactacagaagtctcaccaacttctcagaaaaccaccacaaaaaccaccacaccaaatgctcaagcaacacggagtacacctgtttccaggacaaccaagcattttcatgaaacaaccccaaataaaggaagtggaaccacttcaggtactacccgtcttctatctggttctcgtcctgtcacccaggctggtatgcggtggtgtgatcgtagctcactgcagtctcgaactcctgggttcaagcgatccttccacttcagcctcccaagtagctggtactacaggtgtgtgccacgacacccggctaagtttttgaaatttattttttgtagagacaggattttcctatgttgcccaggctggtttcaaactcctggccgtaagcgatttttccggcctcccaaaacgttgcgattataagtgtgagccactgcacctggccccacattttctttatccatttgtacattgatggacacttaagatgattccatatctttgctattgtgaatagtgcttcaataaatatgtgaatgcacat

SEQ ID NO: 4899 - DNA, 2217 bp, Homo sapiens
ccgctgggcgtagctgcgactcggcggagtcccggcggcgcgtccttgttctaacccggcgcgccatgaccgtcgcgcggccgagcgtgcccgcggcgctgcccctcctcggggagctgccccggctgctgctgctggtgctgttgtgcctgccggccgtgtggggtgactgtggccttcccccagatgtacctaatgcccagccagctttggaaggccgtacaagttttcccgaggatactgtaataacgtacaaatgtgaagaaagctttgtgaaaattcctggcgagaaggactcagtgatctgccttaagggcagtcaatggtcagatattgaagagttctgcaatcgtagctgcgaggtgccaacaaggctaaattctgcatccctcaaacagccttatatcactcagaattattttccagtcggtactgttgtggaatatgagtgccgtccaggttacagaagagaaccttctctatcaccaaaactaacttgccttcagaatttaaaatggtccacagcagtcgaattttgtaaaaagaaatcatgccctaatccgggagaaatacgaaatggtcagattgatgtaccaggtggcatattatttggtgcaaccatctccttctcatgtaacacagggtacaaattatttggctcgacttctagtttttgtcttatttcaggcagctctgtccagtggagtgacccgttgccagagtgcagagaaatttattgtccagcaccaccacaaattgacaatggaataattcaaggggaacgtgaccattatggatatagacagtctgtaacgtatgcatgtaataaaggattcaccatgattggagagcactctatttattgtactgtgaataatgatgaaggagagtggagtggcccaccacctgaatgcagaggaaaatctctaacttccaaggtcccaccaacagttcagaaacctaccacagtaaatgttccaactacagaagtctcaccaacttctcagaaaaccaccacaaaaaccaccacaccaaatgctcaagcaacacggagtacacctgtttccaggacaaccaagcattttcatgaaacaaccccaaataaaggaagtggaaccacttcaggtactacccgtcttctatctggttctcgtcctgtcacccaggctggtatgcggtggtgtgatcgtagctcactgcagtctcgaactcctgggttcaagcgatccttccacttcagcctcccaagtagctggtactacagggcacacgtgtttcacgttgacaggtttgcttgggacgctagtaaccatgggcttgctgacttagccaaagaagagttaagaagaaaatacacacaagtatacagactgttcctagtttcttagacttatctgcatattggataaaataaatgcaattgtgctcttcatttaggatgctttcattgtctttaagatgtgttaggaatgtcaacagagcaaggagaaaaaaggcagtcctggaatcacattcttagcacacctacacctcttgaaaatagaacaacttgcagaattgagagtgattcctttcctaaaagtgtaagaaagcatagagatttgttcgtatttagaatgggatcacgaggaaaagagaaggaaagtgatttttttccacaagatctgtaatgttatttccacttataaaggaaataaaaaatgaaaaacattatttggatatcaaaagcaaataaaaacccaattcagtctcttctaagcaaaattgctaaagagagatgaaccacattataaagtaatctttggctgtaaggcattttcatctttccttcgggttggcaaaatattttaaaggtaaaacatgctggtgaaccaggggtgttgatggtgataagggaggaatatagaatgaaagactgaatcttcctttgttgcacaaatagagtttggaaaaagcctgtgaaaggtgtcttctttgacttaatgtctttaaaagtatccagagatactacaatattaacataagaaaagattatatattatttctgaatcgagatgtccatagtcaaatttgtaaatcttattcttttgtaatatttatttatatttatttatgacagtgagacattctgattttacatgtaaaacagaaagttgaagaagattgtgaagaaaatgtatttttcctaaatagaaataaatgatcccattttttggt

SEQ ID NO: 4900 - DNA, 4290 bp, Homo sapiens
cccctcattcaaaggcacctcccaccccgcacctcagccttggcggagaggactcacagcattggacacatttccaccatgctaatggcattttaaatatatttggcaattttcccaattttttactgaagaaaactgtaagtttatacttgaggactgaagtgtgactctgccgattatcaggctttcaagatgaatctggaaaaactcagcaagcctgaactcctgacactatttagtattcttgaaggagagcttgaagcaagggaccttgttatagaagccttaaaggcccaacacagagatactttcattgaagaacgctatggaaaatataacatcagtgatcctttaatggctctacagagagattttgaaacactgaaggagaaaaatgatggcgaaaagcagccagtctgcacaaatccactctctattcttaaggttgtgatgaagcagtgcaagaacatgcaggagcgcatgctgtcccagctggctgctgctgagagcaggcaccgaaaggtgatcctagaccttgaggaagaaaggcagcggcatgcacaggatacggctgaaggagatgatgtcacctacatgctagagaaggaaagagagaggctgactcaacagttggaatttgaaaaatcccaagtgaaaaagtttgaaaaagaacagaagaagctctctagtcagctggaagaggagcgctcccgccacaagcagctctcatccatgctagtgcttgagtgcaagaaagccaccaacaaggcagccgaggaaggacagaaggcaggagagctgagcctgaaattggagaaggagaagagccgggtgagtaaactggaagaagagttggcagctgagagaaagagaggcttgcagactgaggcccaggtagagaagcagttatcagagtttgacatcgaaagggaacaactgagagcaaaactgaaccgagaagagaaccggaccaaaaccctgaaagaagaaatggaaagtttaaagaagatagtgaaggacctagaggcttcccaccagcacagtagccctaatgagcaattgaagaaaccagtaaccgtgtccaaaggcacagcaactgagcctctcatgctaatgtctgtgttttgccaaacagagagttttccagcagaaagaacccatgggagcaacatagccaagatgacaaacactgggctgcctggtcctgccactcctgcttactcatatgcaaaaaccaatggccattgtgacccagagatacaaactaccagggagctgactgcaggcaacaatgtagaaaaccaggtgcctccacgggaaaaatctgtggcattggcccaagagaaaccagtggagaatggtgggtgtcctgtggggattgagactccagtcccaatgcccagtcccctctcttccagtgggagctcactgtctcccagcagcactgcctcctcctctctaacatcctctccttgctcttcgccggtactcactaagcgtttattggggtcatcagctagcagccctggctaccagtcatcgtaccaagtagggatcaaccaacggttccatgcagctcgccacaaatttcagtcccaagcagatcaggaccaacaagccagtggcctacagagccctccatccagggatttatcccccaccctcatagacaactctgccgccaagcagctggcccgaaacacagtcactcaggtgctctccagattcactagccaacaagggccaatcaagccagtctctcccaacagctctccctttggcacagactatcgaaatctagccaacactgccaatccaagaggtgacacaagccattcacctactccagggaaagtgtccagtcccctgagccccctgtctccaggaatcaagtccccaaccatccccagagctgagagaggaaaccctccacccatcccacccaagaaacctggcctcaccccttctccatctgctaccactccattgaccaaaactcattcccaggcagcctctttgaccactgcagaagaccttgccagcagctgctcttccaatactgttgtagcaaatggtaaggatgttgagttacttttgcctaccagcagctagtccctaggagggagtctccacgtttgacattccatcagatttcgtccaaaagctcagtcagacttctgagtcagattatgttatttattttgatagtagctgaaaccatctgtataatacatttagtatatttcaccattttgtatttttttaagtagaaactgagtagtttggatttttatggctcacatctttttactgaagccagaaaggcacctcaaagatgtctcaagctcagcagtcaccgtcatgttgtgatgaagaaagcgaatcaccaggtggtgatttgctatctatttgagaactagaatcactcaacactcattttgaattatgcagaagtggttcatgcagatttttattccagatgaacatgttttaaaagtgcctgaaatatgactgccatatgaatgtgattctgcagcaaaaaacacaaaatagatcatttaattacagaaaatgagatcctctgtgaattctgaatgttaaaaaccaacactgcttttaatcctcttttaatgttttaatacaagctttgtgttctgaaacaaggctgcataagtagaatgggaatccttctaaaggtgggtgtgaactcaccacaagctgagctttatagagcccttgagaaaccctcctgagcactaagcagttggggtgctgattttcttgtacttttgaaaaattaagtcactcccagtttcctgcataagttcttgaacagaatgaaatcacatctccattcaaaaaatgtctcaagcatctactgttgtgtaaggaacttctgattctgattgctgttacttgaataggaaatggttactcattctgtataaaagttttgcaagagaatgaattttttattctgtaatcaaaaagcaataacttgaaattcactctgtaatattataggtcagtcagaattatacaagttttaccaaattgttacacttattctccaagctgccagaacctggtatctgtatctgtaaaaccaaattaacttttgcttaaatgggaagtatacatatatctgtatagatacattacccctttacatgtttaacatacacacacttaaacacataaatactagtgtgattatatctttggagtttgcaatatagcataaaggacaagtagaactgcacattaagattacctaccgaagcaactagatgtggctgggacacaatcaaaggaggaattttgtccacaggaaggtgaggaaattccaaatgaagcctagatcttcagtatcataaaaaggcagagctggccaggcacagtggctcatgcctgtaatcttatcactttgggaggctgagatgggaggatctcttgagaccaggtgttcaagaccagcctcatcaacatagtgagaccccatctctattaaaaaaataaataggcagagctaaactaaccccagtgtcacaaaactcaactggtcatataaatgagtgaaacaggcctctcacacaagcgatgtaaaacagctgggagcagtgggagctgtggcaaactaaagtgcccaagccgcatttaaaaagggcatctgttcagctccatctgcttgctgcggtgcaagaatgctaaaccaggattaccagttcttcacattttttgaaatccaaattttcatgagaaacattctcatttttaaatatcaagaagtgattttaaaatgtttaaatggtgctggttaaacaaacacgtctgcagctggatttagcttgcaagctgccaagttgcaacctctttcattctagaaacttctgtcattttcatcatagcaagtctatgcggacaaaagcctccaaactttccaactgtgtaggccagtacagctggcaaggttcatagaatataatggctatccccctctgccaaataagactatccacaacccagctcagacacagtggttatatgattttgtgtccatacaggagaggccttggtgtcttcacatacattctctgagccaacatctatccagcagccctgacctcctgctataatttaagtctatttccttttaatctaataagagttgatagtaaaaaggcaggtgatggaaatcagtgtataaatcacaatggagtatattggcaactccacagcttatagtttgataaaggcaaatacatgaaaaataaaaatgctactaatgcc

SEQ ID NO: 4901 - DNA, 3011 bp, Homo sapiens
gagagccgagcgggcgggcggcgggtgcggagcgggcgagggagcgcgcgcggccgccacaaagctcgggcgccgcggggctgcatgcggcgtacctggcccggcgcggcgactgctctccgggctggcgggggccggccgcgagccccgggggccccgaggccgcagcttgcctgcgcgctctgagccttcgcaactcgcgagcaaagtttggtggaggcaacgccaagcctgagtcctttcttcctctcgttccccaaatccgagggcagcccgcgggcgtcatgcccgcgctcctccgcagcctggggtacgcgtgaagcccgggaggcttggcgccggcgaagacccaaggaccactcttctgcgtttggagttgctccccgcaaccccgggctcgtcgctttctccatcccgacccacgcggggcgcggggacaacacaggtcgcggaggagcgttgccattcaagtgactgcagcagcagcggcagcgcctcggttcctgagcccaccgcaggctgaaggcattgcgcgtagtccatgcccgtagaggaagtgtgcagatgggattaacgtccacatggagatatggaagaggaccggggattggtaccgtaaccatggtcagctggggtcgtttcatctgcctggtcgtggtcaccatggcaaccttgtccctggcccggccctccttcagtttagttgaggataccacattagagccagaagatgccatctcatccggagatgatgaggatgacaccgatggtgcggaagattttgtcagtgagaacagtaacaacaagagagcaccatactggaccaacacagaaaagatggaaaagcggctccatgctgtgcctgcggccaacactgtcaagtttcgctgcccagccggggggaacccaatgccaaccatgcggtggctgaaaaacgggaaggagtttaagcaggagcatcgcattggaggctacaaggtacgaaaccagcactggagcctcattatggaaagtgtggtcccatctgacaagggaaattatacctgtgtagtggagaatgaatacgggtccatcaatcacacgtaccacctggatgttgtggagcgatcgcctcaccggcccatcctccaagccggactgccggcaaatgcctccacagtggtcggaggagacgtagagtttgtctgcaaggtttacagtgatgcccagccccacatccagtggatcaagcacgtggaaaagaacggcagtaaatacgggcccgacgggctgccctacctcaaggttctcaagcactcggggataaatagttccaatgcagaagtgctggctctgttcaatgtgaccgaggcggatgctggggaatatatatgtaaggtctccaattatatagggcaggccaaccagtctgcctggctcactgtcctgccaaaacagcaagcgcctggaagagaaaaggagattacagcttccccagactacctggagatagccatttactgcataggggtcttcttaatcgcctgtatggtggtaacagtcatcctgtgccgaatgaagaacacgaccaagaagccagacttcagcagccagccggctgtgcacaagctgaccaaacgtatccccctgcggagacaggtaacagtttcggctgagtccagctcctccatgaactccaacaccccgctggtgaggataacaacacgcctctcttcaacggcagacacccccatgctggcaggggtctccgagtatgaacttccagaggacccaaaatgggagtttccaagagataagctgacactgggcaagcccctgggagaaggttgctttgggcaagtggtcatggcggaagcagtgggaattgacaaagacaagcccaaggaggcggtcaccgtggccgtgaagatgttgaaagatgatgccacagagaaagacctttctgatctggtgtcagagatggagatgatgaagatgattgggaaacacaagaatatcataaatcttcttggagcctgcacacaggatgggcctctctatgtcatagttgagtatgcctctaaaggcaacctccgagaatacctccgagcccggaggccacccgggatggagtactcctatgacattaaccgtgttcctgaggagcagatgaccttcaaggacttggtgtcatgcacctaccagctggccagaggcatggagtacttggcttcccaaaaatgtattcatcgagatttagcagccagaaatgttttggtaacagaaaacaatgtgatgaaaatagcagactttggactcgccagagatatcaacaatatagactattacaaaaagaccaccaatgggcggcttccagtcaagtggatggctccagaagccctgtttgatagagtatacactcatcagagtgatgtctggtccttcggggtgttaatgtgggagatcttcactttagggggctcgccctacccagggattcccgtggaggaactttttaagctgctgaaggaaggacacagaatggataagccagccaactgcaccaacgaactgtacatgatgatgagggactgttggcatgcagtgccctcccagagaccaacgttcaagcagttggtagaagacttggatcgaattctcactctcacaaccaatgagatctgaaagtttatggcttcattgagaaactgggaaaagttggtcaggcgcagtggctcatgcctgtaatcccagcactttgggaggccgaggcaggcggatcatgaggtcaggagttccagaccagcctggccaacatggtgaaaccctgtctctactaaagatacaaaaaattagccgggcgtgttggtgtgcgcctgtaatcccagctactccgggaggctgaggcaggagagtcacttgaaccggggaggcggaggttgcagtgagccgagatcatgccattgcattccagccttggcgacagaacgagactcccgtctcaaaaaaaaaaaaaaaaaaaaaaaaaaaaa

SEQ ID NO: 4902 - DNA, 2341 bp, Homo sapiens
gtgagccacggcgcccggcatccaggctagtcttgaactcctgacctcaagtgatccgtccgcctgggcctcccaaagtgctgggattacaggcgtgagccaccgcgcccggccaggttgtgggttttaatgggaccatctcactgcctaccgtttcctttttccgtccgaacagaaggggcctgagcagtgaactgacagtggcaacgccgggtgaggcgggatggaggagtttacgagcctgggtgacgccctgttccgcgtcctggccccgcccctcccggcagagccccttggcgcgtgacacaggccccgcccttgctgtacgccatcagccggcgccgcgccgccgggtgttactttgccccgccggcggggcggtcagcctcctgtcaccgcctgttccggctatggtcccgtccggtgttctgtaagttggcaacctaggctcctgacgcgaccctggtcctgatggcggcggcgacggccgcggcagccctggcggcggccgatccccctcccgcaatgccgcaggcggcaggggccggagggcccacaacccgcagagacttctactggctgcgctcctttctggccggaggtgggtccatgccacgaagagccagccgcgctctgagtggcgggggcaggactgtgggcaagtgggatgcaagcggcctctatgacattcctggactctggctgcttcaatgttctgttagatgtctgccctgacctgctgtaacctctttctagtaatcacttgactaatgacagctaggttatggggagtgggacctttggcactccggcagaggctggggaggtggaaggtctgaatcaggcacccattcttcagggctggataacagggaaaagaggaggatcccttacagagaccctggggttttagtgtagacttggattttgctgtttgcttaaaggaaaacaaatattggagatcagctttttaatgactactggaaaattgtgcaaactgtctacagccaaaactggttccagtgattctagtaaactgtgacacagtacttgacaagccctattattgatgtgactttgggatcaaaaagttcatattgtctcttaggaatttcctgggccttcaagctccacccttccttaattacttctctgggttgtgtaggggtgggttgcccctccacacctgtgggtgtttctcgtaaggtggaacgagagacttaggaaagaaaaagacacagagacaaagtatagagacagaaataaggggacccggggaaccagcgttcagcatatggaggatcccgccagcctctgagttcccttagtatttattgatcatttgtgggtgtttctcgaagagggggatgtgtcagggtcacaagacaattgtggggagagggtcagcagacaaacacgtgaacaaaggtctttgcgtcatagacaatgtaaaggattaagtgctgtgctcttagatatgcatacacataaacatctcaatgctttacaaagcagtattgctgcccgcaggtcccacctccagccctaaggcggtttttccctatctcagtagatggagcatacaatcgcgttttataccgagacattccattgcccagggacaggcaggagacagatgccttcctcttgtctcaactgcaagaggcatgccttcctcttatactaatcctcctcagcacagaccctttacgggtgtcgggctgggggacgttcaggtctttcccttcccacgaggccgtatttcagactatcacatggggagaaaccttggacaatacctggctttcctaggcagaggtccctgcggccttccgcagtttttgtgtccctgggtacttgagattagggagtggtgatgactcttaaggagcatgctgccttcaagcatctgtttaacaaagcacatcttgcaccgcccttaatccattcaactctgtgacacagcacatgtttcagagagcacggggttgggggtaaggttatagattaacagaatctcaaggcagaagaatttttcttagtacagaacaaaatggagtctcctatgtctacttctttctacacagacacagtaacaatctgatctctcttgcttttccccacaggttgtcattacttaattatttaagattcaaaaatttaaaaattccacattgaagttgtgtgcagtggctcactactgtagtcccagttactagggaagctgaggcaggaagactgcttgagtccaggagatcgaggctccagtaagccatgatcacaccactaccctccagcctgagctacagagagagaccctctcctaaaagaagaaaaaaac

SEQ ID NO: 4903 - DNA, 1958 bp, Homo sapiens
aaggtgggcctcgagcaaagccgctagaggtggggtgcgggtggtcggcctcaggcgagccccggggcacagcccggggcgggaggcggagcttggcggccgagatctccgcgctgcagttagccccgccgagcgccaggagctgcgggtaggaggggcgagagaaaggatgggggtacagaaccggaagaaacgaagggctcgtccgcttcggcttgtcctaatttggtgcccaatctgaagctgggctgtaccattgcatacctgggggaggctgtggcaaaggtgacaagaaggccgaaggcacaaagggaagctgcacccattcctggaggagcttaaatagtgactcgagtgcaagaatttaaaaataccgagacagccctaggtggaaaacttccggaaggcccaagcgttcgtaagggctctctaccccgctcggagcatagatggtaccgtccggaagtccgggcggagaccgtagctgcgcttctcgcgaaagggcaggcatcgcggggctggccacttccgtacttccgctttccggcccagccagcgcccgcgatgactgccactctccgcccctacctgagtgccgtgcgggccacattgcaggctgccctctgcctggagaacttctcctcccaggttgtggaacgacacaacaagccggaagtggaagtcaggagtagcaaagagctcctgttacaacctgtgaccatcagcaggaatgagaaggaaaaggttctgattgagggctccatcaactctgtccgggtcagcattgctgtgaaacaggctgatgagatcgagaagattttgtgccacaagttgaatagtgcagggtggcccagggctgcttccaggacttgcctgtcctccctgagtttggatgggagagacacaagggcctggacctcagttttctgttctctgccccagctcagtgcacctgtgcaacaactccatccagaagcacctggagaactcatgccatcggcatccactgcttccgccagacaacatgtggtctagccagaggttccaggcccacctgcaggagatgggtgccccaaatgcttggtccaccatcatcgtgcctggcatgaaggatgctgtgatccacgcacttcagacctcccaggacaccgtgcagtgtcggaaggccagctttgagctctatggcgctgacttcgtgttcggggaggacttccagccctggctgattgagatcaacgccagccccacgatggcaccctccacagcagtcactgcccggctctgtgctggcgtgcaagctgacaccctgcgcgtggtcattgaccggatgctggaccgcaactgtgacacaggagcctttgagctcatctataagcagggcccagctcctaacatgcaggtgtcaccagagagaaatgcaccactgtgcccagcaccatagctctggctcagagagtttgcctgagaaagcagcagacagaaaacagaaggtgcgagttgctcccgaaggaactgacttcatgtgcaacagagctcggagaagtccaaggctaagcacactctccagaacagtggaggttgtgctgaaaggcaactgggaggcgacggagagcctgggaggtgcgggctacactggaggccagcaagtctgccagagagaaacagaaaaaaagacaggtgggaagagctctcctggggtcagaacaaagcttaatatcttctttgacaaagaacgtaacatcaaaatagccaactatgggtttagttcaacatttgcaaagagagacaacactgaaaagggaacgtttgatgggactctcccttatgcaggcccagaactcttcttgggccatgggtaccaatgccctgccatcaacgtttggagccttggcatcatcgtatgcaaaatggtggctggggccctgccattttatgagcagaactgtaaggatatactg

SEQ ID NO: 4904 - DNA, 3250 bp, Homo sapiens
gtaagaatagacaaccatagaatcaaaagtgtaatttacttcattcttttactgctccgttcatgctgagtattttgttttgtatattccttctcatgacaacaatgccaaaagaaaaactatgcttggaatgaacttgttaccatggtaatctcaaaattaaagtttcaaagtgttcaaatgttgccctcaaaaaaaaatcacaaataaaaatctactcagttttgtaaggtggatggcataacccttgttgcagcatgtacataatgacattcacctatcttgaactttagagagagtccaaatgtttctggtgtactgaaattctgtttagttcagttgaaataaatgggttataactatgcaattgctacagtatttgctgaaatgaaataccatgtcaatatataaagagaagctcattttcatcaagcaaagtagacatcaaaaaaactattttatatagcattgcttagacaaccaaattaaacaagtaatttttgtagatttaattatgtatgtcataactagagtatgccaactttctgtctcaataatcacattttaaaaatatattgattaaggaaaaaaagaagtctcatttgccagtgaacctttggatatttattaagataatttatggctttaatccaatttttaaaaatctttcatctatcttaaagtggcttcaagattttaaactctttcctgtggcttttatctttaattttatcctgtagtgaattgtaaaagtaatgaacaagggcaattggatgactcctcttacatatacactcaggaaagctctcagtcatctatatatccaaatttgtgtaaaatatatttgttattatattcattattataatattattatatttattttataaagtcacatatattaagatagaagcatttctgtttaaaaattatcaggcagtgacagtaggaaaacttgtaggcaagctaattaacaactagatccttcctatcattcaaggttttcacggatgctctcagtatttaaattatacattaatattgttaggcactgaataatcatctattctgaagttggaatttttgtttgtatcgtagattccattaaactttagtttttaatttttttttattattatactttaagttttagggtacatgtgcacattgtgcaggttagttacatatgtatacatgtgccatgctggtgtgctgcacccactaacttgtcatctagcattaggtgtatctcccaatgctatccctcccccctcccccgaccccacaacagtccccagagtgtgatgttccccttcctgtgtccatgtgatctcattgttcaattcccacctatgagtgagaatatgcggtgtttggttttttgttcttgcgatagtttactgagaatgatggtttccaatttcatccatgtccctacaaaggacatgaactcatcgttttctatggctgcatagtattccatggtgtatatgtgccacattttcttaatccagtctattattgttggacatttgggttggttccaagtctttgctattgtgaataatgccgcaatggttcaggatagagcttaacttctgcttgtgaaattttagtttagaatttttgttttattagattttttcaacattttaataaaaatgtataggcaaatgaaatcatgtaaagaatatgttgctcttttctataatatagtatgggaagctgtcacttctaaccaactacttttgtggtaagaaaacaaagagtaacactgaaaacacaatatgtgtttcagtaaaaattttcctatttgctcaataattcaatatttattatcatatttcatggtaatacatttctggaagtttatttaaaaatttatatttaaacaattaatttgtagtctgctccaaggaagtttcaaaaacatatgtgtattatgttttactgtttcattatcatctgttcattttcatccaaaagatatttttcttgtgattgggagacaccggatatcataatcaacatacaagttttatgcttttgataatatttgaaaagtgttttaacattgtagtttatagcaaatgacttaataattgatcctcaagtaagtgaagtggaaggttactcaatactaatggtagtaggcaatatagaatggatgtttggtagatacaacttgtgctccacaaactctcaattgcaagaaatgtttcatcattcatttttcttaaaatcaaatttcatctgattctggacgcttatcctagtgagttccctggaaattccatctaccattattgtaccacccttccctttctcccacctttccctcctgcccatttcagcctctaaaatttccagggatctaatgaagacacttgaggacttccactggtactgacttcactttggctgccatggatgagtagcagtgcttctgctgctattttgccctcctcctgggcatggaaatttttctcagaacttgattcagacacattcgtgtaccatgcagctatttccctatttcctgccctctcctactgtcagtgtgagttcctcaggcctacatcgccctctgcctccttccttttgaaaagtcttgccagctgtctagtccaagctcataatttatctctttctcttacctctccccaaactcccagccccgtttctgccagggctagtattgcttctcaatactattgcttcaggcttttataaaagaaaaaacatttaatatcccaaaaatcatataatgcagttactagttttatctctcttttatgaatgaggaaattgagggcagggcagatggagtagcatgcccaaggctacaaagctagaaagtgtcagaacccagatgtgaacacagcctagcaccagggagatccagttaccttgttgaatgggggaaaacaaatattagaataacatgcggtggctcatacctgtaatcccagcattttgggaggccaaggcgggtgggtcacctgaggtcaggagtttgagaccagcctcgccaacatggtgaaagcttatctctagtaaaaatccaaaaattagccaggacatggtggctcgtgcctgtaatctgagctactcgggaggctgaggcatgggagtctaagacagaagaatagaagaattgcttaaacccgggaggcagaggctgcaatgagctgagatcgtgccactgcactccagcctgggcaacaggctttttctgtgagactgcgtt

SEQ ID NO: 4905 - DNA, 2463 bp, Homo sapiens
caaacattgaggaaagccaggcagtagaggccgctatggcgaacgttccgtgggcagaggtctgcgagaaattccaggcggcgctcgctctgtcgcgggtggaactgcataaaaatccggagaaggaaccatacaagtccaaatacagcgcccgggcgctactggaagaggtcaaggcgctgctcggccctgcgcctgaggacgaggatgagcggcctgaggccgaggacggcccgggtgccggtgaccacgccctggggctgccggctgaggtggtggagcccgaggggcccgtcgcccagcgagcggtgaggctggcagtcatcgagttccacctcggggtgaaccacatcgacacggaggagctgtcggcgggggaggagcacctggtgaaatgcctgcggctgctgcgcaggtaccggctctcgcacgactgcatctctctctgcatccaggcgcagaataacctgggtatcttgtggtctgaaagagaagaaattgaaactgcacaggcttacctagagtcatcagaagcactatataatcagtatatgaaagaggttgggagtcctcctcttgatcctactgagcgttttcttcctgaagaagagaaacttactgaacaagagagatcaaaaagatttgaaaaggtttatactcataacctatattacctagctcaagtctaccagcatctggaaatgtttgagaaggctgctcactattgccatagtacactaaaacgccagcttgagcacaatgcctaccatcctatagagtgggctatcaatgctgctaccttgtcacagttttacatcaataagctatgctttatggaggccaggcactgtttatcagctgctaatgtcatttttggtcaaactggaaagatctcagccacagaagacactcctgaagctgaaggagaagtgccagagctttatcatcaaagaaagggggaaatagcaaggtgctggatcaaatactgtttgactctcatgcagaatgcccaactctccatgcaggacaacataggagagcttgatcttgataaacagtctgaacttagagctttaaggaaaaaagaactagatgaggaggaaagcattcggaaaaaagctgtgcagtttggaaccggtgaactgtgtgatgccatctctgcagtagaagagaaagtgagctacttgagacctttagattttgaagaagccagagaacttttcttattgggtcagcactatgtctttgaggcaaaagagttctttcagattgatggttatgtcactgaccatattgaagttgtccaagaccacagtgctctgtttaaggtgcttgcattctttgaaactgacatggagagacggtgcaagatgcataaacgcagaatagccatgctagagcccctaactgtagacctgaatccacagtattatctgttggtcaacagacagatccagtttgaaattgcacatgcttactatgatatgatggatttgaaggttgccattgctgacaggctaagggatcctgattcacacattgtaaaaaaaataaataatcttaataagtcagcactgaagtactaccagctcttcttagactccctgagagacccaaataaagtattccctgagcatataggggaagatgttcttcgccctgccatgttagctaagtttcgagttgcccgtctctatggcaaaatcattactgcagatcccaagaaagagctggaaaatttggcaacatcattggaacattacaaatttattgttgattactgtgaaaagcatcctgaggccgcccaggaaatagaagttgagctagaacttagtaaagagatggttagtcttctcccaacaaaaatggagagattcagaaccaagatggccctgacttaatccttgtttttaaagaaaggaaatgtgcaatattgaagtgatctttttccctagtcagacaggcccaattccattgtgatgtttacctttatagccaggtgagtgcagtttgaacttgagatacagtcaactgagtgtttgctaggatcctaaggaacataaagttaattaaaaacttacacctaattatgtaaattgccttgttaaagacatgtgatttgtattttagatgcttgtttcctattaaaatacagacatttctaccctcagtttctaaatgtagactatttgttggctagtacttgatagattccttgtaagaaaaaatgctgggtaatgtacctggtaacaagcctgttaatatattaagattgaaaaagtaacttctatagttactccttctaaaatatttgacttcctaaattccccccacccaaaatctttcccttttgaaaatactaaaaactaagttatgttattataaagtgtaaaatggtttgtcttaattataggagaaaaaggccttgttagaaataaaataaactgacttatttcactaatg

SEQ ID NO: 4906 - DNA, 1465 bp, Homo sapiens
tggtactgaggaggcctagcagggtgaaggccacggtcgcggccttcacgggttcctcggccgtcctgagtcccaaatcccaagctggagccgttcagctcccctccaccgcttagagatttggggggctctggccccgtccttgcggaccattccgaggggagtccagaggtgtcagtaattaacactgtggatacctcccatgaggacatgattcacgacgcccagatggactactatggcacccgcctggcaacctgctcatcagacaggtccgtcaaaatctttgatgtgcgcaatggagggcagatccttatcgccgacctcaggggtcatgagggtcctgtgtggcaagtggcctgggctcaccccatgtacggcaacatcctggcatcgtgctcctatgaccggaaagtcattatctggagagaggaaaacggcacctgggagaagagccacgagcatgcgggacacgactcctcagtgaactcggtgtgctgggccccccatgactacggcctgatcctggcctgtgggagctcggatggggccatctccctgctgacttacaccggggaaggccaatgggaagtaaagaagatcaacaacgctcacaccattggctgcaatgccgtcagctgggcccctgctgttgtacctggaagcctcatagaccacccatcggggcagaaacccaattacatcaagaggtttgcatcaggtggctgtgacaacctcatcaagctgtggaaggaggaggaggacggccagtggaaggaggagcagaagctagaagcgcacagtgactgggttcgagatgtggcctgggccccctccatcggcctgcccaccagcaccatcgccagctgctcccaggatggtcgtgtgttcatttggacctgtgatgatgcctcaagcaatacgtggtcccctaaattgttgcacaagttcaacgatgtggtgtggcatgtgagctggtccatcacagccaacatcctggctgtctctggtggagacaataaggtgaccctgtggaaggagtcagttgatgggcagtgggtgtgcatcagtgatgtcaacaagggccagggctccgtatcagcatcagtgacagagggccagcagaacgagcagtgacaagacaggtggggcctggctccccacccgccagctccaggactgccccttcctgggccaactaaccagacaactgggaagagcccccaactccaacaggattattttcccaggaggagttacagatgcagccacagattgatcatctgccttaacgtgatcggagatgctttgtaatctactgtccagctgaaagcactcatgttacgaggaagaaactacaagtgatgttcaaatctattttgggtcatttttatgtacctttgggttcaggcattatttggggggttttgtttccaaaggaactaaataaagtcatattgcttat

SEQ ID NO: 4907 - DNA, 1424 bp, Homo sapiens
ccgggttgtggacgccaggagtttgccaaacacagcaaacactggtgtgtgagcggctgaaggggactctttccactccgatctccctccctcccagcctgttttgatttactaggacttcctcctccgggcgaggcgggggaaggacgccgccgagcgcctggagttgtgcgcgtgtgcgtgtgcgcgtgtgcgagtgtgaagtgcagcgctggagtgcaacatgctgtaatgggaggaaacccagcggcgtcggagcgcccgggaccgccgcggccgttctgagcgcagtggcgccgagcagcccctcccgcagccggtgtgacctgtcccttcaggctccaaccaggaatggagacgccattggatgttttgtccagggcagcatctctggtgcatgctgatgacgaaaaaccgtcacctgggaacttgttagaaatgcagaatcgtagtcctcgctgcggaactgatgactgagaatacgcattttgacaaaatccctgagtcctgtgcactcaaaagttggagacatccaggtctgcaccatggcgaagctgctctcaggggagaacccagaatacagaccctgccggtggcctctgccctcagcagtcaccgcaccggccctcccccaatcagccccagcaagaggaagttcagcatggagccaggtgacgaggacctagactgtgacaacgaccacgtctccaaaatgagtcgcatcttcaacccccatctgaacaagactgccaatggagactgccgcagagacccccgggagcggagccgcagccccatcgagcgcgctgtggcccccaccatgagcctgcacggcagccacctgtacacctccctccccagccttggcctggagcagcccctcgcactgaccaagaacagcctggacgccagcaggccagccggcctctcgcccacactgaccccgggggagcggcagcagaaccggccctccgtgatcacctgtgcctcggctggcgcccgcaactgcaacctctcgcactgccccatcgcgcacagcggctgtgccgcgcccgggcctgccagctaccggaggccaccgagcgctgccaccacctgtgaccccgtggtggaggagcatttccgcaggagcctgggcaagaattacaaggagcccgagccggcacccaactccgtgtccatcacgggctccgtggacgaccactttgccaaagctctgggtgacacgtggctccagatcaaagcggccaaggacggagcatccagcagccctgagtccgcctctcgcaggggccagcccgccagcccctctgcccacatggtcagccacagtcactccccctctgtggtctcctgaagggagcgcctcctccaacaacacgtggatctgcatggtttgcctgagctttgaacagtcagtactt

SEQ ID NO: 4908 - DNA, 3786 bp, Homo sapiens
gtcatgccaagcatagccctcatgtcagcgctgccggcttgcagcgggctgtgagaggggccggcgccgctttgtcctaggaaacgggctgcgcgtttctctttttcactcttttccatttccaggaaggacttgtaaggacttctgaaacgctgttttcatactcgatcggggatacagtacatacaccgtctaccagtaagcccttgaagggtttcgtgtgagctcgatttttttgtgcctgatttttttttttttaacttttgcatactttgttttgatagtctgaggctgggcctctgcctttgtgaagttgaagagccaggagctactcagcaacaattgatttttgaaacttaactcttttggggcaaaagcaaagagctggttttctttgctagcccaataaatgctatttatgaagatggacctgttgaactatcagtacttggacaagatgaacaacaatatcggcattctgtgctacgaaggcgaagctgctctcaggggagaacccagaatacagaccctgccggtggcctctgccctcagcagtcaccgcaccggccctcccccaatcagccccagcaagaggaagttcagcatggagccaggtgacgaggacctagactgtgacaacgaccacgtctccaaaatgagtcgcatcttcaacccccatctgaacaagactgccaatggagactgccgcagagacccccgggagcggagccgcagccccatcgagcgcgctgtggcccccaccatgagcctgcacggcagccacctgtacacctccctccccagccttggcctggagcagcccctcgcactgaccaagaacagcctggacgccagcaggccagccggcctctcgcccacactgaccccgggggagcggcagcagaaccggccctccgtgatcacctgtgcctcggctggcgcccgcaactgcaacctctcgcactgccccatcgcgcacagcggctgtgccgcgcccgggcctgccagctaccggaggccaccgagcgctgccaccacctgtgaccccgtggtggaggagcatttccgcaggagcctgggcaagaattacaaggagcccgagccggcacccaactccgtgtccatcacgggctccgtggacgaccactttgccaaagctctgggtgacacgtggctccagatcaaagcggccaaggacggagcatccagcagccctgagtccgcctctcgcaggggccagcccgccagcccctctgcccacatggtcagccacagtcactccccctctgtggtctcctgaagggagcgcctcctccaacaacacgtggatctgcatggtttgcctgagctttgaacagtcagtacttaaaaaaaaaaaaatcatgggggtggggtggggggaagggaagggatggtttatttgcaaaaaccatgttgttgggatttgtgttctgtttttgtacttgcttggtatccgtacaagggggccctcaaacatgatagcaggaactacgcgtggaacatctgtctaatgtagcatccttacttcctgcctcagttaccaaagaaacctctgatgcaggtctgctgccccgacggggccaggactccacagcgctttctcagtcacaagccatgatgaattggtgactcagacgctttgtgctttttcctttgcttcttgagaccggggtgtgtgtggctcagcttccacggcgtgtttggttcggtccatgtgtgtgcgtgtgtatacttgaagagaactgtcgtgtctgatttgcactattggaggaggactaaagttgcctgacaactttatgtgttatgccagaactctgagggcaaactgctgaaaaacaaagggtttaaggatgacatttctgaccatttgtgtgtttgttgttgttactgtttttgttttttttaatgtagacaatacagctttggaaggggaagtctcatacaggttataggtctttctctctctagatttcaggtgcttgcaactggactgcagactctaccaatcacgggcattttatcttctctgaacactgcagtttgttagactagagctgaggttggaggattccatagtgctttaaacgtgatgcatgttttaatggagaaaaaatagctggtttctattaattatatagacagtaaacaaaaaccttaatacttactatcttcttttcagaattagtttatttttgtcagttacagtcctagatatacttactgctggtacagttgtactctaagattggtatttgatattcactttactcacaagtagtgcgggaggccagctcctggcaggccctcgcgatgagcagtgggtcagctgcggtgtgggatgctggagtttggctgcaggctgacatcatttatttttgcatccctgtctgctttgttacaagctcccaggggaggtggggtttgtgtcttccaacttccctacatgcagaaactgctccctttgaactctcttggctgaacagcagattactgacagacaatctgtgatatggtgttttatacgcttcctcgtacgctggggccaaggcagtatacattcctctgactttatactgttattactgcatttattatttgctatattaatagctactaactagaaattagatgaagcaagcatgacagacacagctgtggaggtcacagctgctcctttttggtcaatgagcgtttctatcccctccccctggggtgtgctgtgtcccacctggcccaccagaggctcacgacgatggcacctgaccaggtgacgtgggcgtggtcacctcacctgcaaggctttgtggactctgcacaccgtatgacccccggttttacagtttttagctgttgaattttggaaattggcactgggtgaaaaggtcggaggactggctcttgtagtcacagagtggctgcaggcctttgaaaagtggaggaaagaaaagcccttctccttgccccgcacacatttcactcccactgtactgggcttccaagctttggcattcaggcccctatattttctgtaggaaaaatcgttgagaacacttttctatatgggtgattttgagaccatcgttacgctgtgcgtaaagaatgtacagagaaatttgtaggtattttttgaagaacattaatttgttaatgatatgtagctatttaatttttccctttcctattgtaatcattcattttttttgttgttcggaaaaaaaaagttgatctttttttttgtcgtagatttgtctgtaaaagtgcaggaacagttattctatgagaacactgcatctgcattcatagccacgagtttgttattgctacaggctactgagcgtcgtaacaggaaaaccacccacagctgaccggctcggtggaggacactcctgggacaggtctctttgtcagtgaacaagggcgtcactctgggaggggtcggcggtgctggcggccgggtccctggtgcactgacctatctgggataggcagtaccctggaggggggcctggggcagaggaggcagcagaaaaccaaacatttcactgagaaagccccctccctgctctaagaaggggctccgtgaagttcttcccagagccgcgctgcctgcagtgcgctctgaccttctcttcatgtgtgtaaatctgtaatataccattctctgtggcctgtttttcctggaagaagaaaaaaaaaggtttggcaggccatctttttttgtacttaaaagtagccttaagaacaataataaagtgctcttaaacc

SEQ ID NO: 4909 - DNA, 1721 bp, Homo sapiens
cggcgccagcagcggagccaacgcacccgagtttgtgtttgaggccaccctgaggatcgggacagctgttcctttgggctgcagaaactccgctgagcagaacttgccgccagaatgctcctcctgttgctgagtatcatcgtcctccacgtcgcggtgctggtgctgctgttcgtctccacgatcgtcagccaatggatcgtgggcaatggacacgcaactgatctctggcagaactgtagcacctcttcctcaggaaatgtccaccactgtttctcatcatcaccaaacgaatggctgcagtctgtccaggccaccatgatcctgtcgatcatcttcagcattctgtctctgttcctgttcttctgccaactcttcaccctcaccaaggggggcaggttttacatcactggaatcttccaaattcttgctggtctgtgcgtgatgagtgctgcggccatctacacggtgaggcacccggagtggcatctcaactcggattactcctacggtttcgcctacatcctggcctgggtggccttccccctggcccttctcagcggtgtcatctatgtgatcttgcggaaacgcgaatgaggcgcccagacggtctgtctgaggctctgagcgtacatagggaagggaggaagggaaaacagaaagcagacaaagaaaaaagagctagcccaaaatcccaaactcaaaccaaaccaaacagaaagcagtggaggtgggggttgctgttgattgaagatgtatataatatctccggtttataaaacctatttataacactttttacatatatgtacatagtattgtttgctttttatgttgaccatcagcctcgtgttgagccttaaagaagtagctaaggaactttacatcctaacagtataatccagctcagtatttttgttttgttttttgtttgtttgttttgttttacccagaaataagataactccatctcgccccttccctttcatctgaaagaagatacctccctcccagtccacctcatttagaaaaccaaagtgtgggtagaaaccccaaatgtccaaaagcccttttctggtgggtgacccagtgcatccaacagaaacagccgctgcccgaacctctgtgtgaagctttacgcgcacacggacaaaatgcccaaactggagcccttgcaaaaacacggcttgtggcattggcatacttgcccttacaggtggagtatcttcgtcacacatctaaatgagaaatcagtgacaacaagtctttgaaatggtgctatggatttaccattccttattatcactaatcatctaaacaactcactggaaatccaattaacaattttacaacataagatagaatggagacctgaataattctgtgtaatataaatggtttataactgcttttgtacctagctaggctgctattattactataatgagtaaatcataaagccttcatcactcccacatttttcttacggtcggagcatcagaacaagcgtctagactccttgggaccgtgagttcctagagcttggctgggtctaggctgttctgtgcctccaaggactgtctggcaatgacttgtattggccaccaactgtagatgtatatatggtgcccttctgatgctaagactccagaccttttgtttttgctttgcattttctgattttataccaactgtgtggactaagatgcattaaaataaac

SEQ ID NO: 4910 - DNA, 2808 bp, Homo sapiens
agttcgcctctgcagcctctgcggggaagtgccggggctgctcgaggctcagttcttaggactgcaaggaggcagccccggcgtgcggcggtgcgcacagtctagagtggccagggcgcgagagtgcaacgtcctcctggccccgagcgcgtcgtcgcgccccgggagcagaccctcgcccagcagttaccgccgtcccgactttccgttccagttgcagctcctgccgggcaacatgtcaagagccgccgccgctacagctgccgccgccacctggggaagagcagcagcagcagcggcggccgcgggcacacgggggcaataaaccgagccacccgggcgtccagcgtgccggggaaccctctctgcgctcactgcccggcgggacccacgccatgtgctgagccatgtccctggccgcgcccgcgggcagcgcatggggcagcgcctgagtggcggcagatcttgcctcgatgtccccggccggctcctaccgcagccgccgccgcccccgccgccggtgaggaggaagctcgcgctgctcttcgccatgctctgcgtctggctctatatgttcctgtactcgtgcgccggctcctgcgccgccgcgccggggctgctgctcctgggctctgggtcccgcgccgcacacgacccgccagccctggccacagctccggacgggacgccccccaggctgccgttccgggcgccgccagccaccccactggcttcaggcaaggagatggccgagggcgctgcgagcccggaggagcagagtcccgaggtgccggactccccaagccccatctccagctttttcagtgggtctgggagcaagcagctgccgcaggccatcatcatcggcgtgaagaagggcggcacgcgggcgctgctggagtttctgcgcgtgcaccccgacgtgcgcgccgtgggcgccgagccccatttcttcgatcgcagctacgacaagggcctcgcttggtaccgggacctgatgcccagaaccctggacgggcagatcaccatggagaagacgcccagttacttcgtcacgcgggaggcccctgcgcgcatctcggccatgtccaaggacaccaagctcatcgtggtggtgcgggacccggtgaccagggccatctcggactacacgcagacgctgtccaagcggcccgacatccccaccttcgagagcttgacgttcaaaaacaggacagcgggcctcatcgacacgtcgtggagcgccatccagatcggcatctacgccaagcacctggagcactggctgcgccacttccccatccgccagatgctcttcgtgagcggcgagcggctcatcagcgacccggccggggagctgggccgcgtgcaagacttcctgggcctcaagaggatcatcacggacaagcacttctacttcaacaagaccaagggcttcccctgcctgaagaaggcggagggcagcagccggccccattgcctgggcaagaccaagggcaggacccatcctgagatcgaccgcgaggtggtgcgcaggctgcgcgagttctaccggcctttcaacctcaagttctaccagatgaccgggcacgactttggctgggattgagcagacccgggctatgtaccttacccacgtggcttatctattgacagagattatatcataacatggcttgaagtaaaaggcagtatccaagtccttcacctggtcttgccctgtctactttctgatcattctgatggtctgatgtggctgttgatgtggaactgcagaagagttcagagaagagtatgcaacaaagccataggaaaacacacaggagcttttccctccccttcaggtccccgccctctttccaagctggacaattttttattaagttgtttattccctgccttaaaactgaaacaggaaattttctggtagaaggagggtcatttagtcacgaacactgaagtgggtcaaaattctattctgggtcaaatccttgaattcaaacagatgtccataatcagtactgatggaatagagcaagtttttctatgtaagacaaataaatcaaacatcatgtgcatctcctcataagggtctgcaagggtctgatggtttaaagttcctaacagatctggttgcagcatctgccggagcttgcaccccatcatcggacggtcatcttcctgctgcagaagttaggtaacataagacttagatttcttcctgttctagcaatctgcaagaccaccaggcttaactttttagctgccagaagacaaacccccttttctgtttcggcaatttgtcctggcacgtgttttggacttcctccgatttacacgaaaagctctgatattcattggagtactttattttttttcctcagttttgtttcttttctcatgtaaaaacaaacaaaaaggtcaacaaaaaaaaattgaggtttttcttgtttctatctagttcatgctttctttgcggtgtttgaacagtagtctgttaacttagtaggtggtacctggaaaggtattttaagtatagtgactgtttaataaatacttaattggatgatggaggaggagaaattgttttcttcccaggattctctttgggggtcattttgtgtgacagatatattttagacatttggagaaacagtttcagatcctgccaggatatttttgtaaaaaaggaaaatggaagattccaataaactagaaacagtacgtatctaagatgctgacacagaagctaatgtgacttttcagcttatcaagaggatggccaataaaacttaaaggtgtggttag

SEQ ID NO: 4911 - DNA, 6146 bp, Homo sapiens
gtcttataattgctaagcacttacaactgtttgcagaggaaactgagactttgtaactatgtctcagtctcatctgcaaagaagtaagtgctttgccaagctccttgagaggttaggtaagtagataaagttctgctgctgtcggaatgtgcagctggctttttcatgcagacccttcagtttcgaggttacaactctgacctctttggatgactttggggaatggagctcgtgtgagttctccatacccagaaccaatccagtctggttgaatgggaagcaaagtccattgtagtgggaggtggaggctagagttctaatgtcagctagtttaaggctgggaaagtctggaggaagttacagcagctacactggctgctgcattgacatttatcttaaaggaacaagtctgaaaagcacagattcttatcaaaggcttcatggtggattccacatagacatagtggccactggttttctgaccttttctctgacaaagactaaaggggaaggtcctgggtatcttacacttcagctcccaattagatgtgagcaccttcacttatgttcctaggtgacctgaatgaggagccaagggacctccccagggtagctcccagagcaaccctggaaacactcttcacacatcctgaccaagttcagggcagtgaaggcactgccctcatcgtttccagaatgtggatggagccagtcacccaaccagccatttgtcgtgagaggcatcttgttctgctaccatgtgactaggcagaaaatctgcttttgtttcatttattgagtcagtctctggatgagggaaagctcatgctcatgtggctagagctttgcttgcacagtattaggcaggggcagagggctgggctaccttaaaaatacttgccctttttcttggggactctggggaagcggttttactacctttgacttgggagccttgctcttctgccagctaaccatgggcctgcctcttggttttctgcacctcagcttttcccggataggtggggacccatcatcaaaagtgacagagaagataaggcccaggggctttcaagtcactagtggttccgtttagtagatgattgtgcattgtttcaaaatggtgccctagtgactacaaagccccagagccagcatcatcatcaaagcaatgacagtaggtaagcaccagacctccttgggagtgaggaggattcttgaggagaaaagaggtcttctttctcctctgctggagactagttgatctggagacgtggttccttcaatgtcagagttatctttgggactggtctcaaactcttccagttgggccctggggcaggtctctccatctggagcatacttacgtgctcggcgattaagggttcagaatgcagtggtagcctgctactctggccatcttggaccttgatccagagaatctctgcttcaggagcttctaagagagtccagccctgcctccagagagaggcttgcccttcactgatggctgtggagcctctgatggaatattattgctggtcaggaattcactgtcttacaaggaggtttccttcttctctagacagttctgttcatcaaaaaactctccctgttcttctgaaattggagtctctggaagttccacacattaagcttagttctttttccttggaactgtccaggttacattagtccagccactgtttcacaggaccgagattaaacgatcaacatcatcattcccggcatggatcatagtctgttgtagtctacatagccctagtttatttttcttcccttattcttcaaagctttgggtccattcattcttctagtcccagtcctctggacatggtctatttaattgtgtccctctgacactgcagtgaccaaccatgatctggtcaaagaggataagagtttgagcagaaaaccatctttagcatatatttttttgctttggttcatcagccccagatatattgttttccttacccgtgcttctctcactcctcaagaagaagaaagtgtgtgttagcatctttctcttgtccttcaagacaaattggcatctcttgacgagcggagaaggttcttttttggccagaataaataaaattaaaatagaatcatccaacagaataataaatcttcgtgcaacaagaatatattatataaacccagcaattttgcagggcctgggtataactaattagaagtgtcttaaattgcagtcaagatcccacggcaagaggacttttgataaatacattctggccagtaggcaagtgcgagggtggtccgtgcagcagctctggaggagttctatcccaaagctatactcaacacacaggtttcccactgacaacaggtcgctcccttgccttcttccagaagaatctgagaagctttgctccttgagtttcagtgctgccaaggtgagtacgaaaggctgctcttctcattcagctccagcccacccagacctgctgggcagttgatccactttccaaaataggaggacacacggacaggttagtgttctggtctgctttacaaagctgttgcctgacaggagcaagagttgctgagtgtctgctgggttccaggctgttctgagcttggatgggcaggggctaagccacagggcctgcatgagccctgccttgaagggacttaaaagacgacctaattataggcctaggaattttacagtattgcaactgcaatgtgatgctgaaagtggaaaatgatgtcctgggctcagagaaaagcccacaccagcctgggagtcatgatagcagcagagtgcttggggagggtgtgtcagagcataaagcagcatgaatgctacaaaagaagatgccaactagagatataggttgtcatcaggtcccggaggagccatgaccgtctagctgagagccatgaccaaggacacaatgtccaagtgactgtgaggacctcagtctgccctgtggatgtgtatgccacagacctgacttctggagggctgactgaaatgttcattttaagctttttcttctctttccctgaaacactcagtttgggttaggggtcatagactaagaccaaagagtccagggttagaatcttggtgtaaaattgcaggccatctcaggaaatctgtgagcagatgggattggctttgggtaaggtgcgtgtggaaaatgtcagtgggagccgggtcatggtgggcctttagcatcagattccagagtgcagatagtctgtatagctcatgtgaaacagggagccaccaaaactttggggagcaggctagtgccggttttgaccacctgtggagcagtgctcactcacgaaggcattttgccatcacatgaatgtgcagaaaggaggccaaaagcattctgtgcttctccaccacagcacagacttccctagtctcatttgctgagagtagacattctgagggccagcagtgcaggtgtgatgtgcctcagagggtatgaagcccttagtcagccatctggatatcagctgcgtgggcatgatatctagaaggctaattgattttttcactttcacctgactctcttgccaacctgcagagacagacattgggtgtaggacagtgaactgagaaggaagctattaagattctggccttggcttagctctcaactggccattggtcttgcagtaagtcttttttctgggcttcttctggtcctatttgtatgtattgcattgtcacatcatgcctctatcctagggaatactgtgagctgaaaaatgagacccttactgttcacgtcctgctaagggggaccgtcgtgtcagcactgtaatgcagtgatgttttttgtgtctttcaggtgacttcatggtcatgacgattttcttcaatgtgagcaggcggtttggctatgttgcctttcaaaactatgtcccttcttccgtgaccacgatgctctcctgggtttccttttggatcaagacagagtctgctccagcccggacctctctagggatcacctctgttctgaccatgaccacgttgggcaccttttctcgtaagaatttcccgcgtgtctcctatatcacagccttggatttctatatcgccatctgcttcgtcttctgcttctgcgctctgttggagtttgctgtgctcaacttcctgatctacaaccagacaaaagcccatgcttctcctaaactccgccatcctcgtatcaatagccgtgcccatgcccgtacccgtgcacgttcccgagcctgtgcccgccaacatcaggaagcttttgtgtgccagattgtcaccactgagggaagtgatggagaggagcgcccgtcttgctcagcccagcagccccctagcccaggtagccctgagggtccccgcagcctctgctccaagctggcctgctgtgagtggtgcaagcgttttaagaagtacttctgcatggtccccgattgtgagggcagtacctggcagcagggccgcctctgcatccatgtctaccgcctggataactactcgagagttgttttcccagtgactttcttcttcttcaatgtgctctactggcttgtttgccttaacttgtaggtaccagctggtaccctgtggggcaacctctccagttccccaggaggtccaagccccttgccaagggagttgggggaaagcagcagcagcagcaggagcgactagagtttttcctgccccattccccaaacagaagcttgcagagggtttgtctttgctgcccctctcccctacctggcccattcactgagtcttctcagcagaccatttcaaattattaataaatgggccacctccctcttcttcaaggagcatccgtgatgctcagtgttcaaaaccacagccacttagtgatcagctccctaaaaccatgcctaagtacaggcggattagctatcttccaacaatgctgaccaccagacaattactgcatttttccagaagcccactattgcctttgtagtgctttcggcccagttctggcctcagcctcaaagtgcaccgactagttgcttgcctatacctggcacctcattaagatgctgggcagcagtataacaggaggaagagatccctctcctttggtcagattattatgttctcagttctctctccctgctacccctttctctgcagatagatagacactggcattatccctttaggaagaggggggggcagcaagagagcctatttgggacagcattcctctctctctgctgctgtgacatctccctctccttgctggctccatctttcgtctgcactaccaattcaatgcccttcatccaatgggtatctatttttgtgtgtgattatagtaactactccctgctttatatgccaccctcttccttctctttgacccctgtgactctttctgtaactttcccagtgacttcccctagccctgacccaggcactaggccttggtgacttcctggggccaagaaactaaggaaactcggctttgcaacaggcattactcgccattgattggtgcccacccagggcacactgtcggagttctatcacttgcttgacccctggacccataaaccagtccactgttatacccggggcactctaaccatcacaatcaatcaatcaaattcccttaaatttgtatggcactggaactttggcaaagcacttttgacaagttgtgtctgattggagcttcatgatagccttgtgacatctttagggcaggattcttatccccattttgcagatgaaaaccctgagtcacagatttctgtgggactgtggatctcactggaagctatccaagagcccactgtcaccttctagaccacatgatagggctagacagctcagttcaccatgattctcttctgtcacctctgctggcacaccagtggcaaggcccagaatggcgacctctctttagctcaatttctgggcctgaggtgctcagactgcccccaagatcaaatctctcctggctgtagtaacccagtggaatgaatttggacatgccccaatgcttctatatgctaagtgaaatctgtgtctgtaatttgttggggggtggatagggtggggtctccatctactttttgtcaccatcatctgaaatggg

SEQ ID NO: 4912 - DNA, 2156 bp, Homo sapiens
attttgtaggccgcttatttgtgtgcatccacggcgattcttcccgcagagttgtgaagcgaaaggcttacaattaaaaggaagaaaaaaaaataaagataattcgggagtacaattgacaaagcgtgtgggtcgctcagcctccagcagtaactgctgatctccagttcttggagggttccggtgagaagaacgcccctactgcggtactgaggaagcggcaggaggagatgcggcccctggacatagacgaggtggaagcgcctgaggaagtggaggtgctggagcccgaggaggatttcgagcagttcctgctcccggtcatcaacgagatgcgcgaggacatcgcgtctcttatacgcgagcacgggcgggcgtacctgcggaccaggagcaagctgtgggagatggacaatatgcttatccagatcaaaacgcaggtggaggcctcggaggagagcgccctcaatcacgtgcagcacccgagtggcgaagccgacgagagagtgtcggagttgtgcgagaaggctgaggagaaagccaaggagattgcgaagatggcagagatgctggtcgagctcgtctggcgaatagagagaagcgagtcttcttgaaggaggagatcggtggtaaggtcggaaactagctggagcttggatgaaactcagtagtcgccctaagcatggttaaaccgcgccctgtaaaaagttatgttctaggcctgcatcccccattttattgcatcaaaaattgagcattgggaacaaagttggggtcaagaggaaagaatgcgtgctggttttgttaggcgttagtataccgtttttttgtggcctctccctcccacgctgttaattagagaaagataacagtaacttcggttttgtttttgtgaaacataaaagtcaattctaatagggcagtcgccagaagtagacctgtctaggcactaagggagtttggggaaagccaaagaagacctaggccatagagcacagtggaacgcaggctgagaacgcagggaaggagaaataaagagtaaagccagaggccattacctgaaatttccagattgttctatgagacaggtatgtcagaggaccgtgtctcaaagaagtggcattcttctgggtggttcacatttatttttaacatcaggatatggaactttgagagtcaatgtcttcatggtaaatttctcccaattgtgctttaggttcacagctgaggactgtagtcaactggtaaggatgaactgacaccttgaggaaactgaaacagcttgtcattttctctgttttgtttttgtatgttttttaccccgatgtaacagtctcccttatggtcagtgattgatgacctcgatatggatttagattatcaaatgtgtttggttttggaaatataacttttgtcaaagaaatactctcagaagagaaatggggcttaattaagttgtttttgtggtcacgtttattcttgttacttcgctgtgtttttgaaatgttgggcatggcctcgtattttgctgttacctttgtgacctgattgttttttggaacacgtcaagacgtgggatcagaatcttccaactttagaggtgcaatggaagacactacgctacttggttgagcctggtgaagaatgtattaatgagactgctttgcataaaactgggaagaaagagaagacagttggagatggaagatggttttgtatatattttggaactttagttcctctgtgagacgaaagaggagagctatgttttgtggcacattgtctgatatatattgtgtaacctgtcaggtgagttgatttagacaacatagctgaccttttatgacaaggcagtttgaatagggactattgtaataccctcacacattataggggcatcagagaatggcatggaagagacagtctacagagagctttaagaggccggagaaaggaaaagacattatcagggcctggaaagtctcttccagttcatcagggtagtagacctgtcagattggaggtcaaagtcaaaagtataataagtgttaatttgccttgaaaaacaaagacctaaaaagccttttttaagaaataaattttttgttcacatgaccaaagcccctcctgtgtgtgttaataaaagaatcataaac

SEQ ID NO: 4913 - DNA, 753 bp, Homo sapiens
gcttggtgcgtgcgcggcgactgcgacgggcagtggcagtcatggcggctcagtgcgtgaggttggcgcggcgcagtcttcctgctttggcgttgtctctcaggccatctccccggttgttgtgcacagccacgaaacaaaagaacagtggccagaacctggaagaggacatgggtcagagtgaacagaaggcagatcctcctgctacagagaagaccctcctggaagagaaggtcaagttggaggaacagctgaaggagactgtggaaaaatataaacgagctttggcagacactgagaacttacggcagaggagccagaaattggtggaggaggcaaaattatacggcattcaagccttctgcaaggacttgttggaggtggcagacgttctggagaaggcaacacagtgtgttccaaaagaagaaattaaagacgataaccctcacctgaagaacctctatgaggggctggtcatgactgaagtccagatccagaaggtgttcacaaagcatggcttgctcaagttgaaccctgtcggagccaagttcgacccttatgaacatgaggccttgttccacacaccggttgaggggaaggagccaggcacagtggccctagttagcaaagtggggtacaagctgcatgggcgcactctgagacccgccctggtgggggtggtgaaggaagcttagctgctgttgatggggtgggtgtttttaaactcacttgatgtaaaaaaaaaaaaaaaaa

SEQ ID NO: 4914 - DNA, 2668 bp, Homo sapiens
gaacaaacatggccgctctggcgcccgtcggctcccccgcctcccgcggtcctaggctggccgcgggcctccggctgctcccaatgctgggtttgctgcagttgctggccgagcctggcctgggccgcgtccatcacctggcactcaaggatgatgtgaggcataaagttcatctgaacacctttggcttcttcaaggatgggtacatggtggtgaatgtcagtagcctctcactgaatgagcctgaagacaaggatgtgactattggatttagcctagaccgtacaaagaatgatggcttttcttcttacctggatgaagatgtgaattactgtattttaaagaaacagtctgtctctgtcacccttttaatcctagacatctccagaagtgagtaagagtaaagtctccaccagaagctggtacccagttaccaaagatcatcttcagcagggatgagaaagtccttggtcagagccaggagcctaatgttaaccctgcttcagcaggcaaccagacccagaagacacaagatggtggaaagtctaaaagaagtacagtggattcaaaggccatgggagagaaatccttttctgttcataataatggtggggcagtgtcatttcagtttttctttaacatcagcactgatgaccaagaaggcctttacagtctttattttcataaatgccttggaaaagaattgccaagtgacaagtttacattcagccttgatattgagatcacagagaagaatcctgacagctacctctcagcaggagaaattcctctccccaaattatacatctcaatggcctttttcttctttctttctgggaccatctggattcatatccttcgaaaacgacggaatgatgtatttaaaatccactggctgatggcggcccttcctttcaccaagtctctttccttggtgttccatgcaattgactaccactacatctcctcccagggcttccctatcgaaggctgggctgttgtgtactacataactcaccttttgaaaggggcgctactcttcatcaccattgcactcattggcactggctgggctttcattaagcacatcctttctgataaagacaaaaagatcttcatgattgtcattccactccaggtcctggcaaatgtagcctacatcatcatagagtccaccgaggagggcacgactgaatatggcttgtggaaggactctctatttctggtcgacctgttgtgttgtggtgccatcctcttcccagtggtgtggtcaatcagacatttacaagaagcatcagcaacagatggaaaagctgctattaacttagcaaagctgaaacttttcagacattattacgtcttgattgtgtgttacatatacttcactaggatcattgcatttctcctcaaactcgctgttccattccagtggaagtggctctaccagctcctggatgaaacggccacactggtcttctttgttctaacggggtataaattccgtccggcttcagataacccctacctacaactttctcaggaagaagaagacttggaaatggagtccgttgtgacaacatctggggtgatggaaagtatgaagaaagtcaagaaggtgaccaacggctccgtggagccccagggcgagtgggaaggcgccgtgtgacagagccgaccctgaggatggcactgtccaaggaaactgttaacttattcatagtcctattggacagcaggagcagctcctacagtgaactattggcaccaccgacagtgacaccagggcacatggctggagcacagtgccgcggaaacctgattttgtactctcttttatggaaacgatctgtggctgtttagaggcagctggatcctctttcaggcgggaatgggagggcgggcacagggaggaggagaggaagagaaaaggaagaattcatttttaatttaggtttctttttttcttcttcatttcggagctctaaggtgtatgcagttgtgaccccatgtgtggggaagtgtagcaaggacggctggtggagggggaaggagggtgcgaggtgtctgtctgatgctttaggaaatgtctactgaggaccctgggacttaagaagaagggcggggagagtgccattgcctgtttgggagacaaaaatgaacgaaaacaggtgactttggaaagcaaagtcaaaacccagtttaggatgtagcacctgccccaggattcctgccctcggctttgccccagacccttattccagatgctgagagtgaccaggacagcagctcctgaggcccagtggtcttctttccaacaggaaaagaaggctgtgatgtcgctgtcaggatcatgccctgtggcacagcacaggtggtgggaggtggttttctgactgagatgttgcctgatggatggaaagaaatgtatttttaagttcaaaaagcattatcctgtggcgttgcctggacatccactccctgacagcccagagcagcactgtctggcttcccttcatgcttgtggctttgttgtgtttgatcagaattttgggggaaatggaaagttttcctcaaggagcagctgggggcagaataggtagtatttaagcaaatacttaagtccaagcaaatcatccccattaaaaagcttttcctgtaggctagtagg

SEQ ID NO: 4915 - DNA, 1862 bp, Homo sapiens
gagatgcctgcccacagcctggtgatgagcagcccggccctcccggccttcctgctctgcagcacgctgctggtcatcaagatgtacgtggtggccatcatcacgggccaagtgaggctgcggaagaagagtctggctctgttgcccaggctggagtgcagtggcaagatcacggctcattgtagcctcgacctcccaggctcaagcaatcctcctgcctcagccctcctgccaagtagctgggaccacaggcctttgccaaccccgaggatgccctgagacacggaggcccccagtattgcaggagcgaccccgacgtggaacgctgcctcagggcccaccggaacgacatggagaccatctaccccttccttttcctgggcttcgtctactcctttctgggtcctaacccttttgtcgcctggatgcacttcctggtcttcctcgtgggccgtgtggcacacaccgtggcctacctggggaagctgcgggcacccatccgctccgtgacctacaccctggcccagctcccctgcgcctccatggctctgcagatcctctgggaagcggcccgccacctgtgaccagcagctgatgcctccttggccaccagaccatgggccaagagccgccgtggctatacctggggacttgatgttccttccagattgtggtgggccctgagtcctggtttcctggcagcctgctgcgcgtgtgggtctctgggcacagtgggcctgtgtgtgtgcccgtgtgtgtgtatgtgtgtgtgtatgtttcttagccccttggattcctgcacgaagtggctgatgggaaccatttcaagacagattgtgaagattgatagaaaatccttcagctaaagtaacagagcatcaaaaacatcactccctctccctccctaacagtgaaaagagagaagggagactctatttaagattcccaaacctaatgatcatctgaatcccgggctaagaatgcagacttttcagactgaccccagaaattctggcccagccaatctagaggcaagcctggccatctgtatttttttttttccaagacagagtcttgctctgttgcccaagctggagtgaagtggtacaatctggctcactgcagcctccgcctcccgggttcaagcgattctcccgcctcagcctcctgagtagctgggattacaggcgcgtatcaccatacccagctaatttttgtatttttagtagagacgggttcaccatgttgcccaggagggtctcgaactcctggcctcaagtgatccaccggcctcggcctcccaaagtgctgggatgacaggcatgaatcactgtgctcagccaccatctggagttttaaaaggctcccatgtgagtccctgtgatggccaggccaggggacccctgccagttctctgtggaagcaaggctggggtcttgggttcctgtatggtggaagctgggtgagccaaggacagggctggctcctctgcccccgctgacgcttcccttgccgttggctttggatgtctttgctgcagtcttctctctggctcaggtgtgggtgggaggggcccacaggaagctcagccttctcctcccaaggtttgagtccctccaaagggcagtgggtggaggaccgggagctttgggtgaccagccactcaaaggaactttctggtcccttcagtatcttcaaggtttggaaactgcaaatgtccccttgatggggaatccgtgtgtgtgtgtgtgtgtgtgtgtgtgtgtgtgtgtgtgtgtgtgtgttttctcctagacccgtgacctgagatgtgtgatttttagtcattaaatggaagtgtctgccagctgggcccagcacct

SEQ ID NO: 4916 - DNA, 630 bp, Homo sapiens
tgcaagaaggttgtgggaaaatcagcaagctctatggagacctgaagcatctgaagacgtttgaccggggaatggtctggaacacggacctggtggagaccctggagctgcagaacctgatgctatgtgcgctgcagaccgtcaatggagcagaggcggggaaggagtcacggggcgcgcacgccggggaagactacaaggtgcggattgatgagtacgatcactccaagcccatccaggggcaacagaagaagccctttgaggagcactggaggaagcacaccctgtcctatgtggacgtcagcactgggaaggtcactgtggaatatagacccataatcgacaaaactttgaatgaggctgactgtgccactgtccccccagccattcactcctactgatgagacaagatgcggtgatgacagaatcagcttttgtgattatgtataatagctcatgcatgtgtcaatgtcataactgtctttatacgcttaggctctctggggaagaaggagtacattgaagggggattggcacccagtggccggggagcgtggcactttgtcccgtgcttcattcttgtgacaagataaaactggggcacagctcttaaataaaatataaatgaac

SEQ ID NO: 4917 - DNA, 3201 bp, Homo sapiens
ctggaacgtgagctggaaattgggcaggactgcctggagctggagctgggccagagccgcgaggagctggacaaatttaaggataagttccgcaggctgcagaacagctacacggcttcccagcggaccaaccaggagttggaggacaagctgcacacactgatcaagaaggctgagatggataggaagacgctggactgggagattgtggagctgaccaacaagctgctggatgccaagaacaccatcaacaagctggaagagctcaatgagcggtaccggctggactgcaacctggctgtacagctcctcaagtgcaacaagtcccacttccgaaaccacaagtttgccgatgtgagtagaactcaccccctccctgcccacatagaccattccggccactgtaggactcctctaactccagtttctgcacctctctctgtcctcctcttcccactttgccctcctcttgcctccatgtcacctctcaagccagtcaactctgccactggttggtgtcccgtgtactgtccagggcccatcactagttctggggggccagccctgttggtttctgtaacagagacagagagagaagatcctgggcaggaaggagagggtagtcagagctatctgcccaaagagtactaagagaggattaggcccatctgatcatgttaccccaaggggtaaactctagaccccacagcttcaggcccaaggtttatgtggcctgcagaagtagaagaagtagaggtatttctttttttttttttttttgagacggagtcttgctctgtcacctaggctggagtgcagtggcacaatctcggctcactgcaacctccgcctcccggcttcaagcaattctcctgcttcagcctcccaagtagctggaattataggcgcccaccaccacgcctggctaatttttttgtctttttagtagagatggggtttcatcgtgttagccaggatggtctcgatctcctgacctcgtgatccacccgcctcggcctcccaaagtgctgggattacaggcatgagccactgtgcccggcccagaagtagaggtatttctaaggctactggtctatgcagattctccaaacttaagtatggtttgggcagaagctgggagatagaagtttgagaacatgctggctgcagcagcagatccgggtttaaatcttggccaagttaaccaaagctttgagttgtcttcccctctccaggcctatgtgtctgtgaagtgagggtatacacactggcatgctgtaagaacaggagatagcagagtgctgagtacacagaggtacttaaaggtgggagccattactttcgccatgagtcaagttatctttggctgcgatcattgatgtctctctttcctgctcttttacctcagctgccctgtgagctacaggacatggttcggaaacatttgcacagtggtcaagaggccgccagcccaggtcctgctcccagcctagccccaggggctgtggtgcctacctcagtcattgcccgagtgttagagaagccggagtctctactgctcaattcagcccagtcaggcagcgccgggcgccccttggctgaggatgtctttgtgcatgtggacatgagtgagggtgtcccaggtgatccagccagtcccccggcccctggcagccccaccccacaacccaatggggagtgccactctctgggtactgccaggggctccccggaggaagagctgcccctgccagcctttgagaagctgaacccctacccaaccccgtctccaccacacccactgtatcctggccgcagggtaatagagttctctgaggataaggttcggatcccccgcaacagccccctgcccaactgcacttacgctacccgccaggccatttccctgagcctggtagaggaggggagtgagcgggcccgccccagcccagtgcccagcacccctgcctcagcccaggcctcaccccaccaccagcccagcccagcacccctaacactcagtgccccagctagctctgccagctctgaagaggacctgctggtcagctggcagcgggcatttgtggaccgtactccaccacctgctgctgtggcccagcgcacagcctttggacgcgatgccctccctgagctgcagcgccattttgcccatagccccgctgacagagatgaggtggtccaggcaccttctgcccgacccgaagagagtgagcttttgctacccacagaacctgactctggctttcccagggaggaagaagagctgaacctgcctatcagtcctgaggaagagcgccagagcctgctgcccattaacaggggcacagaggaggggccaggcacttcccacaccgagggcagggcctggccactccccagctccagtcgcccccagcgcagccccaagaggatgggggttcaccacctgcaccgcaaggacagcctgacccaggcccaggagcagggcaacctgctcaactagggcccctgctggccttcctgccattgctgcaccaggactgcaaggagtccccacaccttggcagctcagggtccccagtccaagcccttgacctctcctctatccagacccgcacagctgtttcctgtgtggatggggtcaggttgtgggccatgccaggcctgtcagctgcgttgactgactgcagcagcttgcctcatggttttccctttttcttagaatatttattcttcagaggtaacatgcagttgggtctcaagacctttcctccaatcagcccaacccagcccagactgggcttttctggggagctgaggagtttatcagtattcatcttccatcctttcatagtcacaagttttgttattttgtttttttttgggggtgatggtgtaattgttaacctcatttccgtttcctacctgtttgcttccccccccagtcctccgcatgagctgttgccctccaggggcctggcacagctggccttggggacgagggagaggactgattcagggccccctcagctgtctcctccctccctctggaaaggagggtggggctcaggggcctcaagctgggctctgtgtgaggcctggcccccactcccaaccttggctctagactgttactcttaagctttgagaaattttcacattgatgactattttaaaatcaaataaaactattttactggt

SEQ ID NO: 4918 - DNA, 1064 bp, Homo sapiens
ggaggcccctgaccgtagtgcggccagcagttgcaggcagacggagcagagcggtcagggatcatgagggagagtgcgttggagcgggggcctgtgcccgaggcgccggcggggggtcccgtgcacgccgtgacggtggtgaccctgctggagaagctggcctccatgctggagactctgcgggagcggcagggaggcctggctcgaaggcagggaggcctggcagggtccgtgcgccgcatccagagcggcctgggcgctctgagtcgcagccacgacaccaccagcaacaccttggcgcagctgctggccaaggcggagcgcgtgagctcgcacgccaacgccgcccaagagcgcgcggtgcgccgcgcagcccaggtgcagcggctggaggccaaccacgggctgctggtggcgcgcgggaagctccacgttctgctcttcaaggaggagggtgaagtcccagccagcgctttccagaaggcaccagagcccttgggcccggcggaccagtccgagctgggcccagagcagctggaggccgaagttggagagagctcggacgaggagccggtggagtccagggcccagcggctgcggcgcaccggattgcagaaggtacagagcctccgaagggccctttcgggccggaaaggccctgcagcgccaccgcccaccccggtcaagccgcctcgccttgggcctggccggagcgctgaagcccagccggaagcccagcctgcgctggagcccacgctggagccagagcctccgcaggacaccgaggaagatcccgggagacctggggctgccgaagaagctctgctccaaatggagagtgtagcctgagggctggtgttgcctgcctcccctgtgcttgtgccttgtcccaaaataaatcctttcagaatgtagcactcacgccctaataaggagcgaatcctacatccaccaaggcgggcgctctggccctcccttccttaagcccagtcctgtgtcctctgaaagaggtgcagtcactcacacctgcttgcgctcaccatcaataaaagtaatttcacccg

SEQ ID NO: 4919 - DNA, 1036 bp, Homo sapiens
gaaacctctgttttcttagatttggagcagggtggtcacactgaccttgcagagttctgagaatcagagacagaacataaaaggcctggaaaacattctccaaaaagaagctgcaacatgtgtggacagtgggcttttcatgcctctcttactgtctcttactgtctgttgacctggtgcaagaaacatgctctggtgatggctgtgagggaggaatgaggatagacatagacactcctgtgtctcaaacatgcttctttattactctgttatgactctgtcttccctggggcaggaccccagcctgcctacatttgcagacagacacagtggcatgtggagacaacagtgtgtccgaatgactttcctttaccctccagctgtcggcagtactcagtggaagggtgatattatgacactgatactgctattttgaaacctggaggatggaaaggtgcaaaaatctatcaccagcaacagaaggtgcagacttgtgttggtggcggtaattttgtccatcaaatgaatatgtgtgaaaacattccctcctttggccctacaggtcagaatggcggcagcggagcatcgtcattcttcaggattgccctactggccctacctcacagctgaaactttaaaaaacaggatgggccaccagccacctcctccaactcaacaacattctataactgataactccctgagcctcaagacacctcccgagtgtctggtcactccccttccaccctcagcggatgataatctcaagacacctcccgagtgtctggtcactccccttccaccctcagcggatgataatctcaagacacctcccgagtgtctggtcactccccttccaccctcagcggatgataatctcaagacacctcccgagtgtctgttcactccccttccaccctcagcggatgataatctcaagacacctcccgagtgtctggtcactccccttccaccctcagcggatgataatctcaagaaactaacaaagaataaataaataatataaaaataaaat

SEQ ID NO: 4920 - DNA, 933 bp, Homo sapiens
cagaggatcgcctcgctggcctactctctcctcccgtacggcgccggaatcccagctccacttaccaggccgcggctaccccgccgtcccccccgactcccgccaccccgctctctcaggctcttcaggatccaagtccgtaggccctttaaggggtctagttgccgtttgcgaggccctgggactttggtcccagacagcggggatccggatggcttccgtgcggatccgagaggccaaggagggagactgtggagatatcctgaggctgattcgggagctagccgaattcgaaaaactctcggatcaggtgaagatcagtgaagaagccctgagagcagatggctttggagacaatcctttctatcactgtttggtagcagagattcttccagcgcccgggaagctactggggccctgcgtggtgggctatgggatatactatttcatctacagtacatggaagggacgcaccatttatctggaggatatctatgtgatgccggaatatcggggtcaagggattggttccaaaataatcaaaaaggtggctgaggtggccttggataagggctgctcccaattccgcctggccgtcctggactggaaccagagggccatggacttgtacaaggccctaggagcccaagatctgacggaagctgagggctggcacttcttctgctttcaaggagaggcaacgagaaagttggcaggaaagtgacgccatccctaggaggatctctgtcttgagtttctccttccccatcagctgaagcactcttcagagactacgtccacagacactgatgctgaggcctccctggaggaaggagggttaggggtgcctatcctcaagtattggaagagcagaattgagggagagacctttcttccttgttgagggtgaaaaataaataagaattacatgtc

SEQ ID NO: 4921 - DNA, 1722 bp, Homo sapiens
ctttcacaaaaggtgaaatgagctctttgtagtgtttcccgcccaggctgcattttagaatcacagaggaggtggcccgaggcagccgggatgacagctctccccaggaatcctgctgcctgctgagaaacatggtcagcaagtcccgctggaagctcctggccatgttggctctggtcctggtcgtcatggtgtggtattccatctcccgggaagacaggtacatcgagcttttttattttcccatcccagagaagaaggagccgtgcctccagggtgaggcagagagcaaggcctctaagctctttggcaactactcccgggatcagcccatcttcctgcggcttgaggattatttctgggtcaagacgccatctgcttacgagctgccctatgggaccaaggggagtgaggatctgctcctccgggtgctagccatcaccagctcctccatccccaagaacatccagagcctcaggtgccgccgctgtgtggtcgtggggaacgggcaccggctgcggaacagctcactgggagatgccatcaacaagtacgatgtggtcatcagattgaacaatgccccagtggctggctatgagggtgacgtgggctccaagaccaccatgcgtctcttctaccctgaatctgcccacttcgaccccaaagtagaaaacaacccagacacactcctcgtcctggtagctttcaaggcaatggacttccactggattgagaccatcctgagtgataagaagcgggtgcgaaagggtttctggaaacagcctcccctcatctgggatgtcaatcctaaacagattcggattctcaaccccttcttcatggagattgcagctgacaaactgctgagcctgccaatgcaacagccacggaagattaagcagaagcccaccacgggcctgttggccatcacgctggccctccacctctgtgacttggtgcacattgccggctttggctacccagacgcctacaacaagaagcagaccattcactactatgagcagatcacgctcaagtccatggcggggtcaggccataatgtctcccaagaggccctggccattaagcggatgctggagatgggagctatcaagaacctcacgtccttctgacctgggcaagagctgtagcctgtcggttgcctactctgctgtctgggtgacccccatgcgtggctgtgggggtggctggtgccagtatgacccacttggactcaccccctcttggggagggagttctgggcctggccaggtctgagatgaggccatgcccctggctgctcttatggagccgagatccagtcagggtgggggcgctggagccgtgggagcccggccagggcagggggctcgttgctgtggcaccccctctctgccagcaccaagagattatttaatgggctatttaattaaggggtaggaaggtgctgtgggctggtcccacacatccaggaaagaggccagtagagaattctgcccactttttataaaaacttacagcgatggccccaccaaggcctagacacggcactggcctcccaggagggcaggggcattgggaatgggtgggtgccctccagagaggggctgctacctcccagcaggcatgggaagagcactggtgtgggggttccaccgagaaggggacctcatctagaaaagaggttacaaacctaccattaaactatttttcctaaaacgg

SEQ ID NO: 4922 - DNA, 2068 bp, Homo sapiens
  misc_feature (869)..(1012): n is a, c, g, or t
gggtggcggccggatagggacccagaactccatttgacagatgaggaaacggcgaggcagacagctgatgttctaatcatgtcagataaagatgatattgagactccactgctaactgaagcagcccccatccttgaagatggaaactgtgagccagccaagaattctgagtctgttgaccaaggtgccaaaccagagagtaaatcagaacctgtagtttccactcggaaaagaccagagaccaaaccttccagtgaccttgagacttcaaaagttctccctattcaggataatgtttccaaagatgtaccccagaccagatggggttattgggggagctggggcaagtccatactctcctcagcctcggctacagtagctacagtaggacaaggcatttcaaatgtcatcgagaaggcagagacttcccttggaatccctagtcccagtgaaatttcaactgaagtcaagtatgtagcaggagagacaaatgccaaagagaatgaaaactcctccccagtggctggggcatttggtgtattctctaccatctctactgctgttcagagcacaggaaagagtgttataagtgggggtttggatgccttataattcattgtgaaaaaagacactggatgtgatagcagaaggggatcctggatttaaaagaaccaagggtctgatgaacccaaatgctacactatctcaggttttacgagaggcgaaggagaaagaagagatacggacctccaatgaggttaccgtggaaacagacaagaaaactcattatgggctactctttgatgaatttcaaggcctttcacatctagaagctctggagatgctttcccaagaaagtgaaataaagnnnnnnnnnnnnnnnnnnnnnnnnnnnnnnnnnnnnnnnnnnnnnnnnnnnnnnnnnnnnnnnnnnnnnnnnnnnnnnnnnnnnnnnnnnnnnnnnnnnnnnnnnnnnnnnnnnnnnnnnnnnnnnnnnnnnnnnnnnnnnnnngacataacagagctgttttcccagctgcacgtttcctccaaaccagagaaacttgccagggcaagaaataccgcccacgaatggatcaggaagtctctgaccaagccattagcagagaatgaagaaggagaaaaacagtcggaagcagaaaatactgagcaagtcaacaaaaattcaatagaggatatccatgcgtttgcaatccggagcctggctgaactgactgcctgctcaattgaactattccacaaaacagctgcattggttctgcatggcaggaagcaggaagtgacagccatagaaaggagccaaactctttcccagatgacaattgtgttgtgtaaagagttgtcctctctgtctaaagagttcactacctgcctaacaactgctggggtcaaagaaatggcagatgtccttaacccattaatcactgcagtatttctagaggcatcaaacagtgcctcctacatccaggacgcctttcagctactcttacctgtgctagagatctctctcattgagaacaagattgaatcacacagacatgagctgcagggccagaaacctttgttagaacattgaagaatggagacgttttgacctgggacttgtgacggccaaggaatgccaccttattctggctactcctgcagaaatgaaggagtggggttattttagtatataaaaattcaggcaggagagatggtttaaagaggaagattgttgccttcagtgtttgattgaagtattcaggttctcacagtattctttccagttgttgtaattcataaattatttgaaaagaaactttgtagaaagtccaagaataataactctagataaagattagtgggacactcaggcaaaaatgttggtctttctttgacatgttgcaaaatgttatcaatttgtcatggatataatttgcagcccatggatataactggttgataagccagagaaaaataatttagtgttctaaaattcatggcatgtgtggtttattaatgccatgtactttctcctttctggaataaaatctatggctttaag

SEQ ID NO: 4923 - DNA, 1728 bp, Homo sapiens
tcgggctgagggagctcgggccaatcagagggacggccccagaatggcatggtagatggaacgcagctgagaggtctgacaagatgtaccaggtcccactaccactggatcgggatgggaccctggtacggctccgcttcaccatggtggccctggtcacggtctgctgtccacttgtcgccttcctcttctgcatcctctggtccctgctcttccacttcaaggagacaacggccacacactgtggggtgcccaattacctgccctcggtgagctcagccatcggcggggaggtgccccagcgctacgtgtggcgtttctgcatcggcctgcactcggcgcctcgcttcttggtggccttcgcctactggaaccactacctcagctgcacctccccgtgttcctgctatcgcccgctctgccgcctcaacttcggcctcaatgtcgtggagaacctcgcgttgctagtgctcacttatgtctcctcctccgaggacttcaccatccacgaaaatgctttcattgtgttcattgcctcatccctcgggcacatgctcctcacctgcattctctggcggttgaccaagaagcacacagatcgcaagtcctacagctggaaacagcggctcttcatcatcaacttcatctccttcttctcggcgctggctgtctactttcggcacaacatgtattgtgaggctggagtgtacaccatctttgccatcctggagtacactgttgtcttaaccaacatggcgttccacatgacggcctggtgggacttcgggaacaaggagctgctcataacctctcagcctgaggaaaagcgattctgaacccttcagtcctgcttgggaggacgcagcccactgcccagaaacaagaaacacgataccattctggccttccccaccccacatcctctcttggccttactgaagatgggggaagggtaagaaggaagggtgtaggccaaggctcaccccagtgctgctggcttctcctctccacccctcatatgggcgtggggtcctcaaacatcacctttacctgagaggccccaagaagctgagctggcagagagctccaccatttggtgctaaaaaaaaaaacgtcctgaggttcatgaccaccatccagtttctggcctttacacagtcacctttcactgaggtcaggagcccctgagcagtggctgctccctgacaaccacagccatttctctgcacgggggtcattcataggactaatgtatttcatgatctactgtgcacatccaggcctgtggccacagtcccctgctaaagttgctcaggtgttctagtcctgacttcacctttttgatttggtgtgtgccctagggtatgtacccttccccatctgagcctcggtgtgtccatgtgtctggcgggggatgggtggactgtatgatttccaaggactctaccagtcagtggttctgatgtcatcgggtggaggtggtgttctatacctaaaggatgacctgctccagaaacagcaccagcacagcatgtattttcttctcttctgaaagttctggcttgtagacccctcccctcctttgcaaaggtatgggatagaggggtcagatgcagatctctactgtaaaatgggctccctggtatctcctgtcttccctactgctccaaaccctaaattttggttgtacattttatttgaaaggaaaataaattttttttttgggcc

SEQ ID NO: 4924 - DNA, 5611 bp, Homo sapiens
  misc_feature (4975)..(5007): n is a, c, g, or t
gcggcggcgacggtttcgtgggggccgcgcgctgctctgtgagcggcgggtggcagcaggggactcctgacacttccccttccccaccgaaccgcgctttctgaaacaaagactcattttgaagatgtttaacaaatcatttggaacacctttgggggtggcacaggtggctttggcacaacttcaacatttggacagaatactggctttggcactactagtggaggggcatttggaacatctgcatttgtttctagcaacaatactggaggcctctttggaaattcacagactaaaccaggaggattgtttggaaccagttcatttagccagccagctacctccacaagcactggctttgggtttggtacgtcaacaggaacagcaaataccttgtttggaactgcaagcacagggaccagtctcttctcatcccaaaacaatgcctttgcacaaaataaaccaactggctttggcaattttggaaccagtactagcagtggaggactctttggaaccacaaataccacctctaatccttttggcagcacatctggctccctctttgggccaagtagttttacagctgctcctactgggactactattaaatttaaccctccaactggtacagatactatggtcaaagctggagttagcactaacataagtaccaagcaccagtgtattactgctatgaaagaatatgaaagcaagtcactagaggaacttcgtttagaggattatcaggctaacaggaagggcccacagaaccaggtgggagcaggtaccacaactggcttgtttgggtcttctccagccacttccagcgcaacaggactcttcagctcctccaccactaattcaggctttgcatatggtcagaacaaaactgcctttggaactagtacaactggatttggaacaaatccaggtggtctctttggccaacagaatcagcagactaccagcctcttcagcaaaccatttggccaggctacaaccacccagaacactggcttttcctttggtaataccagcaccataggacagccaagcaccaacaccatgggattatttggagtaacccaagcctcacagcctggaggtctttttgggacagctacaaacaccagcactgggacagcatttggaacaggaacaggtctctttgggcagaccaatactggatttggtgctgttggttcgaccctgtttggcaataacaagcttactacatttggaagcagcacaaccagtgcaccttcatttggtacaaccagtggcgggctctttggttttggcacaaataccagtgggaatagtatttttggaagtaaaccagcacctgggactcttggaactgggcttggtgcaggatttggaacagctcttggtgctggacaggcatctttgtttgggaacaaccaacctaagattggagggcctcttggtacaggagcctttggggcccctggatttaatactacgacagccactttgggctttggagccccccaggccccagtagctttgacagatccaaatgcttctgctgcccagcaggctgttctccagcagcacatcaatagtctaacatactcaccttttggagactctcctctcttccggaatccgatgtcagaccctaagaagaaggaagagagattgaaaccaacaaatccagcagcccagaaggctcttactacacctactcattataaactgacaccccgccctgccactagagtccggccaaaggctttacaaacaacaggcacagccaagtcacatctctttgatgggctggatgacgatgaaccatccctagccaatggagcattcatgcccaagaagagcattaagaagttggttttgaagaaccttaataatagcaatctcttttctcctgttaatcgtgattcagaaaatctagcttcaccatctgaatatccagaaaatggagagagatttagtttcctaagcaaacctgttgatgagaatcaccagcaggatggagatgaagattcccttgtttcacatttttatactaaccctattgccaaacctattcctcaaaccccagaaagtgctggaaataaacacagcaacagcaacagtgtggatgataccattgttgcattaaacatgcgtgctgctttgcgaaatgggctggaaggaagcagtgaagaaacgtcttttcatgatgagtcacttcaggatgaccgagaagaaatagaaaataattcttaccatatgcacccagcaggtattattctcactaaggttggttactatactattccatctatggatgaccttgctaaaattaccaatgaaaaaggagagtgcattgtctctgatttcactattggtcggaaaggttatggttcaatctattttgaaggagatgtgaatttgacaaatctaaatttggatgatattgtgcatatccggaggaaagaagtagttgtctacttagatgataaccaaaaaccacctgtgggtgaagggctaaataggaaggctgaagttacattggatggagtttggccaacagataaaacatctcgttgtttaataaagagcccagatcgccttgctgatatcaactatgaaggaagattggaagcagtttcaaggaaacagggagctcaattcaaagaataccggcctgaaactggttcttgggtgtttaaggtctcccatttttctaagtatggccttcaggattctgatgaagaggaggaggagcatccgtctaaaactagtacaaagaagttgaagactgctcctttgcctcctgcaagccagactacgcccttgcagatggctcttaatggcaaacctgcacctccacctcagagccagagcccagaggtggagcagttagggagggttgtggaactggacagtgacatggtagatatcacccaggagccagttttggataccatgttagaagagagcatgcctgaggatcaggaacctgtgtctgcctcaacacatattgcatcttcactgggaattaatccacatgtcttacagatcatgaaagcatcattgcttactgatgaagaagatgtagatatggcactggatcaacgcttcagtcgcctgccttccaaagcagatacttctcaagaaatctgttctcccagactccccatttcagcatcccactcgtcgaaaactcgttcactagttggtgggttactacaatcaaaatttacaagtggagcttttctttcaccaagtgtctctgtgcaagaatgtcgtactcccagagcagcatctttaatgaatatcccatccacatcctcttggtctgtccctccacccctgacttctgtgttcacaatgcccagcccagcccctgaggttccgttgaaaacagtgggtacacgtaggcaactaggcctagtccctcgtgaaaagtctgtcacctatggcaagggaaaactcttgatggacatggccctattcatgggacgctcatttcgtgttggttggggccccaactggactcttgctaatagtggagaacagctgaatggctctcatgaactagaaaatcatcagattgccgattccatggagtttggattcctgcccaatccagtagctgttaaacccctaactgagtccccattcaaagttcacttagaaaaactcagtttgagacaaagaaagccagatgaagacatgaaattatatcagacacctctggagctcaaattaaaacacagcactgtccatgtggatgaactgtgtcctctcattgtccccaatctgggagttgctgtcattcatgactatgcagattgggttaaagaagcatcaggagacttaccagaagcacaaattgtgaagcactggagcctgacatggacactatgtgaagccctatggggccacctgaaggagcttgacagccagctaaatgaaccccgtgaatacattcaaattctggagcgaagaagagctttctcccgctggctatcctgtactgccacacctcagattgaagaggaagtctccttaacccaaaaaaacagccctgtggaggctgtattcagctacctcacaggcaaaaggatcagtgaggcctgctctctggcccagcagtcaggggatcatcgtcttgctcttcttttatctcagtttgtgggtagccagtcagtccgggagctgctcaccatgcagttggtggactggcatcagctccaagcagactccttcatccaggatgagagactgcgcatctttgctctgttggctggaaaaccggtgtggcagctctcagaaaagaagcaaataaacgtgtgctcccagttggattggaaacgctccctggctatccatctttggtatttgcttccaccaacagcctccatttttagggcgctcagcatgtatgaagaagcatttcagaatacctctgacagtgacagatatgcctgctccccacttccttcgtatctggagggttctggctgtgtgatagcggaggagcaaaactcacagacaccacttcgagatgtctgctttcaccttctaaaactctacagtgacagcatacgtgagaaggctgttcgagagctgcttacccggcactgccagctgttggagacccctgaatcttgggctaaagagactttccttacccagaagctccgtgtacctgccaaatggatccacgaggccaaagctgtgcgagcacacatggaatctgacaagcacttagaggccctttgcttatttaaggctgagcactggaaccgctgccacaagctcatcatccgacacttagcttctgatgccatcattaatgagaactatgactacctgaaggggttcttggaagacctggcacctccagagcgcagcagcctaattcaggattgggaaacatctgggcttgtttacctggactatattagagtcattgaaatgctccgccatatacagcagnnnnnnnnnnnnnnnnnnnnnnnnnnnnnnnnngtaatgacctggagcagttacacatcaaagtgacttcactgtgcagtcggatagagcagattcagtgttacagtgctaaagatcgcctggctcagtcagacatggccaaacgtgtagccaacctgctgcgcgtggtgctgagtctgcatcatcctcctgatagaacctccgactcaacaccagaccctcagcgagtccctttgcgcctcttggctccccacattggccggcttcccatgcctgaggactatgccatggacgaactgcgcagccttacccagtcctatctgcgagaactggctgttgggagcctgtgagccccaggcactttgcatcacagtcacatgcccattcacaccacacagaggttccctgccttgtttggattggcactgtttgccattctctgggttggctgtggcatctaccctccctccctgctgccagaagcagcatcctccacttgttcagggcttttcttaatactgaacgtagcataagggcttctggaacccagaagaggagacagtttaccatcctcaagatcattcagtgtttttcctttaaaaaaatggtcaataaagctcctttggcagaatccccc

SEQ ID NO: 4925 - DNA, 1058 bp, Homo sapiens
  misc_feature (172)..(172): n is a, c, g, or t
ggcggctgaggcggcggccgaggagcggcggactcggggcgcggggagtcgaggcatttgcgcctgtgcttcggaccgtagcgccagggcctgagcctttgaagcaggaggaggggagggaaaaagtgggcttcgtctatcggggccccctccccatgtggatctgcacagncggcggcggaggagccggcgaccaagaagatgcccgccctgcgccgctctgctgtgggcgctgctggcgctctggctgtgctgcgcgaccgccgcgcatgtgtcgagatggctatgaaccctgtgtaaatgaaggaatgtgtgttacctaccacaatggcacaggatactgcaaatgtccagaaggcttcttgggggaatattgtcaacatcgagacccctgtgagaagaaccgctgccagaatggtgggacttgtgtggcccaggccatgctggggaaagccacgtgccgatgtgcctcagggtttacaggagaggactgccagtactcgacatctcatccatgctttgtgtctcgaccttgcctgaatggcggcacatgccatatgctcagccgggatacctatgagtgcacctgtcaagtcgggtttacaggtaaggagtgccaatggaccgatgcctgcctgtctcatccctgtgcaaatggaagtacctgtaccactgtggccaaccagttctcctgcaaatgcctcacaggcttcacagggcagaagtgtgagactgatgtcaatgagtgtgacattccaggacactgccagcatggtggcacctgcctcaacctgcctggttcctaccagtgccagtgccttcagggcttcacaggccagtactgtgacagcctgtatgtgccctgtgcaccctcgccttgtgtcaatggaggcacctgtcggcagactggtgacttcacttttgagtgcaactgccttccagtgagaagaggaacagagctctgggaaagagacagggaagtctggaatggaaaagaacacgatgagaattagacactggaaaatatgtatgtgtggttaataaagtgctttaaactg

SEQ ID NO: 4926 - DNA, 2152 bp, Homo sapiens
ctcggatctaggagctactcgcccggccctgggcggtgggaggcggcggcggcggcggcgctcgcgcacctcggaggagccaggagccggaaccagggccgagcccgcgggccggggctagccagccggtcggagatgtccgcccagaggttaatttctaacagaacctcccagcaatcggcatctaattctgattacacctgggaatatgaatattatgagattggaccagtttcctttgaaggactgaaggctcataaatattccattgtgattggattttgggttggtcttgcagtcttcgtgatttttatgttttttgtgctgaccttgctgaccaagacaggagccccacaccaagacaatgcagagtcctcagagaagagattcagaatgaacagctttgtgtcagactttggaagacctctggagccagataaagtattttctcgccaaggcaacgaggagtccaggtctctctttcactgctacatcaatgaggtggaacgcttggacagagccaaagcttgtcaccagaccacagcccttgacagtgacgtccaactccaggaagccatcagaagcagtgggcagccagaggaggagctgaacaggctcatgaagtttgacatccccaactttgtgaacacagaccagaactactttggggaggatgatcttctgatttctgaaccacctattgttctggaaactaagccactttcccagacctcacacaaagacctggattgagaaacatgctctgtaaagggtcttcctgaagatgtggattctatctttatgtagcaagaaatctacatccaccaaaattgtgtgtgtttgggggagagagagacatagagatagagacagagaggcagagaagagacccctttagaagagagctgagctgattaagctgagtggttttttgttttgttttgtttttgctttttaatacatttggagctttgggagtattaaagtatttacaccaagcttgtccaacccgtggcatgtgtcccaggacagctttgaatgtggcccaatacaaattttaaactttattaaaacatgagttttgtttttttttttgctattttttttaaagctcgtcagctatcgttagtgttagtgtactttatgtgtggcccaagacaactcttcttccagtgtggcacagggaagctaaaagattggacacctctgatttatactagctcgttttgcttgttgaaaaatttggccaaatacctattgtcagcattcttgggtgaggattagcctaccatgttctaatctggccctgccactactatgctctacctttggtgagttgctttacctctctgggctgccccatttttaactgtaggttgacaggtctagagtgatccatcccacctctaatattttgtgaatttatgactttgccttcagatgaggctgagctatacataaaacagtataaactagggtactgcctcgtatctcttgtaggctctctcaaatctctgtaccttccacttaaccctaattgagccaagctttagtcaggggatctggttgtctaccagaatgtcaggagactcatcttacacagtcatggtggccaatgtttctggtgggttgtgctgaaacagctcttctgagaacttccaaccacccatgctctaacctggagacagccatcccctgcctcagaataagtaccaattcgtagtacatgtatggtactcttgtccccaagaaatgttaggaagcttgtcagctgaatgagaggaggtgccttctgggtatctctgtgttggtgtatctgtgccattggctacagaacaagaaaaatactatttgccatgctattaccttggcagatgtgtaggtgatagtcatctggctttgagctgagatggtcagtgggttgtaaattccccactagcagatattcagggtggcctgagttatgtaaacaagtgagcaacacagctttaatttcatggaggaatcaaagctgcacactggtattaaaacaacttgattttgcgcacacagttgcatgcatggcaagctgttaacctctgggtggcattttcattatgaatttgttcaccacctgtcttgcttaagctacaaaataaatgcatttgactgc

SEQ ID NO: 4927 - DNA, 2223 bp, Homo sapiens
atgagcagatgaggcctagccgaggcggcgggacccccaagtttggaaagctcttttaacgagctgaggcttcgaagacctcagaggacttctctcagcactcacagaaacctcctacaccctcggatggcacaaagggactgttttcttactcttagtctgagtgactgccaaggaaggcaaaggtagagcaactggatctctggctctccacatagcttctgatctcagaccttactaaaatgctttctgggcccaaggacaaagctcacatgaacaaatgattttgagtcatgaatgaaaaatcttgctctttccatagtaaagaagaattaagagatggacagggtgaaagattgtctgctggatattctccatcatatgacaaggacaagagtgttctggctttcagaggaatccctatctcagagttgaagaaccatggcattctccaggctctgaccacagaagcttatgaatgggagccacgtgttgtgagtacagaggtggtcagagcccaagaagaatgggaagctgtggacaccatccagccagagacagggagccaagctagctcagagcagcctgggcagctaatctccttcagtgaggccctgcagcacttccagactgtggacctttcccccttcaagaaaagaatccagccaactattcgaaggactgggctcgccgccctccgacactacctcttcgggcctccaaagctccaccagcgccttcgggaagaaagggacttggtcctgaccattgctcagtgtggcctggatagccaagacccagtgcatggccgagtcctccagaccatctataagaagctgaccggctccaagtttgactgtgcccttcatggaaaccactgggaggacctgggctttcagggagcgaatccagccacagacctgagaggcgcaggcttccttgccctcctgcatctgctctacctggtgatggactcaaagaccttgccgatggcgcaggagattttccgcctgtctcgtcaccacatccagcaattccctttctgtttgatgtccgtgaacatcacccacattgccatccaggccttgagagaggagtgtctctccagagagtgtaatcggcagcagaaggtcatccccgtggtgaacagcttctatgccgccacattcctccacctcgcacatgtctggaggacacagcggaagaccatctcagactcgggctttgtcctcaaagagttggaagtattggccaagaagagcccacggcggctgctcaagaccctggagctgtacttggccagggtgtcaaagggacaggcctccttgttgggagcacagaagtgctatgggccagaagcccctcccttcaaggatctcaccttcacaggtgagagtgacctgcagtctcactcatccgaaggcgtatggctgatctgacctccgagatgaatggaggcttaaaggctgagctgcaggggctttcagggggtcagtggagccatgtcaggagcctggccaggccgcaccccttgctgtctcagcagatgggatataggaagctcctgggcttagctgtgggaagccaagtaccctcaccggcatgggacatgaggggcagctagacttcacccccttcccgcagacctgcctccagagcaaggagaattctgccttaatctgttgggctccagtctccgggttgaattccagtgtatcccactgggagtgaatggatcatgaggtgggatggccccatctggatgttctgcagatccccacatgggaggagattcccaagtagaggcagccagaattctgactccctggcagcagcagggctttcaggcaccagtgtctgtgttgttagaactcagaggaagaggcaggggcagcagccgacagggggcagcatgacccaagcaaggggcctgaggcctcagtgggggtagggcaaggaggtacctcacaggtgggtgtgaggccccctctggagtttctggccattcacttacccactctcttctccccctgacccccgctccattgtttatgatggaaaaacggacatttggctaggtgtctctcacggctgctccatcctagcccccacaagctggggcttcctcctgtagatgctgtgcatgccccatgatgagtttctggcctaattgagggaaggaggaaattcataccagcagttttcaaataaaagaattgttct

SEQ ID NO: 4928 - DNA, 798 bp, Homo sapiens
atggaggatatgaacgagtacagcaatatagaggaattcgcagagggatccaagatcaacgcgagcaagaatcagcaggatgacggtaaaatgtttattggaggcttgagctgggatacaagcaaaaaagatctgacagagtacttgtctcgatttggggaagttgtagactgcacaattaaaacagatccagtcactgggagatcaagaggatttggatttgtgcttttcaaagatgctgctagtgttgataaggttttggaactgaaagaacacaaactggatggcaaattgatagatcccaaaagggccaaagctttaaaagggaaagaacctcccaaaaaggtttttgtgggtggattgagcccggatacttctgaagaacaaattaaagaatattttggagcctttggagagattgaaaatattgaacttcccatggatacaaaaacaaatgaaagaagaggattttgttttatcacatatactgatgaagagccagtaaaaaaattgttagaaagcagataccatcaaattggttctgggaagtgtgaaatcaaagttgcacaacccaaagaggtatataggcagcaacagcaacaacaaaaaggtggaagaggtgctgcagctggtggacgaggtggtacgaggggtcgtggccgaggccaacagagcacttatggcaaggcatctcgagggggtggcaatcaccaaaacaattaccagccatactaaaggagaacattggagaaaacaggaggagatgttaaagtaacccatcttgcaggacgacattga

SEQ ID NO: 4929 - DNA, 841 bp, Homo sapiens
ctgaagctagtgagtcgcggcgccgcgcactggtggttgggtcagtgccgcgcgccgatcggtcgttaccgcgaggcgctggtggccttcaggctggacggcgcgggtcagccctggttcgccggcttctgggtctttgaacagccgcgatgtcgatcttcacccccaccaaccagatccgcctaaccaatgtggccgtggtacggatgaagcgtgccgggaagcgcttcgaaatcgcctgctacaaaaacaaggtcgtcggctggcggagcggcgtggaaaaagacctcgatgaagttctgcagacccactcagtgtttgtaaatgtttctaaaggtcaggttgccaaaaaggaagatctcatcagtgcgtttggaacagatgaccaaactgaaatctattttgactaaaggagaagttcaagtatcagataaagaaagacacacacaactggagcagatgtttagggacattgcaactattgtggcagacaaatgtgtgaatcctgaaacaaagagaccatacaccgtgatccttattgagagagccatgaaggacatccactattcggtgaaaaccaacaagagtacaaaacagcaggctttggaagtgataaagcagttaaaagagaaaatgaagatagaacgtgctcacatgaggcttcggttcatccttccagtcaatgaaggcaagaagctgaaagaaaagctcaagccactgatcaaggtcatagaaagtgaagattatggccaacagttagaaatcgtaagagtcaaatattttctttgcttcatgttacctaaatattgtattctctagtaataaatttgtagcaaacatt

SEQ ID NO: 4930 - DNA, 2491 bp, Homo sapiens
tttgggttagggagagtgctttcgtttgttttaaatgggagaaactggagcatgttgccaagggcagagagccagcagagaggggtgaatggaagaaggagcgagaagggggttactgacgaagccttatcctggaggagagaaggatggactccagagcccagctttggggactggccttgaataaaaggagggccactctacctcatcctggagggagcacgaacctaaaggcagacccagaagagctttttacaaaactagagaaaattgggaagggctcctttggagaggtgttcaaaggcattgacaatcggactcagaaagtggttgccataaagatcattgatctggaagaagctgaagatgagatagaggacattcaacaagaaatcacagtgctgagtcagtgtgacagtccatatgtaaccaaatattatggatcctatctgaaggatacaaaattatggataataatggaatatcttggtggaggctccgcactagatctattagaacctggcccattagatgaaacccagatcgctactatattaagagaaatactgaaaggactcgattatctccattcggagaagaaaatccacagagacattaaagcggccaacgtcctgctgtctgagcatggcgaggtgaagctggcggactttggcgtggctggccagctgacagacacccagatcaaaaggaacaccttcgtgggcaccccattctggatggcacccgaggtcatcaaacagtcggcctatgactcgaaggcagacatctggtccctgggcataacagctattgaacttgcaagaggggaaccacctcattccgagctgcaccccatgaaagttttattcctcattccaaagaacaacccaccgacgttggaaggaaactacagtaaacccctcaaggagtttgtggaggcctgtttgaataaggagccgagctttagacccactgctaaggagttattgaagcacaagtttatactacgcaatgcaaagaaaacttcctacttgaccgagctcatcgacaggtacaagagatggaaggccgagcagagccatgacgactcgagctccgaggattccgacgcggaaacagatggccaagcctcggggggcagtgattctggggactggatcttcacaatccgagaaaaagatcccaagaatctcgagaatggagctcttcagccatcggacttggacagaaataagatgaaagacatcccgaagaggcctttctctcagtgtttatctacaattatttctcctctgtttgcagagttgaaggagaagagccaggcgtgcggagggaacttggggtccattgaagagctgcgaggggccatctacctagcggaggaggcgtgccctggcatctccgacaccatggtggcccagctcgtgcagcggctccagagatactctctaagtggtggaggaacttcatcccactgaaattcctttggcatttggggttttgtttttccttttttccttcttcatcctcctccttttttaaaagtcaacgagagccttcgctgactccaccgaagaggtgcgccactgggagccaccccagcgccaggcgcccgtccagggacacacacagtcttcactgtgctgcagccagatgaagtctctcagatgggtggggagggtcagctccttccagcgatcattttattttattttattacttttgtttttaattttaaccatagtgcacatattccaggaaagtgtctttaaaaacaaaaacaaaccctgaaatgtatatttgggattatgataaggcaactaaagacatgaaacctcaggtatcctgctttaagttgataactccctctgggagctggagaatcgctctggtggatgggtgtacagatttgtatataatgtcatttttacggaaaccctttcggcgtgcataaggaatcactgtgtacaaactggccaagtgcttctgtagataacgtcagtggagtaaatattcgacaggccataacttgagtctattgccttgcctttattacatgtacattttgaattctgtgaccagtgatttgggttttattttgtatttgcagggtttgtcattaataattaatgcccctctcttacagaacactcctatttgtacctcaacaaatgcaaattttccccgtttgccctacgccccttttggtacacctagaggttgatttcctttttcatcgatggtactatttcttagtgttttaaattggaacatatcttgcctcatgaagctttaaattataattttcagtttctccccatgaagcgctctcgtctgacatttgtttggaatcgtgccactgctggtctgcgccagatgtaccgtcctttccaatacgattttctgttgcaccttgtagtggattctgcatatcatctttcccacctaaaaatgtctgaatgcttacacaaataaattttataacacgctt

SEQ ID NO: 4931 - DNA, 1565 bp, Homo sapiens
gatacaaaattatggataataatggaatatcttggtggaggctccgcactagatctattagaacctggcccattagatgaaacccagatcgctactatattaagagaaatactgaaaggactcgattatctccattcggagaagaaaatccacagagacattaaagcggccaacgtcctgctgtctgagcatggcgaggtgaagctggcggactttggcgtggctggccagctgacagacacccagatcaaaaggaacaccttcgtgggcaccccattctggatggcacccgaggtcatcaaacagtcggcctatgactcgaaggcagacatctggtccctgggcataacagctattgaacttgcaagaggggaaccacctcattccgagctgcaccccatgaaagttttattcctcattccaaagaacaacccaccgacgttggaaggaaactacagtaaacccctcaaggagtttgtggaggcctgtttgaataaggagccgagctttagacccactgctaaggagttattgaagcacaagtttatactacgcaatgcaaagaaaacttcctacttgaccgagctcatcgacaggtacaagagatggaaggccgagcagagccatgacgactcgagctccgaggattccgacgcggaaacagatggccaagcctcggggggcagtgattctggggactggatcttcacaatccgagaaaaagatcccaagaatctcgagaatggagctcttcagccatcggacttggacagaaataagatgaaagacatcccgaagaggcctttctctcagtgtttatctacaattatttctcctctgtttgcagagttgaaggagaagagccaggcgtgcggagggaacttggggtccattgaagagctgcgaggggccatctacctagcggaggaggcgtgccctggcatctccgacaccatggtggcccagctcgtgcagcggctccagaggagtatccatgggaaccaagcccctcctgactgccatctggcacaagtgcaggcgtttggaggcagtggatgtgtgctgggaagccgctctgtgtgacctgagggtgatttgtcactgggctgtcctccacacccccaggaggaccaggcgtgctgctgccttgacagttcatcttcaggtgtccaggctgacacctcccaaagctggctgagactctgtgatcatgagggggatttctgggtctttcctgagactgcgtcccacctgacagtacataaagaagttttgcacacgtgaggtcccttttgctatttggaagtgattgaaggggctgcctactgtcctgtgaagagcccctctacgtggggacagcaggagaaaaccacagttctgatacttcacgtttatgcttctgaactcgggtttcttagtaagacatttcaactttttaagttgctagaaaataaaaatgatctacttggctgccttcaattttgaggcaattgaaggacgatccctccctcctttgatactaaaaacaatataggaataaaggaaaatagaattaaaaagtcacc

SEQ ID NO: 4932 - DNA, 1053 bp, Homo sapiens
agaggttctgtccggaagcagattctaaaaccatgttgcagtgcttgaagcaaaataaaaacagtgaattgatggatcccaaatgcaaacagatgataaccaagcgccagatcacccagaacacagattaccgcttaaaccccatgttaagaaaagcctgtaaagctgacattcctaaattctgtcacggtatcctgactaaggccaaggatgattcagaattagaaggacaagtcatctcttgcctgaagctgagatatgctgaccagcgcctgtcttcagactgtgaagaccagatccgaatcattatccaggagtccgccctggactaccgcctggatcctcagctccagctgcactgctcagacgagatctccagtctatgtgctgaagaagcagcagcccaagagcagacaggtcaggtggaggagtgcctcaaggtcaacctgctcaagatcaaaacagaattgtgtaaaaaggaagtgctaaacatgctgaaggaaagcaaagcagacatctttgttgacccggtacttcatactgcttgtgccctggacattaaacaccactgcgcagccatcacccctggccgcgggcgtcaaatgtcctgtctcatggaagcactggaggataagcgggtgaggttacagcccgagtgcaaaaagcgcctcaatgaccggattgagatgtggagttacgcagcaaaggtggccccagcagatggcttctctgatcttgccatgcaagtaatgacgtctccatctaagaactacattctctctgtgatcagtgggagcatctgtatattgttcctgattggcctgatgtgtggacggatcaccaagcgagtgacacgagagctcaaggacaggctacaatacaggtcagagacaatggcttataaaggtttagtgtggtctcaggatgtgacaggcagtccagcctgacctttctgcacactccagacaaacttcccagacaagctcctttgtgcctctacgtggagagggtgtggaaagttatcacattaaaagatggaggatttgctctgtt

SEQ ID NO: 4933 - DNA, 1735 bp, Homo sapiens
ttttgcatgcacttttcaaaatgattgacttaagcttcctgactgaagaggaacaagaggccatcatgaaggttttgcagcgggatgctgctctgaagagggccgaagaagagagagtcagacatttgcctgaaaaaattaaggatgaccagcagctgaagaatatgagtggccaatggttttatgaagccaaggcaaaaaggcacagggacaaaatccatggcgcagatatcatcagagcatctatgagaaagaagaggccccagatagcagctgagcagagtaaagacagagaaaatggggcaaaggaaagctgggtgaataatgtcaacaaagatgctttccttcctccagagctggctggcgttgtagaagagccagaagaagatgcagcaccagcaagcccgagttccagtgtggtaaatccagcttccagtgtgattgatatgtcccaggaaaacacaaggaaaccaaatgtgtctccagagaagaggaagaatccgtttaatagctccaagttgccagaaggtcactcatcacaacaaactaaaaatgaacagtcaaaaaatggaagaactggtttatttcagacttcaaaagaggatgaattgtcagagtcaaaagaaaagtcaactgtcgcagatacttcaatccaaaagttagagaaatcaaagcagactttgccaggcctttcaaatgggtcccaaatcaaggctccaatccccaaagccaggaagatgatctacaaatcaactgatttaaacaaagatgataaccagtcttttcctagacaaaggacagactccctgaaagcgagaggggctccgagagggatcctcaagcgcaactccagttccagtagcacagactcagaaacccttcgttataatcacaactttgaacccaaaagcaaaattgtgtcacctggcctaaccatccatgagagaatttctgagaaggagcattctttagaagacaactcttccccaaactccctggagccattaaagcatgtgagattctctgcagtgaaggatgagcttccacagagtcctgggctaatccatggtcgggaagtaggagaatttagtgttttagaatctgacagattgaaaaatggaatggaagatgcaggggacacagaagagtttcagagtgaccctaagccttctcaatacagaaagccttcgctttttcatcaatcaacctcaagcccatatgtatcaaaaagtgaaacacatcagccaatgacttctggttcttttccaattaatgggctgcattctcattcagaagttttaactgcaagaccacagtctatggagaattcaccaaccatcaatgaacccaaagataaatcatcagaattaacaaggcttgaatctgtattacccagaagccctgctggtaagagagttgtcactactagattataaaaacttggtggggccgggcgcggtggctcacgcctgtaatcccagcactttgggaggccgaggcgggtggatcatgaggtcaggagatcgagaccatcctggctaacaaggtgaaaccccgtctctactaaaaatacaaaaaattagccgggcgcggtggcgggcgcctgtagtcccagctactcgggaggctgaggcaggagaatggcgtgaacccgggaagcggagcttgcagtgagccgagattgcgccactgcagtccgcagtccggcctgggcgacagagcgagactccgtctc

SEQ ID NO: 4934 - DNA, 1048 bp, Homo sapiens
cctccaccaggcggtgtgaagatgcctaatgtacccaatacacaaccagcaataatgaaaccaacagaggaacatccagcttatacacagattgcaaaggaacatgcattggcccaagctgaacttcttaagcgccaggaagaactagaaagaaaagccgcagaattagatcgtcgggaacgagaaatgcaaaacctcagtcaacatggtagaaaaaataattggccacctcttcctagcaattttcctgtcggaccttgtttctatcaggatttttctgtagacattcctgtagaattccaaaagacagtaaagcttatgtactacttgtggatgtgagtgacagttcatttagattctttgtattcttcttcgtctatatttgtcagtttgctgtacatgtactccaagctgcaggatttcataactggggcattgtggttggatttcatcccttactggtctcaaccaaaatattcctgttggaatcatgatgataatcatagcagcacttttcacagcatcagcagtcatctcactagttatgttcaaaaaagtacatggactatatcgcacaacaggtgctagttttgagaaggcccaacaggagtttgcaacaggtgtgatgtccaacaaaactgtccagaccgcagctgcaaatgcagcttcaactgcagcatctagtgcagctcagaatgctttcaagggtaaccagatttaagaatcttcaaacaatacactgttaccttttgactgtacctttttctccagttactgtattctacaaatatttttatgttcaaaacacacagtacagacagcatggatatttcctgttcacttgtgcatgggctaaaaccaggaaaacttccttgtcttattactttacctaatagtttcttaatatttcagtgccccttgcagaaaaaatattacatgctaaataaatattctccatatttttgggggatgacattcagtgaattatttcagtggtgacccactgaaaattaataatggtacttatgattaaaaacgcatttaatac

SEQ ID NO: 4935 - DNA, 2779 bp, Homo sapiens
ccgcgagccgcccggcactcccgcagtccagccggctcctctagcccggccacggctccgctgcgggccacccaggattactcgcgtctggctccaggcgccgagaaggcgcgctgggcgcccgtggccgccgcgccagctcctcctcctcccgctgctcctgctcccggggcgagcgcgcagccccgagcccgccccgcgcctcccggagccctcccccccgctgctcccatgcgcgcgggtgggtcatgagcacagcgccctcgctttctgccctaagaagcagtaagcacagcggcggcggcggcggcggaggcggaggcggcggtgcagaccctgcctggaccagcgcgctctctggaaatagctccggccccggcccaggctcgtccccggccggcagcaccaagccttttgtgcacgccgtgcccccctctgaccccctgcgccaggccaaccgcctgccaatcaaggtgctgaagatgctgacggcacgaactggccacattttgcaccccgagtacctgcagcccctgccttccacgccggtcagccccatcgagctcgatgccaagaagagcccgctggcgctgttggcgcaaacatgttcgcagatcgggaagcccgacccctcgccctcctccaaactctcctcggttgcctccaacgggggcggcgcgggcggtgccggcggcggtgctgcgggcgacaaggacaccaaatcgggccccctgaagctgagcgacatcggcgtggaggacaagtcgagtttcaagccgtactccaaacccggctcggataagaaggagccgggaggcggcggtggaggcggtggcggtggcgggggcggcggcgggggtgtttcgtcggagaagtcgggattccgggtaccgagcgccacctgccagccattcacgcccaggacaggcagcccgagctccagcgcctcggcatgctcgcagagaggtatgctgtcctcggccgggggtgccccggagggcaagtacgacaagaaagacactgtcgtgggcggcggtggcaagggcaccgggggcgcctcggccgaagggggacccacggggctggcacacggccggattagctgcggcggcgggattaatgtggatgtgaaccagcatccggatgggggcccgggaggcaaggctctgggctcggactgcggcggttcatcgggctccagctccggctccggccccagcgcgcccacctcctcctcagtgttgggctctgggctggtggctcccgtgtcaccctacaagccgggccagacagtgttccctctgcctcccgcgggtatgacctacccaggcagcctggccggggcctacgccggctacccgccccagttcctgccacacggcgtggcacttgaccccaccaagccgggcagcctggtgggggcgcagctggcggcggccgcggccgggtctctgggctgcagtaagccggccggctccagccctttggccggagcgtctccgccgtccgtgatgacagccagtttgtgccgggacccttactgcctcagctaccactgcgctagccacctggcaggggcggcggccgccagcgcttcttgcgcacatgatccggctgctgcggctgcggcgctgaagtccggatacccgctggtgtaccccacgcacccgctgcacggtgtgcactcctcgctaacggccgccgcggctgctggcgccacaccgccctccctggccggccaccccctctacccctacggctttatgctccctaacgacccactcccccacatctgcaactgggtgtcggccaacgggccgtgcgacaagcgcttcgccacgtccgaagagctgctgagccacttgcggacccatacggcatttcccgggacagacaaactgctgtcgggctaccccagctcgtcgtctctggccagcgctgccgcggccgccatggcttgccacatgcacatccccacctcgggcgcaccgggcagccctgggacgctggcgctgcgcagcccccaccacgcgctgggactcagcagccgctaccacccctactccaagagcccgcttcccacgcctggcgcccccgtgccggtgcccgccgccaccggaccgtactactccccctacgccctctacggacagagactgaccaccgcctcggcgctggggtatcagtgagggcggccgggagggcgagcgagggagaggagggagagggggaggggaggagtccagggagaggcgggatcacggcccaggctgctgacacccgcgcgtggggaggactcgggccacgaaaggaaagaaatgtataccgtatctatctacccgacagcagcgaccgagacccggtgggacactccccttctccccactttcacctccccacccaaactttataaaagttgaaaaaatatcatttgactttttatagaaaaaaaaaggaaaaaataattgagaaagtgttcatctgaggactgcatcggtggacactggtatttatttatgttagctccaagcggaccggtggttcaaaagtgcattatttagtttgagctctgtaggtaaaaaggaggtgggaaaaattttaaaacttgagggtaaaaatgtggaaaacaaaccctcccatcccttgtagattataaataaaagcaaaaccgccacagaactagaggtcttctctttaatgttactttaaaattgctatgattgtattgtacgttatttaatgtctgattgaaacacaaatttacatgcatgtttgttac

SEQ ID NO: 4936 - DNA, 641 bp, Homo sapiens
ggaaaatcaggccatgtttgtgtccacaaacaagagtgaagataatctctcctatctgagaaatccaggagtggaggaatccaatgggaactctggccaagactctactacccagacaccaaaagaagaaatgattaaccctggaggctgccttggtctaggtgaaaaaatatatgtacgatgacagtgcaatcatactagaactcaggattaagaaactcactcaaaactgctcaactacatggaaactgaacaacctgctcctgaatgactactgggtacataacgaaatgaaggcagaagtaaagatgttctttgaaaccaacgagaacaaagacacaacataccagaatctctgggacacattcaaagcagtgtgtagagggaaatttatagcactaaatgcccacaagagaaagcaggaaagatctaaaattgacaccctaacatcacaattaaaagaactagagaagcaagaggaaacacattcaaaagctagcagaaggcaagaaataactaaaatcagagcagaactgaaggaaatagagacacacaagaacccttcaaaaaatcaatgaatccaggggctggttttttgaaaagatcaataaaattgatagaccgctagcaagattaataaa

SEQ ID NO: 4937 - DNA, 1181 bp, Homo sapiens
ggggcccacagccatggcggagcctgtgcaggaggagctctcggtcctggccgcgattttctgcaggccccacgagtgggaggtgctgagccgctcagagacagatgggaccgtgttcagaattcacacaaaagctgaaggatttatggatgcggatatacctctggaattggtgttccatttgccagtcaattatccttcatgtctacctggtatctcgattaactctgaacagttgaccagggcccagtgtgtgactgtgaaagagaatttacttgagcaagcagagagccttttgtcggagcctatggttcatgagctggttctctggattcagcagaatctcaggcatatcctcagccaaccagaaactggcagtggcagtgaaaagtgtactttttcaacaagcacgaccatggatgatggattgtggataactcttttgcatttagatcacatgagagcaaagactaaatatgtcaaaattgtggagaagtgggcttcagatttaaggctgacaggaagactgatgttcatgggtaaaataatactgattttactacagggagacagaaacaacctcaaggtgccaaaaagttaaatgagtacttgattcttcagaaaacctccaaagtagatgtggactcaagtggaaagaaatgcaaagagaaaatgattagtgtactgtttgaaacaaaagtacagacagaacacaaaaggtttctggcatttgaagtcaaagagtattcagcgttggatgaattacaaaaggaatttgaaactgcaggacttaagaagcttttctccgaatttgtacttgctctggtaaaatgaaatggaagacaggaatcttttagtaaaatagaagtgttttttgttgtttttgcattggatttggggagtggttaattgaaatagtcaattttaaagtttctctgaagcaaaatgataggcatcattctaacttcaggaacaaaagccagttctgttttatgaaatattaaacatgaagaaaacttgtatattctaatgtttgccaggaaaggctaggttcagtagatgagacattatttaaaagataaatttaaaaagatggtaaatgaacacttgtttttatagacaatatttgtttgaaactatgtaattttctggctaattttcttgtaattaaatgatttttt

SEQ ID NO: 4938 - DNA, 1213 bp, Homo sapiens
gcgactgcgggccagctcttcccctactccctctcggctccttgtggcccaaaggcctaaccggggtccggcggtctggcctagggatcttccccgttgcccctttggggcgggatggctgcggaagaagaagacgaggtggagtgggtagtggagagcatcgcggggttcctgcgaggcccagactggtccatccccatcttggactttgtggaacagaaatgtgaagtttttgatgatgaagaagaaagcaaattgacctatacagagattcatcaggaatacaaagaactagttgaaaagctgttagaaggttacctcaaagaaattggaattaatgaagatcaatttcaagaagcatgcacttctcctcttgcaaagacccatacatcacaggccattttgcaacctgtgttggcagcagaagattttactatctttaaagcaatgatggtccagaaaaacattgaaatgcagctgcaagccattcgaataattcaagagagaaatggtgtattacctgactgcttaaccgatggctctgatgtggtcagtgaccttgaacacgaagagatgaaaatcctgagggaagttcttagaaaatcaaaagaggaatatgaccaggaagaagaaaggaagaggaaaaaacagttatcagaggctaaaacagaagagcccacagtgcattccagtgaagctgcaataatgaataattcccaaggggatggtgaacattttgcacacccaccctcagaagttaaaatgcattttgctaatcagtcaatagaacctttgggaagaaaagtggaaaggtctgaaacttcctccctcccacaaaaagacctgaagattcctggcttagagcatgcgagcattgaaggaccaatagcaaacttatcagtacttggaacagaagaacttcggcaacgagaacactatctcaagcagaagagagataagttgatgtccatgagaaaggatatgaggactaaacagatacaaaatatggagcagaaaggaaaacccactggggaggtagaggaaatgacagagaaaccagaaatgacagcagaggagaagcaaacattactaaagaggagattgcttgcagagaaactcaaagaagaagttattaataagtaataattaagaacaatttaacaaaatggaagttcaaattgtcttaaaaataaattatttagtccttacactg

SEQ ID NO: 4939 - DNA, 853 bp, Homo sapiens
gcttcgggttggtgtcatggcagctgcggggagccgcaagaggcgcctggcggagctgacggtggacgagttcctagcttcgggctttgactccgagtccgaatccgagtccgaaaattctccacaagcggagacacgggaagcacgcgaggctgcccggagtccggataagccgggcgggagcccctcggccaggttagtggggacatgcgtgagcagaacctcttgctcgtcctgtcccaccccggttgggttgctgacctcgcctggggtctcagggccaaggcctaaggatcgccgacctctgccccccagtcctttcagcttaacttactctttcatccgatgtttactgagctcctgttccgtgccaaactctgtcctaggcagggagcgtatgttggtgagttgtgcaaaaatctcttcccgatctaggagaactctcacgttcttgggtgaaatcaccgcctgcagttcggtagaagagagataagtgctggggagggaaaggaaggacagaggggctgaagagagagttgcaggggagccgagttgctctgttagaaggagcggaggctgtgctcggtggctcacgcctgtaatgccagcactttgggaggccgaggcgggcagattacctgaggtcaggaattcgagaccagcctgaccaacacggaaaaatcatgtctctactaaaaatataaaaattagccgggcgtggtgggcacctgtaatcccaactactcgggaggctgaggcaggagaatcgcttgaacttgggaggcggaggttgcagtgagccgagatggcaccattgcattccagcctgggtgagagagtgagactccatctc

SEQ ID NO: 4940 - DNA, 7321 bp, Homo sapiens
ccaggcgtctgggtcctgctggtcttcgcctttcttctccgcttctaccccgtcggccgctgccactggggtccctggccccaccgacatggcggcggtgttgcagcaagtcctggagcgcacggagctgaacaagctgcccaagtctgtccagaacaaacttgaaaagttccttgctgatcagcaatccgagatcgatggcctgaaggggcggcatgagaaatttaaggtggagagcgaacaacagtattttgaaatagaaaagaggttgtcccacagtcaggagagacttgtgaatgaaacccgagagtgtcaaagcttgcggcttgagctagagaaactcaacaatcaactgaaggcactaactgagaaaaacaaagaacttgaaattgctcaggatcgcaatattgccattcagagccaatttacaagaacaaaggaagaattagaagctgagaaaagagacttaattagaaccaatgagagactatctcaagaacttgaatacttaacagaggatgttaaacgtctgaatgaaaaacttaaagaaagcaatacaacaaagggtgaacttcagttaaaattggatgaacttcaagcttctgatgtttctgttaagtatcgagaaaaacgcttggagcaagaaaaggaattgctacatagtcagaatacatggctgaatacagagttgaaaaccaaaactgatgaacttctggctcttggaagagaaaaagggaatgagattctagagcttaaatgtaatcttgaaaataaaaaagaagaggtttctagactggaagaacaaatgaatggcttaaaaacatcaaatgaacatcttcaaaagcatgtggaggatctgttgaccaaattaaaagaggccaaggaacaacaggccagtatggaagagaaattccacaatgaattaaatgcccacataaaactttctaatttgtacaagagtgccgctgatgactcagaagcaaagagcaatgaactaacccgggcagtagaggaactacacaaacttttgaaagaagctggtgaagccaacaaagcaatacaagatcatcttctagaggtggagcaatccaaagatcaaatggaaaaagaaatgcttgagaaaatagggagattggagaaggaattagagaatgcaaatgaccttctttctgccacaaaacgtaaaggagccatattgtctgaagaagagcttgccgccatgtctcctactgcagcagctgtagctaagatagtgaaacctgggatgaaactaactgagctctataatgcttatgtggaaactcaggatcagttgcttttggagaaactagagaacaaaagaattaataagtacctagatgaaatagtgaaagaagtggaagccaaagcaccaattttgaaacgccagcgtgaggaatatgaacgtgcacagaaagctgtagcaagtttatctgttaagcttgaacaagctatgaaggagattcagcgattgcaggaggacactgataaagccaacaagcaatcatctgtacttgagagagataatcgaagaatggaaatacaagtaaaagatctttcacaacagattagagtgcttttgatggaacttgaagaagcaaggggtaaccacgtaattcgtgatgaggaagtaagctctgctgatataagtagttcatctgaggtaatatcacagcatctagtatcttacagaaatattgaagagcttcaacaacaaaatcaacgtctcttagtggcccttagagagcttggggaaaccagagaaagagaagaacaagaaacaacttcatccaaaatcactgagcttcagctcaaacttgagagtgcccttactgaactagaacaactccgcaaatcacgacagcatcaaatgcagcttgttgattccatagttcgtcagcgtgatatgtaccgtattttattgtcacaaacaacaggagttgccattccattacatgcttcaagcttagatgatgtttctcttgcatcaactccaaaacgtccaagtacatcacagactgtttccactcctgctccagtacctgttattgaatcaacagaggctatagaggctaaggctgcccttaaacagttgcaggaaatttttgagaactacaaaaaagaaaaagcagaaaatgaaaaaatacaaaatgagcagcttgagaaacttcaagaacaagttacagatttgcgatcacaaaataccaaaatttctacccagctagattttgcttctaaacgttatgaaatgctgcaagataatgttgaaggatatcgtcgagaaataacatcacttcatgagagaaatcagaaactcactgccacaactcaaaagcaagaacagattatcaatacgatgactcaagatttgagaggagcaaatgagaagctagctgtcgcagaagtaagagcagaaaatttgaagaaggaaaaggaaatgcttaaattgtctgaagttcgtctttctcagcaaagagagtctttgttagctgaacaaagggggcaaaacttactgctaactaatctgcaaacaattcagggaatactggagcgatctgaaacagaaaccaaacaaaggcttagtagccagatagaaaaactggaacatgagatctctcatctaaagaagaagttggaaaatgaggtggaacaaaggcatacacttactagaaatctagatgttcaacttttagatacaaagagacaactggatacagagacaaatcttcatcttaacacaaaagaactattaaaaaatgctcaaaaagaaattgccacattgaaacagcacctcagtaatatggaagtccaagttgcttctcagtcttcacagagaactggtaaaggtcagcctagcaacaaagaagatgtggatgatcttgtgagtcagctaagacagacagaagagcaggtgaatgacttaaaggagagactcaaaacaagtacgagcaatgtggaacaatatcaagcaatggttactagtttagaagaatccctgaacaaggaaaaacaggtgacagaagaagtgcgtaagaatattgaagttcgtttaaaagagtcagctgaatttcagacacagttggaaaagaagttgatggaagtagagaaggaaaaacaagaacttcaggatgataaaagaagagccatagagagcatggaacaacagttatctgaattgaagaaaacactttctagtgttcagaatgaagtacaagaagctcttcagagagcaagcacagctttaagtaatgagcagcaagccagacgtgactgtcaggaacaagctaaaatagctgtggaagctcagaataagtatgagagagaattgatgctgcatgctgctgatgttgaagctctacaagctgcgaaggagcaggtttcaaaaatggcatcagtccgtcagcatttggaagaaacaacacagaaagcagaatcacagttgttggagtgtaaagcatcttgggaggaaagagagagaatgttaaaggatgaagtttccaaatgtgtatgtcgctgtgaagatctggagaaacaaaacagattacttcatgatcagatcgaaaaattaagtgacaaggtcgttgcctctgtgaaggaaggtgtacaaggtccactgaatgtatctctcagtgaagaaggaaaatctcaagaacaaattttggaaattctcagatttatacgacgagaaaaagaaattgctgaaactaggtttgaggtggctcaggttgagagtctgcgttatcgacaaagggttgaacttttagaaagagagctgcaggaactgcaagatagtctaaatgctgaaagggagaaagtccaggtaactgcaaaaacaatggctcagcatgaagaactgatgaagaaaactgaaacaatgaatgtagttatggagaccaataaaatgctaagagaagagaaggagagactagaacaggatctacagcaaatgcaagcaaaggtgaggaaactggagttagatattttacccttacaagaagcaaatgctgagctgagtgagaaaagcggtatgttgcaggcagagaagaagctcttagaagaggatgtcaaacgttggaaagcacgtaaccagcatctagtaagtcaacagaaagatccagatacagaagaatatcggaagctcctttctgaaaaggaagttcatactaagcgtattcaacaattgacagaagaaattggtagacttaaagctgaaattgcaagatcaaatgcatctttgactaacaaccagaacttaattcagagtctgaaggaagatctaaataaagtaagaactgaaaaggaaaccatccagaaggacttagatgccaaaataattgatatccaagaaaaagtcaaaactattactcaagttaagaaaattggacgtaggtacaagactcaatatgaagaacttaaagcacaacaggataaggttatggagacatcggctcagtcctctggagaccatcaggagcagcatgtttcagtccaggaaatgcaggaactcaaagaaacgctcaaccaagctgaaacaaaatcaaaatcacttgaaagtcaagtagagaatctgcagaagacattatctgaaaaagagacagaagcaagaaatctccaggaacagactgtgcaacttcagtctgaactttcacgacttcgtcaggatcttcaagatagaaccacacaggaggagcagctccgacaacagataactgaaaaggaagaaaaaaccagaaaggctattgtagcagcaaagtcaaaaattgcacacttagctggtgtaaaagatcagctaactaaagaaaatgaggagcttaaacaaaggaatggagccttagatcagcagaaagatgaattggatgttcgcattactgcgctaaagtcccaatatgaaggtcgaattagtcgcttggaaagagaactcagggagcatcaagagagacaccttgagcagagagatgagcctcaagaaccttctaataaggtccctgaacagcagagacagatcacattgaaaacaactccagcttctggtgaaagaggaattgccagcacatcagacccaccaacagccaatatcaagccaactcctgttgtgtctactccaagtaaagtgacagctgcagctatggctggaaataagtcaacacccagggctagtatccgcccaatggttacacctgcaactgttacaaatcccactactaccccaacagctacagtgatgcccactacacaagtggaatcacaggaagctatgcagtcagaagggcctgtggaacatgttccagtttttggaagcacaagtggatccgttcgttctactagtcctaatgtccagccttctatctctcaacctattttaactgttcagcaacaaacacaggctacagcttttgtgcaacccactcaacagagtcatcctcagattgagcctgccaatcaagagttatcttcaaacatagtagaggttgttcagagttcaccagttgagcggccttctacttccacagcagtatttggcacagtttcggctacccccagttcttctttgccaaagcgtacacgtgaagaggaagaggatagcaccatagaagcatcagaccaagtctctgatgatacagtggaaatgcctcttccaaagaagttgaaaagtgtcacacctgtaggaactgaggaagaagttatggcagaagaaagtactgatggagaggtagagactcaggtatacaaccaggattctcaagattccattggagaaggagttacccagggagattatacacctatggaagacagtgaagaaacctctcagtctctacaaatagatcttgggccacttcaatcagatcagcagacgacaacttcatcccaggatggtcaaggcaaaggagatgatgtcattgtaattgacagtgatgatgaagaagaggatgatgatgaaaatgatggagaacatgaggattatgaagaggatgaggaagatgatgatgatgatgaagatgacacagggatgggagatgagggtgaagatagtaatgaaggaactggtagtgccgatggcaatgatggttatgaagctgatgatgctgagggtggtgatgggactgatccaggtacagaaacagaagaaagtatgggtggaggtgaaggtaatcacagagctgctgattctcaaaacagtggtgaaggaaatacaggtgctgcagaatcttctttttctcaggaggtttctagagaacaacagccatcatcagcatctgaaagacaggcccctcgagcacctcagtcaccgagacgcccaccacatccacttcccccaagactgaccattcatgccccacctcaggagttgggaccaccagttcagagaattcagatgacccgaaggcagtctgtaggacgtggccttcagttgactccaggaataggtggcatgcaacagcatttttttgatgatgaagacagaacagttccaagtactccaactcttgtggtgccacatcgtactgatggatttgctgaagcaattcattcgccgcaggttgctggtgtccctagattccggtttgggccacctgaagatatgccacaaacaagttctagtcactctgatcttggccagcttgcttctcaaggaggtttaggaatgtatgaaacacccctgttcctagctcatgaagaagagtcaggtggccgaagtgttcccactactccactacaagtagcagccccagtgactgtatttactgagagcaccacctctgatgcttcggaacatgcctctcaatctgttccaatggtgactacatccactggcactttatctacaacaaatgaaacagcaacaggtgatgatggagatgaagtatttgtggaggcagaatctgaaggtattagttcagaagcaggcctagaaattgatagccagcaggaagaagagccggttcaagcatctgatgagtcagatctcccctccaccagccaggatcctccttctagctcatctgtagatactagtagtagtcaaccaaagcctttcagacgagtaagacttcagacaacattgagacaaggtgtccgtggtcgtcagtttaacagacagagaggtgtgagccatgcaatgggagggagaggaggaataaacagaggaaatattaattaaatggtctgtaaacaataacaactgtgaataagattatcaaatctgttttagtgtaatgattgtcaagtttaaaaacatttttatatataaactggtatactcatgtcaatattctttattaataaaatgtttttcagtgtc

SEQ ID NO: 4941 - DNA, 756 bp, Homo sapiens
cttggcattttccctggttgacctgcctgagccatttgtaccccactgagcattggctgctgctggcttggagctcctgccatctgcacctgctgtaatcctgaggttcctgcaaggatcgtcccagctcctggctggcctgcctggccaggaccactgctgcctgaaggtctccaattagatagtcctttcccaaaggcaacagctgccaccaaggcattagtgtctgtagggttaaaggtctgcttgttcggccggagacctccactctctgattctcgctcctctttgctgattttctccagaaggtttgaacacattttattcaagctctggatctgcttctgggctgcatctgcaccaatgcgggcagcatctgtcgtcagttgcttctcctgttcttccacttcagggtcaggcttggttctcagatggtcagggactacctcatggctgaaaacaggcacccgtccttcagtctgccccatgagatcttcatctcggtctggagacaacaccagaggaatgatgacctggttacggaacagcggtgttttttcatgcttcaagaccttgttcagagtgttcagctgtccagaaagcaaggcaaagctgtccaggacagatggcctggtcagccggccatactcgttctccaacttgcaaatgaaactccccagagagttcttcagatcagccacttgactcagcagtgcatctaatgatgcctcaagctgcttctcctctctctgcacc

SEQ ID NO: 4942 - DNA, 1187 bp, Homo sapiens
ggcagccgcctcggccgccgcaatgcagccctcctttctatgtgtcatactcgtttatctgggtgaccaacctgttcctattggtgcagagagaggagaagcagcttgaggcatcattagatgcactgctgagtcaagtggctgatctgaagaactctctggggagtttcatttgcaagttggagaacgagtatggccggctgacctgctttgccttgctttctggacagctgaacactctgaacaaggtcttgaagcatgaaaaaacaccgctgttccgtaaccaggtcatcattcctctggtgttgtctccagaccgagatgaagatctcatgcggcagactgaaggacgggtgcctgttttcagccatgaggtagtccctgaccatctgagaaccaagcctgaccctgaagtggaagaacaggagaagcaactgacgacagatgctgcccgcattggtgcagatgcagcccagaagcagatccagagcttgaataaaatgtgttcaaaccttctggagaaaatcagcaaagaggagcgagaatcagagagtggaggtctccggccgaacaagcagacctttaaccctacagacactaatgccttggtggcagctgttgcctttgggaaaggactatctaattggagaccttcaggcagcagtggtcctggccaggcaggccagccaggagctgggacgatccttgcaggaacctcaggattacagcaggtgcagatggcaggagctccaagccagcagcagccaatgctcagtggggtacaaatggctcaggcaggtcaaccagggaaaatgccaagtggaataaaaaccaacatcaagtcggcttccatgcatccctaccagcggtgagtgtggctggcaacctcgactccctggtgctctttgcagagttgggcagtgaaattaccttttgctcaaggctcacctagatgggtacaataaaaagaacatgggctttcagcagcagacaaatcccacttccaccactgactagctgtgtgaccttggacaagtgacctaatttttctgagcctgtttctcatttgtaaatggtgataatacctacctcatagggttgttgtgaggattaaaatgaggaaatgaatgtaaagcacttagtacagtatatgaaataatgggtattcaataaatgatagtttctac

SEQ ID NO: 4943 - DNA, 763 bp, Homo sapiens
gaaggtgacaacaaaagtcaaccgtcatgacaaaatcaatggaaagaggaagaccgccaaagaacatctgaggaaactaagcatgaaagaacgtgagcacrgagaaraggagaggcaggtgtcagaggcagaggaaaatgggaaattggatatgaaagaaatacacacctacatggaaatgtttcaacgtgcgcaagcgttgcggcggcgggcagaggactactacagatgcaaaatcaccccttctgcaagaaagcctctttgcaaccgggtcagaatggcggcagtggagcatcgtcattcttcaggattgccctactggccctacctcacagctgaaactttaaaaaacaggatgggccaccagccacctcctccaactcaacaacattctataattgataactccctgagcctcaagacaccttccgagtgtgtgctctatccccttccaccctcagcggatgataatctcaagacacctcccgagtgtctgctcactccccttccaccctcagctctaccctcagcggatgataatctcaagacacctgccgagtgcctgctctatccccttccaccctcagcggatgataatctcaagacacctcccgagtgtctgctcactccccttccaccctcagctccaccctcagcggatgataatctcaagacacctcctgagtgtgtctgctcactccccttccaccctcagcggatgataatctcaagaaactaaggaagaataaataaataatataaa

SEQ ID NO: 4944 - DNA, 700 bp, Homo sapiens
gaaggtcacaaagaaagtcaaccatcattacaaaatcaatggaaagaggaagaccgccaaagaacacctgaggaaactaagcatgaaagaatgtgagcatgcagaaaaggagaggcaggtatcagaggcagaggaaaatgggaaattggatatgaaagaaatacacacctacaagaaaatgtttcaacgtgcgcaagagttgcggtggcgggcagaggactaccacaaatgcaaaatcaccccctctgcaagaaagcctctttgcaactgggtcagaatggcggcagcggagcatcgtcattcttcaggattgccctactggccctacctcacagctgaaactttaaaaaacaggatgggccgccagccacctcctccaactcaacaacattctataactgataactccctgagcctcaagacacctcccgaatgtcttcttattccccttccaccctctcctcttccaccctccgtggatgataatctcaagactcctcccttagctactcaggaggccgaggcagaaaaatcactgaaacccaagaggcagaggttgagtaagctgagaacaggtcattgcactcaagcctgggcaataagaagaaatctgtgagtggaacaaaagaaaaaaatcaaaaaacaaaacaaaacccacactccaaaaacaaactaacaaagaataaataaataatataaa

SEQ ID NO: 4945 - DNA, 1190 bp, Homo sapiens
gtgctgctgaggcgtgagaatggcgtcccgcggccggcgtccggagcatggcggacccccagagctgttttatgacgagacagaagcccggaaatacgttcgcaactcacggatgattgatatccagaccaggatggctgggcgagcattggagcttctttatctgccagagaataagccctgttacctgctggatattggctgtggcactgggctgagtggaagttatctgtcagatgaagggcactattgggtgggcctggatatcagccctgccatgctggatgaggctgtggaccgagagatagagggagacctgctgctgggggatatgggccagggcatcccattcaagccaggcacatttgatggttgcatcagcatttctgctgtgcagtggctctgtaatgctaacaagaagtctgaaaaccctgccaagcgcctgtactgcttttttgcttctcttttttctgttctcgtccggggatcccgagctgtcctgcagctgtaccctgagaactcagagcagttggagctgatcacaacccaggccacaaaggcaggcttctccggtggcatggtggtagactaccctaacagtgccaaagcaaagaaattctacctctgcttgttttctgggccttcgacctttataccagaggggctgagtgaaaatcaggatgaagttgaacccagggagtctgtgttcaccaatgagaggttcccattaaggatgtcgaggcggggaatggtgaggaagagtcgggcatgggtgctggagaagaaggagcggcacaggcgccagggcagggaagtcagacctgacacccagtacaccggccgcaagcgcaagccccgcttctaagtcaccacgcggttctggaaaggcacttgcctctgcacttttctatattgttcagctgacaaagtagtattttagaaaagttctaaagttataaaaatgttttctgcagtaaaaaaaaagttctctgggccgggcgtggtggctcacacctgtaatcccagcaccttgggaggctgaggtgggaggatcatttgaggccaggagtttgagacctgcctgggcaacataatgaaacttcctttccagggaggaaaaaaaaaaaaaaaaaaagctctgagagcatcttattttgtttaaaggcaagaaataaaatttccttttgtgg

SEQ ID NO: 4946 - DNA, 1720 bp, Homo sapiens
atgaaacagaaaggctaaagagggctggagtcaggggacttctcttccaccagcttcacggtgatgatatggcatctgccagctctagccgggcaggagtggccctgccttttgagaagtctcagctcactttgaaagtggtgtccgcaaagcccaaggtgcataatcgtcaacctcgaattaactcctacgtggaggtggcggtggatggactccccagtgagaccaagaagactgggaagcgcattgggagctctgagcttctctggaatgagatcatcattttgaatgtcacggcacagagtcatttagatttaaaggtctggagctgccataccttgagaaatgaactgctaggcaccgcatctgtcaacctctccaacgtcttgaagaacaatgggggcaaaatggagaacatgcagctgaccctgaacctgcagacggagaacaaaggcagcgttgtctcaggcggagagctgacaattttcctggacgggccaactgttgatctgggaaatgtgcctaatggcagtgccctgacagatggatcacagctgccttcgagagactccagtggaacagcagtagctccagagaaccggcaccagccccccagcacaaactgctttggtggaagatcccggacgcacagacattcgggtgcttcagccagaacaaccccagcaaccggcgagcaaagccccggtgctcggagccggcaccgccagcccgtcaagaactcaggccacagtggcttggccaatggcacagtgaatgatgaacccacaacagccactgatcccgaagaaccttccgttgttggtgtgacgtccccacctgctgcacccttgagtgtgaccccgaatcccaacacgacttctctccctgccccagccacaccggctgaaggagaggaacccagcacttcgggtacacagcagctcccagcggctgcccaggcccccggacaggagtaaccgaggccgcccctcccacgccccccagcgcacatgtagtcctgagtcctccctgcctgagaggccactggccccgcagcccttgggaggcccccgtggatgtggccctgtgtgggaccacactgtcatctcgctgctggcagaaaagcctgatcccaggaggccctgcagttcccccgacccgcggatggcagtctggaataaagccccctagttgcctttggccccacctttgcaaagttccagagggctgaccctctctgcaaaactctcccctgtcctctagaccccaccctgggtgtatgtgagtgtgcaagggaaggtgttgcatccccaggggctgccgcagaggccggagacctcctggactagttcggcgaggagactggccactgggggtggctgttcgggactgagagcgccaagggtctttgccagcaaaggaggttctgcctgtaattgagcctctctgatgatggagatgaagtgaaggtctgagggagcgggccctggggcgaggccatctctgcctgcctccctagcaggcgccagcggtggaggctgagtcgcaggacacatgccggccagttaattcattctcagccaatgaaggtttgtctaagctgcctgggtatccacgggacaaaaacagcaaactccctcagactttgtccatgtataaacttgaagtggttgtgttgtagggttgcaggttttttgttacgctgctgtcactttctgtc

SEQ ID NO: 4947 - DNA, 1580 bp, Homo sapiens
gaggtcgcagcctagaggcgttccacaggtcggcccggggcgctgggagcccggccggcggtcgggtggggtggcctctgcacgtgaaagtggccgttccccgcggtgccgccgctcacctggaccctggccagcagcgtcgtcatgggcttggtgggcacctacagctgcttctggaccagtgagtgggcccaggccgaggcaggcccgcccgggtacccatgcccggccggagggatcctgaaactccgccacatctggaacctgaagttgatgcgttggacccctgcagctgcaagacatctgcttcaccaaggagctacactcccacttcttcagcttgggcaagtgtgtgcctgtgtgccgaggagatggcgtctaccagaaggggatggacttcattttggagaagctcaaccatggggactgggtgcatatcttcccagaaggaatcgggcgcctgattgctgagtgtcatctcaaccccatcatcctgcccctgtggcatgtcggtgagcctggggacggggacagagagatggcatctggggtggggggcctgggactccctctggtcccaggctgccctgctccaccccacgtctggccttctgtccactgtgctgcaggaatgaatgacgtccttcctaacagtccgccctacttcccccgctttggacagaaaatcactgtgctgatcgggaagcccttcagtgccctgcctgtactcgagcggctccgggcggagaacaagtcggctgtggagatgcggaaagccctgacggacttcattcaagaggaattccagcatctgaagactcaggcagagcagctccacaaccacctccagcctgggagataggccttgcttgctgccttctggattcttggcccgcacagagctggggctgagggatggactgatgcttttagctcaaacgtggcttttagacagatttgttcatagaccctctcaagtgccctctccgagctggtaggcattccagctcctccgtgcttcctcagttacacaaaggacctcagctgcttctcccacttggccaagcagggaggaagaagcttaggcagggctctctttccttcttgccttcagatgttctctcccaggggctggcttcaggagggagcatagaaggcaggtgagcaaccagttggctaggggagcagggggcccaccagagctgtggagaggggaccctaagactcctcggcctggctcctacccaccgcccttgccgaaccaggagctgctcactacctcctcagggatggccgttggccacgtcttccttctgcctgagcttcccccccaccacaggccctttcctcaggcaaggtctggcctcaggtgggccgcaggcgggaaaagcagcccttggccagaagtcaagcccagccacgtggagcctagagtgagggcctgaggtctggctgcttgcccccatgctggcgccaacaacttctccatcctttctgcctctcaacatcacttgaatcctagggcctgggttttcatgtttttgaaacagaaccataaagcatatgtgttggcttgttgt

SEQ ID NO: 4948 - DNA, 1157 bp, Homo sapiens
gctcacagtcatcaattatagaccccacaacatgcgccctgaagacagaatgttccatatcagagctgtgatcttgagagccctctccttggctttcctgctgagtctccgaggagctggggccatcaaggcggaccatgtgtcaacttatgccgcgtttgtacagacgcatagaccaacaggggagtttatgtttgaatttgatgaagatgagatgttctatgtggatctggacaagaaggagaccgtctggcatctggaggagtttggccaagccttttcctttgaggctcagggcgggctggctaacattgctatattgaacaacaacttgaataccttgatccagcgttccaaccacactcaggccaccaacgatccccctgaggtgaccgtgtttcccaaggagcctgtggagctgggccagcccaacaccctcatctgccacattgacaagttcttcccaccagtgctcaacgtcacgtggctgtgcaacggggagctggtcactgagggtgtcgctgagagcctcttcctgcccagaacagattacagcttccacaagttccattacctgacctttgtgccctcagcagaggacttctatgactgcagggtggagcactggggcttggaccagccgctcctcaagcactgggaggcccaagagccaatccagatgcctgagacaacggagactgtgctctgtgccctgggcctggtgctgggcctagtcggcatcatcgtgggcaccgtcctcatcataaagtctctgcgttctggccatgacccccgggcccaggggaccctgtgaaatactgtaaaggtgacaaaatatctgaacagaagaggacttaggagagatctgaactccagctgccctacaaactccatctcagcttttcttctcacttcatgtgaaaactactccagtggctgactgaattgctgacccttcaagctctgtccttatccattacctcaaagcagtcattccttagtaaagtttccaacaaatagaaattaatgacactttggtagcactaatatggagattatcctttcattgagccttttatcctctgttctcctttgaagaacccctcactgtcaccttcccgagaataccctaagaccaataaatacttcagtatttc

SEQ ID NO: 4949 - DNA, 3534 bp, Homo sapiens
gggagcgctctgggatgggacttggagcaagcggcggcggcggagacagaggcagaggcagaagctggggctccgtcctcgcctcccacgagcgatccccgaggagagccgcggccctcggcgaggcgaagaggccgacgaggaagacccgggtggctgcgcccctgcctcgcttcccaggcgccggcggctgcagccttgcccctcttgctcgccttgaaaatggaaaagatgctcgcaggctgctttctgctgatcctcggacagatcgtcctcctccctgccgaggccagggagcggtcacgtgggaggtccatctctaggggcagacacgctcggacccacccgcagacggcccttctggagagttcctgtgagaacaagcgggcagacctggttttcatcattgacagctctcgcagtgtcaacacccatgactatgcaaaggtcaaggagttcatcgtggacatcttgcaattcttggacattggtcctgatgtcacccgagtgggcctgctccaatatggcagcactgtcaagaatgagttctccctcaagaccttcaagaggaagtccgaggtggagcgtgctgtcaagaggatgcggcatctgtccacgggcaccatgactgggctggccatccagtatgccctgaacatcgcattctcagaagcagagggggcccggcccctgagggagaatgtgccacgggtcataatgatcgtgacagatgggagacctcaggactccgtggccgaggtggctgctaaggcacgggacacgggcatcctaatctttgccattggtgtgggccaggtagacttcaacaccttgaagtccattgggagtgagccccatgaggaccatgtcttccttgtggccaatttcagccagattgagacgctgacctccgtgttccagaagaagttgtgcacggcccatatgtgcagcaccctggagcataactgtgcccacttctgcatcaacatccctggctcatacgtctgcaggtgcaaacaaggctacattctcaactcggatcagacgacttgcagaatccaggatctgtgtgccatggaggaccacaactgtgagcagctctgtgtgaatgtgccgggctccttcgtctgccagtgctacagtggctacgccctggctgaggatgggaagaggtgtgtggctgtggactactgtgcctcagaaaaccacggatgtgaacatgagtgtgtaaatgctgatggctcctacctttgccagtgccatgaaggatttgctcttaacccagataaaaaaacgtgcacaaagatagactactgtgcctcatctaatcacggatgtcagcacgagtgtgttaacacagatgattcctattcctgccactgcctgaaaggctttaccctgaatccagataagaaaacctgcagaaggatcaactactgtgcactgaacaaaccgggctgtgagcatgagtgcgtcaacatggaggagagctactactgccgctgccaccgtggctacactctggaccccaatggcaaaacctgcagccgagtggaccactgtgcacagcaggaccatggctgtgagcagctgtgtctgaacacggaggattccttcgtctgccagtgctcagaaggcttcctcatcaacgaggacctcaagacctgctcccgggtggattactgcctgctgagtgaccatggttgtgaatactcctgtgtcaacatggacagatcctttgcctgtcagtgtcctgagggacacgtgctccgcagcgatgggaagacgtgtgcaaaattggactcttgtgctctgggggaccacggttgtgaacattcgtgtgtaagcagtgaagattcgtttgtgtgccagtgctttgaaggttatatactccgtgaagatggaaaaacctgcagaaggaaagatgtctgccaagctatagaccatggctgtgaacacatttgtgtgaacagtgatgactcatacacgtgcgagtgcttggagggattccggctcgctgaggatgggaaacgctgccgaaggaaggatgtctgcaaatcaacccaccatggctgcgaacacatttgtgttaataatgggaattcctacatctgcaaatgctcagagggatttgttctagctgaggacggaagacggtgcaagaaatgcactgaaggcccaattgacctggtctttgtgatcgatggatccaagagtcttggagaagagaattttgaggtcgtgaagcagtttgtcactggaattatagattccttgacaatttcccccaaagccgctcgagtggggctgctccagtattccacacaggtccacacagagttcactctgagaaacttcaactcagccaaagacatgaaaaaagccgtggcccacatgaaatacatgggaaagggctctatgactgggctggccctgaaacacatgtttgagagaagttttacccaaggagaaggggccaggcccctttccacaagggtgcccagagcagccattgtgttcaccgacggacgggctcaggatgacgtctccgagtgggccagtaaagccaaggccaatggtatcactatgtatgctgttggggtaggaaaagccattgaggaggaactacaagagattgcctctgagcccacaaacaagcatctcttctatgccgaagacttcagcacaatggatgagataagtgaaaaactcaagaaaggcatctgtgaagctctagaagactccgatggaagacaggactctccagcaggggaactgccaaaaacggtccaacagccaacagtgcaacacagatatctgtttgaagaagacaatcttttacggtctacacaaaagctttcccattcaacaaaaccttcaggaagccctttggaagaaaaacacgatcaatgcaaatgtgaaaaccttataatgttccagaaccttgcaaacgaagaagtaagaaaattaacacagcgcttagaagaaatgacacagagaatggaagccctggaaaatcgcctgagatacagatgaagattagaaatcgcgacacatttgtagtcattgtatcacggattacaatgaacgcagtgcagagccccaaagctcaggctattgttaaatcaataatgttgtgaagtaaaacaatcagtactgagaaacctggtttgccacagaacaaagacaagaagtatacactaacttgtataaatttatctaggaaaaaaatccttcagaattctaagatgaatttaccaggtgagaatgaataagctatgcaaggtattttgtaatatactgtggacacaacttgcttctgcctcatcctgccttagtgtgcaatctcatttgactatacgataaagtttgcacagtcttacttctgtagaacactggccataggaaatgctgtttttttgtactggactttaccttgatatatgtatatggatgtatgcataaaatcataggacatatgtacttgtggaacaagttggattttttatacaatattaaaattcaccacttcag

SEQ ID NO: 4950 - DNA, 3682 bp, Homo sapiens
tttttttgtaggtttcaggcacagaactgtatatccaataatagtgaaatggatcccactaattatgacagaaatgatgatacatttaaatgacttggatgttttataggtatgatctcgtgaaaccttgagagaaactgaatgacgaatgaaactattgttcctgtttcacacagaagaaaactgaggttaaaaggggtaaagtaattttgcatggcatgaagtagaaattcaaagtacaggaatttgaacttggttctgtccttttctgaagcccttgaccactatagactcaaacatcaccttgtttttccactcattcaacacttttttttttaaattatctaataggttggcactcatcatgagcccctgttctcattctgcaaatggtgaagctctctattgtcctgaccccacagttcctgtcccatgaccagggccagctcaccaaggagctgcagcagcatgtaaagtcagtgacatgcccatgcgagtacctgaggaaggttatcaatactctggctgaccatcatcatcgtgggactgactttggtggaagtccttggttacatgtcattattgcgtttccgacaagttataaagttgtcattaccctctggatagtttacctttgggtgtctctcctgaagactatcttctggtctcgaaatggacatgatggatccacggatgtacagcagagagcctggaggtccaaccgccgtagacaggaagggctgaggtccatttgtatgcacacaaagaaaagagtttcttcctttcgaggaaataaaattggcctgaaagacgtcattactctacggagacatgtggaaacaaaagttagagctaaaatccgtaagaggaaggtgacaacgaaaatcaaccatcatgacaaaatcaatggaaagaggaagaccgccagaaaacagaaaatgtttcaacgtgcgcaagagttgcggcggcgggcagaggactaccacaaatgcaaaatccccccttctgcaagaaaggctctttgcaactgggtcagaatggcggcagcggagcatcgtcattcttcaggattgccctactggccctacctcacagctgaaactttaaaaaacaggatgggccaccagccacctcctccaactcaacaacattctataactgataactccctgagcctcaagacacctcccgagtgtgtgctcactccccttccaccctcagcggatgataatctcaagacacctcccgagtgtgtgctcactccccttccaccctcagcggatgataatctcaagacacctcctgagtgtctgctcactccccttccaccctcagcggatgataatctcaagacacctcctgagtgtctgctcactccccttccaccctcagcggatgataatctcaagacacctcccgagtgtctgctcactccccttccaccctcagctccaccctcagctccaccctcagcggatgataatctcaagacacgtgccgagtgtctgctccatccccttccaccctcagcggatgataatctcaagacaccttccgagcgtcagctcactccccttccaccctcagctccaccctcagcagatgataatatcaagacacctgccgagcgtctgcgggggccgcttccaccctcagcggatgataatctcaagacaccttccgagcgtcagctcactccccttccaccctcagctccaccctcagcagatgataatatcaagacacctgccgagcgtctgcgggggccgcttccaccctcagcggatgataatctcaagacaccttccgagcgtcagctcactccccttccaccctcagctccaccctcagcagatgataatatcaagacacctgccgagcgtctgcgggggccgcttccaccctcagcggatgataatctcaagacaccttccgagcgtcagctcactccccttccaccctcagctccaccctcagcagatgataatatcaagacacctgccgagcgtctgcgggggccgcttccaccctcagcggatgataatctcaagacaccttccgagcgtcagctcactccccttccaccctcagctccaccctcagcagatgataatatcaagacacctgccttccaccctcagcggatgataatctcaagacaccttccgagcgtcagctcactccccttccaccctcagctccactctcagcagatgataatatcaagatacctgctgagcgtctgcggattccgcttccaccatcagccgatgataatctcaagacaccttccgagcgtcagctcactccccttccaccctcagctccaccctcagcagatgataatatcaagacacctgccgagcgtctgcgggggccgcttccaccctcagcggatgataatctcaagacaccttccgagcgtcagctcactccccttccaccctcagctccaccctcagcagatgataatatcaagacacctgccgagcgtctgcgggggccgcttccaccctcagcggatgataatctcaagacaccttccgagcgtcagctcactccccttccaccctcagctccaccctcagcagatgataatatcaagacacctgccgagcgtctgcggggagcgtctgcgggggccgcttccaccctcagcggatgataatctcaagacaccttccgagcgtcagctcactccccttccaccctcagctccaccctcagcagatgataatatcaagacacctgccgagcgtctgcggaggccgcttccaccctcagcggatgataatctcaagacaccttccgagcgtcagctcactccccttccaccctcagctccaccctcagcagatgataatatcaagacacctgccgagcgtctgcgggggccgcttccaccctcagcggatgataatctcaagacaccttccgagcgtcagctcactccccttccaccctcagctccaccctcagcagatgataatatcaagacacctgccgagcgtctgcgggggccgcttccaccctcagcggatgataatctcaagacaccttccgagcgtcagctcactccccttccaccctcagctccaccctcagcagatgataatatcaagacacctgccgagcgtctgcgggggccgcttccaccctcagcggatgataatctcaagacacctcccttagctactcaggaggctgaggcagaaaaaccacgcaaacccaagaggcagagggcggctgagatggaaccacctcccgaacccaagaggcggagggtcggtgacgtggaaccgtcacgcaaacccaagaggcggagggccgctgacgtggaaccatcatcacccaaacccaagaggcggagggtcggtgatgtggaaccgtcacgcaaacccaagaggcggagggccgctgacgtggaaccatcatcacccgaacccaagaggcggagggtcggtgacgtggaaccgtcacgcaaacccaagaggcggagggccgctgacgtggaaccatcatcacccgaacccaagaggcggaggttgagctgagaagaggccagtgcactcaagcctgagcaataagaataaaaccgagtagaacaaaataaaaaattcaaaaaacaaaacaaaacccacactccaaaaactaacaaagaataaataaataatataaaaat

SEQ ID NO: 4951 - DNA, 2103 bp, Homo sapiens
cagcggcggagcccaccgccaacgggggcctggcgctggcctccatcgaggaccaaggcgcggcagcaggcggctactgcggttcccgggaccaggtgcgccgctgccttcgagccaacctgcttgtgctgctgacagtggtggccgtggtggccggcgtggcgctgggactgggggtgtcgggggccgggggtgcgctggcgttgggcccggagcgcttgagcgccttcgtcttcccgggcgagctgctgctgcgtctgctgcggatgatcatcttgccgctggtggtgtgcagcttgatcggcggcgccgccagcctggaccccggcgcgctcggccgtctgggcgcctgggcgctgctctttttcctggtcaccacgctgctggcgtcggcgctcggagtgggcttggcgctggctctgcagccgggcgccgcctccgccgccatcaacgcctccgtgggagccgcgggcagtgccgaaaatgcccccagcaaggaggtgctcgattcgttcctggatcttgcgagaaatatcttcccttccaacctggtgtcagcagcctttcgctcatactctaccacctatgaagagaggaatatcaccggaaccagggtgaaggtgcccgtggggcaggaggtggaggggatgaacatcctgggcttggtagtgtttgccatcgtctttggtgtggcgctgcggaagctggggcctgaaggggagctgcttatccgcttcttcaactccttcaatgaggccaccatggttctggtctcctggatcatgtggtacgcccctgtgggcatcatgttcctggtggctggcaagatcgtggagatggaggatgtgggtttactctttgcccgccttggcaagtacattctgtgctgcctgctgggtcacgccatccatgggctcctggtactgcccctcatctacttcctcttcacccgcaaaaacccctaccgcttcctgtggggcatcgtgacgccgctggccactgcctttgggacctcttccagttccgccacgctgccgctgatgatgaagtgcgtggaggagaataatggcgtggccaagcacatcagccgtttcatcctgcccatcggcgccaccgtcaacatggacggtgccgcgctcttccagtgcgtggccgcagtgttcattgcacagctcagccagcagtccttggacttcgtaaagatcatcaccatcctggtcacggccacagcgtccagcgtgggggcagcgggcatccctgctggaggtgtcctcactctggccatcatcctcgaagcagtcaacctcccggtcgaccatatctccttgatcctggctgtggactggctagtcgaccggtcctgtaccgtcctcaatgtagaaggtgacgctctgggggcaggactcctccaaaattacgtggaccgtacggagtcgagaagcacagagcctgagttgatacaagtgaagagtgagctgcccctggatccgctgccagtccccactgaggaaggaaaccccctcctcaaacactatcgggggcccgcaggggatgccacggtcgcctctgagaaggaatcagtcatgtaaaccccgggagggaccttccctgccctgctgggggtgctctttggacactggattatgaggaatggataaatggatgagctagggctctgggggtctgcctgcacactctgggatgcctggctgctggagtacatgtgttcacaagggttactcctcaaaacccccagttctcactcatgtccccaactcaaggctagaaaacagcaagatggagaaataatgttctgctgcgtccccaccgtgacctgcctggcctcccctgtctcagggagcaggtcacaggtcaccatggggatgtgtgtgtgcacgtgtgtgtgtgtgtgtgtgtgtgtgtgtgtgtgtgtgttctgtgacctcctgtccccatggtacgtcccaccctgtccccagatcccctattccctccacaataacagaaacactcccagggactctggggagaggctgaggacaaatacctgctgtcactccagaggacattttttttagcaataaaattgagtgtcaactattt

SEQ ID NO: 4952 - DNA, 1555 bp, Homo sapiens
aagaaaagcagagacgattggattacagcaattgctcttataactcctctccgcccaccccctcgatgagaagctggtttgaaggactgagtatcaaatccctactgagctctgaggttccaggtgtggatggagtgtggggcccatgtgtgtgtcagtgtgtgtgggtgtgattgtgtgagcaactgggtgtgtgaggttcaggcccagtcggcttgtccagacgccaggcctgagatgccctgggggtgctaagaggggtagagagaagccaaaggaacacaggctttgaaacgaggcagaattgagttggagtcccaaccccaccaacctcacctctcttcactcttcaggcagcgtagaaaacaatgcctgccttttgccaggcatcctcatggaagtgacatcgtctttaaacctgtgtggcaatccctgacgcaccaccgtgatgcccagggaagacagggtgacctggaaacccaactacttccttaagatcatccagctattggatgattatctgaaatgtttcatcgtgggagcagacaatgtgaactccaagcagatgcagcagatccgcatgtccctctgcggcaaggccgtggtgctgatgggcaagaacgccatgacgcgcaaggccatccgagggcacctggaaaacagcccagctctggagaaactgctgcctcgcatctgggagaatgtgggctttgtgttcaccaaggaggacctcactgagatcagggacctgctgctggccaataaggtgccagctgccacccgtgctggtgccattaccccatgtgaagtcactgtgccagcccagaatactggtctggaccccgagaagacctcctttttccaggctttaggtatcatcactaaaatctccaggggcgccattgaaatcctgagtgatgcgcagctgatcaagacgggagacaaagtgggagccagtgaagccacgctgctgaccatgctcaacatctcccccttctcctctgggctggtcatccagcaggtgttcgacaacggcagcatctacaaccctgaagtgcttgacatcacagaggaaactctgtattctcgcttcctggagggtgtccgcaatgttgccggtgtctgtccgcagatccactacccaactgttgcatcagtgccccattctatcatcgacgggtacaaacgagtcctggccttgtctgtggagactgatgacaacttcctgcttgctgaaaaggtcaaggccttcttggctgatccatctgcctttgtggctgcagcccctgtggctgctgccaccacagctgctcctgctgctgctgctgcagccccagctaaggatgaagccaaggaagagtcggagggaggagtcagacgaggatatgggattgggtctctttgactaatcaccaaaaagcaaccaacttagccagctttatttgcaaaacaaggaaataaaggcttacttctttaaaaaaaaaaaaagaaaagaaaaaaagaagaaagaaagaaacaaagaaagaaagaaagagaaagaaagaaaagaaaaaaa

SEQ ID NO: 4953 - DNA, 2222 bp, Homo sapiens
gccgaatagccgtgtttgggacctgggctcgggcttcttgcgtccccgctaagaacatgtcacggggccgaatcgtccgtattctctcagcttcaagctcctctacttttcaaccaggtcactagcccttgactcctcttatcaaacttccggaactgccaccccaccagtgactccacaggcaccagggcatgcaacagggctgggacaggaaggctctcttcttcacctcaagcctgctgggctaacacttgcgatttttactagagttaactttgtaatgtatgtctctgactctagaatttcaagagaagttccacttagtgactcctaagtggaagttctaagatggcttcccagtgaggtgatgaagaggtttgagctttagagtgcggttgcaaagctcttctctgacctgaacaatggctgtagctgtggaccaacaaatccagactccttcagtacaagatctccaaatagttaaactggaagaagattcccactgggagcaggaaatttcccttcaagggaattaccctggaccagagacatcctgccagagcttttggcatttccgttaccaagaagcatcacgaccccgagaggccctcctccagctccagaagctctgttgtcagtggctaaggccagagaagtgtacaaaagagcagatcctggagttgctggtcctagaacagttcccgactgtccttctccaggagatccagatctgggtcagacagcagcatccggagagtggagaggaggcagtggccctggtggaagacttgcagaaagaacctggaagacagaggctggagccctgcctgatgtggctctgggaattcctgcagagaagagcaggggtggccaggagatagtgagcagctcccaggaggcatggagggatccagaacctggactgaagaaccacctagaaataactcagcagaattctgaaaatgaggtcacgctggattttccaatccataggcccaaagtgaactcccacgtggagtaggatgaaaacccacagcatctagatcttcaaattctggagaaaaagagagtgtgaaagactgctcagtggctggggtgagagtcaagtctggccaggtgctaatctggagaaaagccaagacctggagcgagctggagtggcaggccctggaggatgagaaggtggcaggagtgcactggggatacaaagaaaccaagatttttctgggaattctcagaggcctggatccacgaaaaactccgcacctgccatcgaaaccaccaggtgtaccggattatggctgagcagctgtgagaacatggcttcctgtggaccctggagcaatgttgctatcggttcaaaaacctcctgaccgactactgcaaagccaggagcacctacacaccaggcaccagtgtcttctatgatgagatggatgccctgttgagtcttggggcactttctaacacctttgatgccttagaggtggtaggaggccttctttgggattgagaggattccaaagggaaccagggcatagcactagaagatgtggcgggatggtaatgaaatagtggaggagtctcaagaggaatcctggaggcttggtccccaggccttgaggtggaatcccagtggcaactctcccccacaatggacctcagagcagtgggagcgacgcagtcctgtgggaagcattcaggctcagaatcaggagatgtgattattgtcctggctctgttatgactaatttgggtctggaatggcctcatcgggggaaaaattggtgacaactttaagaaatactgtttatatcccgtcctcaaatattgcttgactcaaccctctactgaaccagtagtccagggtggctcacaaagaccactttgaggctcttgctctgctctttagccaaggagtctcccttcctgccttcagtaacaacattacaggaagagaggagagaaaggtaggagttaaagatccagtcatttgtttccatctaaagtgccctataagccgggcatggtggcgcaagcctgtagtcccagctactcgggaggctggggcaggagaatcacttgagcccaggagttggaggccgcagtgagctgtgatcatgccactgcattccagcctgggcgacagagtgagacccagactcagctgaaaaataataatattattaaaagaatttaaaataaagtgttccatagatgtg

SEQ ID NO: 4954 - DNA, 1972 bp, Homo sapiens
gtccaacttctcccggagcagccggagagcaggcgtcgggacgcagcaaagagaggagaggccaccatggcggagctgcaggaggtgcagatcacagaggagaagccactgttgccaggacagacgcctgaggcggccaaggaggctgagttagctgcccgaatcctcctggaccagggacagactcactctgtggagacaccatacggctctgtcactttcactgtctatggcacccccaaacccaaacgcccagcgatccttacctaccacgatgtgggactcaactataaatcttgcttccagccactgtttcagttcgaggacatgcaggaaatcattcagaactttgtgcgggttcatgtggatgcccctggaatggaagagggagcccctgtgttccctttgggatatcagtacccatctctggaccagcttgcagacatgatcccttgcgtcctgcagtacctaaatttctctacaataattggagttggtgttggagctggagcctacatcctggcgagatatgctcttaaccacccggacactgttgaaggtcttgtcctcatcaacattgatcccaatgccaagggttggatggattgggcagcccacaagctaacaggcctcacctcttccattccggagatgatccttggacatcttttcagccaggaagagctctctggaaattctgagttgatacaaaagtacagaaatatcattacacatgcacccaacctggataacattgaattgtactggaacagctacaacaaccgccgagacctgaactttgagcgtggaggtgatatcaccctcaggtgtcctgtgatgctggtggtggaatgtaactcaaaactggaccccacccagacctcgttcctcaagatggctgactccggaggtcagccccagctgactcagccaggcaagctgaccgaggccttcaagtacttcctgcaaggcatgggctacatggcctcatcctgcatgactcgcctgtcccggtctcgtacagcctctctgaccagtgcagcatccgttgatggcaaccggtcccgctctcgcaccctgtcccagagcagcgagtctggaactctttcttcggggcccccggggcacaccatggaggtctcctgttgaatggcccttgttgccctagagtgggacccagccctcacctcccccagagctaacctgggaggtgctgaaggggcattgggccaccgtaagcaagggaaaaagggcagatcatgcggggagatgaccttgatctttgattgctaccctaaccttgacctttaacccgtgattccccccagctcctggaagagatgtcctaatatctcttagggacccagacccctaaattctcctcctcccccattttgatgttaaggtggagagggcatatgcatcctctgtcctgatctaggtgtctatagctgaggggtaagaggttgttgtagttgtcctggtgcctccatcagactctccctacttgtcccatatttgcaaggggaggggatttggggctggggctccattcaccaaagctgaggtggcttctcattaaccctttaggactctgaagggtatggacctacgtgaatgtgtgtcagggggagacttgctggtgggttagtggtcctcaggatgtgatagaaacatccagtgtaaaaaggaagttggaatgggagttggcgggcagtgaacgagtgtggggaaggattggtgctggggcaacaggaaggggcctggggccgtttggctgcactaactttggtagctcagtgtgcatctagagtgggactggggagggagctaagcttgggctgggctgcttggggcttggcatagggtggaaagggctaccctggggctctgaccacactgtagtatgtgtggagggtgccctcccgtctcccacaacttctgctataacaataaactgtagaggaatctg

SEQ ID NO: 4955 - DNA, 3032 bp, Homo sapiens
gcctcctgacaggaaaggtttaagggggacagagccctgggaggccgggccgggctcgggggccaccccgggggcccgggccatggatgtgcgccgtctgaaggtgaacgaacttcgcgaggagctgcagcgccgcggcctggacactcgaggcctcaaggccgagcttgctgagcggctgcaggcggcgttggaggccgaggagcctgacgacgagcgggagctcgacgccgacgacgaaccggggcgacccgggcacatcaacgaggagatgccatggacaatattaccaggcagaaccaattctacgatacccaagtcatcaaacaagaaaacgagtcaggctacgagaggagaccactggaaatggagcagcagcaggcctatcgtccagaaatgaagacagagatgaagcaaggagcacccaccagcttcctcccgcctgaagcttctcaactcaagccagacaggcagcaattccagagtcgaaagaggccttatgaagaaaaccggggacgggggtactttgagcaccgagaggataggaggggccgctctcctcagcctcctgctgaagaggatgaagatgactttgatgatacccttgttgctattgacacctataactgcgacctccacttcaaggtggcccgagatcggagtagtggctatccgctcacaattgagggctttgcatacctgtggtcaggagcccgtgccagctatggggtcagaaggggccgtgtatgcttcgagatgaagatcaatgaggaaatctccgtgaagcaccttccgtctacagagcctgacccccacgtggtccgtatcggctggtccctggactcctgcagcacccagctaggcgaagagcctttctcctatggctatggaggcactgggaagaagtccaccaatagccggtttgaaaactacggagacaagtttgcagagaacgatgtgattggctgctttgcggattttgaatgtggaaatgacgtggaactgtcttttaccaagaatggaaagtggatgggcattgctttccgaatccagaaggaagccttggggggtcaggccctctatcctcatgtcctggtgaagaattgcgcagtggagttcaacttcggacagagagcagagccctactgttctgtcctcccggggtttaccttcatccagcaccttccccttagtgagcgtatccggggcaccgttggaccaaagagcaaggcagaatgtgagattctgatgatggtgggcctgcctgctgctggcaagaccacatgggccatcaaacatgcagcctccaacccttccaagaagtacaacatcctgggtaccaatgccatcatggataagatgcgggtgatgggcctacgccggcagcggaactatgctggccgctgggatgtcctgatccagcaggccacccagtgcctcaaccgcctcatccagattgctgcccgcaagaaacgcaactatatcctagatcagacaaatgtttatgggtcagcccagagacgaaaaatgagaccatttgaaggcttccagcgcaaagctattgtaatttgtcccactgacgaggacctaaaagaccgaacaataaagcgaaccgacgaggaagggaaggatgtcccagatcatgcggtcttagaaatgaaagccaacttcacgttgccagatgttggggacttcctggatgaggttctgttcattgagctgcagcgggaggaagcggacaagctagtgaggcagtacaacgaggaaggccgcaaggctgggccaccccctgaaaagcgctttgacaaccgaggtggtggtggcttccggggccgcgggggtggtggtggcttccagcgctatgaaaaccgaggaccccctggaggcaaccgtggcggcttccagaaccgagggggaggcagcggtggaggaggcaactaccgaggaggtttcaaccgcagcggaggtggtggctatagccagaaccgctggggtaacaacaaccgggataacaacaactccaacaacagaggcagctacaaccgggctccccagcaacagccgccaccacagcagcctccgccaccacagccaccaccccagcagccaccgccaccacccagctacagccctgctcggaaccccccaggggccagcacctacaataagaacagcaacatccctggctcaagcgccaataccagcacccccaccgtcagcagctacagccctccacagccgagttacagccagccaccctacaaccagggaggttacagccagggctacacagccccaccgcctccacctccaccaccacctgcctacaactatgggagctacggcggttacaacccggccccctataccccaccgccaccccccactgcacagacctaccctcagcccagctataaccagtatcagcagtatgcccagcagtggaaccagtactatcagaaccagggccagtggccgccatactacgggaactacgactacgggagctactccgggaacacacagggtggcacaagtacacagtagccagtgtgacccagaggctcccggaggcccctgccggcttcctccaccagcgcctgcctcggcccctcctctgcccccgccagatcccgtggtgctggggatggggtcatcccagggctgcctccctccagcccactgcctcccctctgaggggcttccttcccctccatagggccaggcatttttttctggattcaaacaggcaacaatgaccttttattttctgtttgtccccacctccccagccttccacctcctgttcttcctaccttcttcctttttgactaaataatccccacctcccttgatcatacagtgaggctacagtgactgaggggagaatcccctcctgttcactctcccaaccctgctccagcccctcagcttcccagaccctcatgcagttggttgtaaattctcccaggagctgttttactgtctacttttcaggattaaaaaaaaaatcaaaacttaaaaaaaaaaaa

SEQ ID NO: 4956 - DNA, 1518 bp, Homo sapiens
gcctttccaggtcttctcccggtgaaccggatgctctgtcagtctcctcctctgcgtcctcggccgcggcccgggtccctcgcaaagccgctgccatcccggagggcccagccagcgggctcccggaggctggccgggcaggcgtggtgcgcggtaggagctgggcgcgcacggctaccgcgcgtggaggagacactgccctgccgcgatgggggcccggggcgctccttcacgccgtaggcaagcggggcggcggctgcggtacctgccccaccgggagctttcccttccttctcctgctgctgctgctctgcatccagctcgggggaggacagaagaaaaaggagaatcttttagctgaaaaagtagagcagctgatggaatggagttccagacgctcaatcttccgaatgaatggtgataaattccgaaaatttataaaggcaccacctcgaaactattccatgattgttatgttcactgctcttcagcctcagcggcagtgttctgtgtgcaggcaagctaatgaagaatatcaaatactggcgaactcctggcgctattcatctgctttttgtaacaagctcttcttcagtatggtggactatgatgaggggacagacgtttttcagcagctcaacatgaactctgctcctacattcatgcattttcctccaaaaggcagacctaagagagctgatacttttgacctccaaagaattggatttgcagctgagcaactagcaaagtggattgctgacagaacggatgttcatattcgggttttcagaccacccaactactctggtaccattgctttggccctgttagtgtcgcttgttggaggtttgctttatttgagaaggaacaacttggagttcatctataacaagactggttgggccatggtgtctctggtatagtctttgctatgacttctggccagatgtggaaccatatccgtggacctccatatgctcataagaacccacacaatggacaagtgagctacattcatgggagcagccaggctcagtttgtggcagaatcacacattattctggtactgaatgccgctatcaccatggggatggttcttctaaatgaagcagcaacttcgaaaggcgatgttggaaaaagacggataatttgcctagtgggattgggcctggtggtcttcttcttcagttttctactttcaatatttcgttccaagtaccacggctatccttatagctttttaattaaatgaagccaagtgggatttgcataaagtgaatgtttaccatgaagataaactgttcctgactttatactattttgaattcattcatttcattgtgatcagctagcttattcttgtgtactttttttaaactgtgggttttcctagtaaatttaatttacagaaatcaatggtagcatttagtaatctacaaaggaaatatcaaagtgtttttcaagcctgttatattcagtgtgtgccacaggattgaaataaatgacaatgtaattatg

SEQ ID NO: 4957 - DNA, 3467 bp, Homo sapiens
gctggccccaagcgcgcggggcaaggcggccctgcaggggtgagctttcctctgagaacccggggccttagcgacacgtaatccagttttccgtctccttggtgcagatgaagaaaccgacgcccatgggcgaaagggacctgctcaagttcactcaagaccacagagctgggcagcaagaaggagctcaagtccatgcccttcatcacctacctctcaggtttgctgacagcccagatgctgtcagatgaccagctcatttcaggtgtggagattcgctgtgaggagaaggggcgctgtccatctacctgtcacctttgccgccggccaggcaaggagcagctgagccccacaccagtgctgctggaaatcaaccgtgtggtgccactttataccctcatccaagacaatggcacaaaggaggccttcaagagtgcactgatgagttcctactggtgctcagggaaaggggatgtgatcgatgactggtgcaggtgtgacctcagcgcctttgatgccaatgggctccccaactgcagcccccttctgcagccggtgctgcggctgtccccaacagtggagccctccagtactgtggtctccttggagtgggtggatgttcagccagctattgggaccaaggtctccgactatattctgcagcataagaaagtggatgaatacacagacactgacctgtacacagtttattgctggattacatttattgatttgcggatattgaaccagccttgcatcccagggatgaagccaacttgattgtggtggataagctttttgatgtgctgctggatttggtttgccaatattttattgaagatttttgcatcgatgttcatcagggatattggtctaaaattctctttttttgttgtgtctctgccaggctttggtatcaggatgatgttggcctcataaaatgaattagggaggattccctctttttctattgatttgaatagtttcagaaggaatggtaccagctcatctttgtacctctggtagaattcggctgtgaatccatctggtcctggacttattttggttagtaggctattaattatggcctcaatttcagaacctgttattggtctattcagggattcaacttcttcctggtttagtcttgggaggaggctgtatgtgtccaggaatttatccatttcttctagattttctagtttatttgcatagaggtgtttatagtattctctaatggtagtttgtatttctgtgggatcggtggtgatatcccctttatcattttttattgcgtctatttgattcttctctcttttattctttatgagtcttgctagtagtctatcaattttgttgattttttcaaaaaaccagctcctggattcattgattttttgaagggtttttttttttttgtctctatctccttcagttctgctctcatcttagttatttcttgccttctgctagcttttgtgtgtttgctcttgcttctctagttcttttaattatgatgttagggtgtcagtttcagatctttcttgctttctcctgtgggcatttagtgctataaatctccctctacacactgctttaaatgtgtcccagagattctggtatgttgtgtcctgttctcattggtttcaaagaacatctttatttccgctttcatttcgttatgtacccagtagtcattcaggagcaagttgttcagtttccatgtagttgagcggttttgagtgagtttcttaatcctgagttctagtttgattgcactgtgttctgagagacagtttgttataatttctttcttttacatttgctgaggagtgctttacttcccactgtgtgatcaattttggaataactgcgatgtggtgctgagaagaatgtatattctgttgattggggtggatagttctgtagatgtctattaggtccgcttggtgcagagctgagttcaattcctggatatccttgttaactttctgtctcattgatctatctaatgttgacagtggggtgttaaagtctcccattattattgtgtgggagtctaagtctctttgtaagtctctaaggacttgctttatgaatctgggtgctcctatattgggtgcatatatatttaggatagttagctcgaagaaggtatcttctatttctagtctgctgcaaaggctctgttttgtttccattggaaacagatgttgaattttctgtgtctattaaaatgattgtatagtttatctctctaaatttgttaatatgataagtcacattgatagattttcatattataaaacaacctactatgtgagatttatcccaggaatgtgtaggttgttttatctgtttgttttaattaggatcattctggtctcacaaaatgaattataaaatattttctccttttcagttttctgaagtgtatctgtcttctcagagaatcactgtggttaaaattgatagtatttttttcttaatcattttttagaattcaccagtgaaggcatctgggcttagaccttttcttgcaagaaggtttttaactactaatttagttatttaatagatatagatttacttagattatctgtttcttcttgagtgatctttggcagcttgtgtgttttaaggaacttgttcattccatgtaaattatcaaatttattggaaaaagttgtttatgacattccgttactattcttttgaaatctgttgagattatagtgatattagtctcatcttgatattggtaatgtgtgtctcctctgttttttttctagatcagtttggctagatagctatgacatttatttgtattttcaaagaatcaactttcggttttatctgtttttgcttattgtttcctatttcattgatttatcctctaatttttattataattttctttgtttggcttactttgagtttggttttctccgcattttaatttttgaaatggtagctgaggctattgatttgagacctttcttgtaatgtagtcattccctcttaactactgctttagtagtatctcaaagattgtgttatgttgcgttttcattttcattcagttcaaagtatttccaatttcacttttgttttcttctttgacttatgagttatttagaggcatgccacttcgttttcaaatatttgggagttttttcagaaatttttgttgttgatttttgattccgctatagtcagaaaatatgtttttatgactttaaacattttaaatttattgagactagtttttggtctagatggtctattgctgtattcagtgttcactttaaaataatgtgtatccacttatttatgggtattttataaatgcctgttagataaaatcggttaattatgttattcaagtcttctggagcctttctgattttctgtcttcttgtatcaatatttgagagaggggtattaaaacctctgattatggactt

SEQ ID NO: 4958 - DNA, 2795 bp, Homo sapiens
acaagctctcgcgagacgagccgtgcaggctgaaaaaatggcgccacccagtacccgggagcccagggtcctgtcggcgaccagcgcaaccaaatccgacggagagatggtgctgccaggcttcccggacgccgacagctttgtgaagtttgctcttgggtccgtggtggcagtcaccaaggcatctgggggcctaccacagtttggcgatgagtatgatttttaccgaagttttcctggcttccaagcattttgcgaaacacagggagacaggttgcttcagtgcatgagcagagtaatgcagtaccatgggtgtcgcagcaacattaaggatcgaagtaaagtgactgagctggaagacaagtttgatttactagttgatgccaatgatgtaattctggagagagtgggtattttactggatgaagcctcaggtgtaaacaagaatcaacagcctgtcctccctgccggcttgcaggtccccaaaacggtagtgtccagctggaaccgtaaggcagcagaatatggcaaaaaagcaaaatctgaaactttccggctgcttcatgcaaaaaatatcatccgacctcagctcaagtttcgagagaagattgacaattccaacacaccatttcttcctaaaatcttcatcaaacccaatgctcagaaacctctccctcaagctctctctaaggaaaggcgggaacgcccacaggatcgtcctgaggacttggacgtcccccctgcactggctgatttcatccatcagcagagaacccagcaggttgagcaagacatgtttgcacatccttatcaatatgaactaaatcactttaccccagcagatgcagtgcttcaaaagccacaaccccagttatacagacctatagaagagacaccatgccatttcatatcctccctggatgaactcgtggaactcaacgaaaagctcttgaattgtcaggaatttgcagttgacttggagcaccactcttacaggagcttcctgggactgacctgcctgatgcaaatttctactcggacggaagacttcatcattgacaccctcgagcttcgaagtgacatgtacattctcaatgagagcctcacagacccagccatcgttaaggtctttcatggtgctgattcagacatagaatggctacagaaagactttgggttgtatgtagtaaacatgtttgatactcatcaggcagcacgccttcttaacctgggcaggcactcactcgatcatctcctgaaactctactgcaacgtggactcaaacaagcaatatcagctggctgattggagaatacgccctctgcccgaggagatgctcagctacgcccgggatgacacccattacctgctatatatctatgacaaaatgaggctggagatgtgggagcgcggcaacgggcagccggtgcagctgcaggtggtgtggcaacggagcagggacatctgcctcaagaaattcatcaaacctatcttcacggatgagtcctaccttgaactctataggaagcagaagaagcaccttaacacacagcagttgacagcctttcagctgctgtttgcctggagggataaaacagctcgcagggaagatgaaagttacggatatgtactgccaaaccacatgatgctgaaaatagctgaagaactgcctaaggaacctcagggcatcatagcttgctgcaacccagtaccgccccttgtgcggcagcagatcaacgaaatgcaccttttaatccagcaggcccgagagatgcccctgctcaagtctgaagttgcagccggagtgaagaagagcggaccgctgcccagtgctgagagattggagaatgttctctttggacctcacgactgctcccatgcccctccggatggctatccaatcatcccaaccagtggatctgtgccagttcagaagcaggcgagcctcttccctgatgaaaaagaagataacttgctgggtaccacatgcctgattgccacagctgtcatcacgttatttaatgaacctagtgctgaagacagtaaaaagggtccattgacagttgcacagaaaaaagcccagaacatcatggagtcctttgaaaatccatttaggatgtttctgccctcactgggacaccgtgctcccgtctctcaggcagcgaagttcgatccatcaaccaaaatctatgaaatcagcaaccgctggaagctggcccaggtacaagtacaaaaagactctaaagaagctgtcaagaagaaggcagctgagcaaacagctgcccgggaacaggcaaaggaggcgtgcaaagctgcagcagaacaggccatctccgtccgacagcaggtcgtgctagaaaatgctgcaaagaagagagagcgagcaacaagcgacccaaggaccacagaacagaaacaagagaagaaacgactcaaaatttccaagaagccaaaggacccagagccaccagaaaaagagtttacgccttacgactacagccagtcagacttcaaggcttttgctggaaacagcaaatccaaagtttcttctcagtttgatccaaataaacagaccccgtctggcaagaaatgcattgcagccaaaaaaattaaacagtcggtgggaaacaaaagcatgtcctttccaactggaaagtcagacagaggcttcaggtacaactggccacagagatagtcctggaagacacgtggcgcctgtggaccggaagcaccaaatgctggtgctgcttttgtacatacatatttttaaaccattaaaattcttcctgaagaaa

SEQ ID NO: 4959 - DNA, 3097 bp, Homo sapiens
gccggtagcggacggtccttgcattggcctccggcaggcgccccccgggggcgggaagctgcctcacagcatggaaccacaggttactctaaatgtgacttttaaaaatgaaattcaaagctttctggtttctgatccagaaaatacaacttgggctgatatcgaagctatggtaaaagtttcatttgatctgaatactattcaaataaaatacctggatgaggaaaatgaagaggtatccatcaacagtcaaggagaatatgaagaagcgcttaagatggcagttaaacagggaaaccaactgcagatgcaagtccacgaagggcaccatgtcgttgatgaagccccacccccagttgtaggagcaaaacgactagctgccagggcagggaagaagccacttgcacattactcttcactggtgagagtcttgggatcagacatgaagaccccagaggatcctgcagtgcagtcgtttccacttgttccatgtgacacagaccagcctcaagacaagcccccagactggttcacaagctacctggagacgttcagagaacaagtggttaacgaaacggttgagaagcttgaacagaaattacatgaaaagcttgtcctccagaacccatccttgggttcttgtccctcagaagtctcaatgcctacttcagaagaaacattgtttttgccagaaaaccagttcagctggcatattgcttgcaacaactgccaaagaaggattgttggtgtccgctaccagtgtagcctatgcccatcctacaatatctgtgaagattgtgaagcagggccatatggccatgacactaaccacgtcctgctgaagttgcggagacctgttgtgggctcctctgaaccgttctgtcactcaaagtactctactcctcgtcttcctgctgctctggaacaagtcaggctccagaaacaggttgataagaactttcttaaagcagaaaagcaaaggttgcgagctgagaagaaacaacgtaaagcagaggtcaaggaacttaaaaagcagcttaaactccataggaaaattcacctgtggaattcaatccatggactccagagccccaagtctcctttaggccgacctgagagcttgctccagtctaataccctgatgctccctttgcagccctgtacctccgttatgccaatgctcagtgcagcatttgtggatgagaatttgcctgatgggactcaccttcagccaggaaccaagtttatcaaacactggaggatgaaaaatacaggaaatgtaaagtggagtgcagacacaaagctcaagttcatgtggggaaacctgactttggcttccacagaaaagaaggatgttttggttccctgcctcaaggccggccatgtgggagttgtatctgtggagttcattgccccagccttggagggaacgtatacttcccattggcgtctttctcacaaaggccagcaatttgggcctcgggtctggtgcagtatcatagtagatcctttcccctccgaagagagccctgataacattgaaaagggcatgatcagctcaagcaaaactgatgatctcacctgccagcaagaggaaacttttcttctggctaaagaagaaagacagcttggtgaagtgactgagcagacagaagggacagcagcctgcatcccacagaaggcaaaaaatgttgccagtgagagggagctctacatcccatctgtggatcttctgactgcccaggacctgctgtcctttgagctgttggatataaacattgttcaagagttggagagagtgccccacaacacccctgtggatgtgactccctgcatgtctcctctgccacatgacagtcctttaatagagaagccaggcttggggcagatagaggaagagaatgaaggggcaggatttaaagcacttcctgattctatggtgtcagtaaagaggaaggctgagaacattgcttctgtggaggaagcagaagaagacctgagtgggacccagtttgtgtgtgagacagtaatccgatcccttaccttggatgctgccccagaccacaaccctccttgcagacagaagtccttgcagatgacatttgccttgcctgaaggaccacttggaaatgagaaggaggagattatccatatcgctgaggaagaagctgtcatggaggaggaggaggatgaggaggatgaggaggaggaggatgagctcaaagatgaagttcaaagtcagtcctctgcttcctcagaggattacatcatcatcctgcctgagtgctttgataccagccgccccctgggggattctatgtacagctctgcgctctcacagccaggcctggagcgaggtgctgaaggcaagcctggggttgaggctgggcaggaaccagctgaggctggggaaagactccctggaggggagaaccagccacaggagcacagcataagtgacatcctcacgacctcacagactctggaaacagtgcccctaatcccagaggtagtggagcttccaccgtcactgcccaggagctctccttgtgtacatcatcatggttccccaggagtggatttaccagttaccataccagaagtttcttcagtccctgatcagatcagaggagagcccagaggctcatcaggacttgtaaacagcagacagaagagctatgaccactcaaggcaccatcatgggagcagcattgctggaggactggtgaagggggctttgtctgttgctgcctctgcatacaaggccctgtttgctgggccaccagtcactgcacagggtctctggggcttgctgtcattccttcatctggccaaaaaatgcttcttcctgaaagccccgagtgaagcattctcctggttctaagtacagttcattagctccccggtttcccttttctcctccttcaagtacacagataactaatctaaaatagggccttcccagtccgaaccgttggtatcaagtacacaggagtgccatagccttgaatctaattacctagtactttgaataaatctggaaagactagtatgcttgcaagatgatacaaatgtataaaataaacatttaaattat

SEQ ID NO: 4960 - DNA, 3144 bp, Homo sapiens
ccgcggacctgtcagagatacagaggttgtgggggcgggagacagaaagagagagagatccagagaccgagtcttacgttgacacgcagagagaaagacgcagagacagacaaacaaacagataggagaggctctccaggaggccggggggcccactccgcctatcgctcccctcggctacgctgccacttcaatgccccgcaggtcgcgagctgctgttctttcgaaggcgtcggagaaccaggggcgtcccgcgccacctctgactcggagcagcgccgagcactgacgctcccgcccttgggcaaggacgccagtgcgcccgcgcgcgtccctctgcgcggcagcccgtcgcgggccctcaaggggaagcccaggccaggatggccccgggtcgcgcggtggccgggctcctgttgctggcggccgccggcctcggaggagtggcggaggggccagggctagccttcagcgaggatgtgctgagcgtgttcggcgcgaatctgagcctgtcggcggcgcagctccagcacttgctggagcagatgggagccgcctcccgcgtgggcgtcccggagcctggccagctgcacttcaaccagtgtttaactgctgaagagatcttttcccttcatggcttttcaaatgctacccaaataaccagctccaaattctctgtcatctgtccagcagtcttacagcaattgaactttcacccatgtgaggatcggcccaagcacaaaacaagaccaagtcattcagaagtttggggatatggattcctgtcagtgacgattattaatctggcatctctcctcggattgattttgactccactgataaagaaatcttatttcccaaagattttgaccttttttgtggggctggctattgggactcttttttcaaatgcaattttccaacttattccagaggcatttggatttgatcccaaagtcgacagttatgttgagaaggcagttgctgtgtttggtggattttacctacttttcttttttgaaagaatgctaaagatgttattaaagacatatggtcagaatggtcatacccactttggaaatgataactttggtcctcaagaaaaaactcatcaacctaaagcattacctgccatcaatggtgtgacatgctatgcaaatcctgctgtcacagaagctaatggacatatccattttgataatgtcagtgtggtatctctacaggatggaaaaaaagagccaagttcatgtacctgtttgaaggggcccaaactgtcagaaatagggacgattgcctggatgataacgctctgcgatgccctccacaatttcatcgatggcctggcgattggggcttcctgcaccttgtctctccttcagggactcagtacttccatagcaatcctatgtgaggagtttccccacgagttaggagactttgtgatcctactcaatgcagggatgagcactcgacaagccttgctattcaacttcctttctgcatgttcctgctatgttgggctagcttttggcattttggtgggcaacaatttcgctccaaatattatatttgcacttgctggaggcatgttcctctatatttctctggcagatatgtttccagagatgaatgatatgctgagagaaaaggtaactggaagaaaaaccgatttcaccttcttcatgattcagaatgctggaatgttaactggattcacagccattctactcattaccttgtatgcaggagaaatcgaattggagtaatagaaaatggaagatggtgttgttaataaaggcatttaatagataaaaacatctccaaaaaggattttgaagctgatcctatttagttaaaaagataattttgctttcaactgtaggtccagaaaactaattattggcatcagtctgtgaaatagtccattatttgttgttaaaaatgcttcaaaaggttttcagtgtcagtctgagatgcctggtatataggagcctttgggaaatacctatttttcagtattccatgcatattagatatcaccatgaagcaagagacatgcattctataatcatgtagacactcagactcaggggaaaatacaagttatatcctgaaagcctttaaaactctatggtaggatcaaagattcaaatggtttcagagaggttttatttcaattaatttgttctagtgctttcaagagcaagtacatcaaaatgtagaaggtaaaatgtatgcaacactaatataaattattccaagtctttaaggagccaaagaaaaaaaagatttctcacagctttttgttctgttttgtatttcaattaggaacttgcagtattattttgaaaaccattctaaaataataggagttaggaaataaataaagttttgctagccctgctaagttcaggcttagaggcttatcgctaagtataaacttcaccagattccacgaaaagctggatagctttttttctgacttatgttgtggttgcacccctcacaaatggcagaacagtatgtaaagctggtaacacctcggtttcagtgcaccatgtgtttgctttgtgaaggtgaagaatatgttggtttagagaaagaaattggatgtaattttatgcaatttacttttaaagacaaacataactatttagcagagaatattttaataaatgcaaaacaacagctggactgctgtacatcaaggacagattaactggaaaacatatgttccttatgtgtgatcgagagccattcagaaaagacttcctttgtgttcagcctatacttttccatatggtataccttgaaaaaaattagcacaccatggttatttttctaccttttataaaagacagagcctgtttactcatttagaagatagagaaaattggtctaaaattgaacatcctagattcacactcccaagtcacttaaggtgatttgatggtgaggaaaatgattgacaaagcccaacaatgatctcaggaattacattttccaacagaccaaaaaatgttttcatgtagcagcaatgcagatttggtgaatatttaatatatattttagtatgtatttcactttatgactgacaattaaaaaatattgtttggccaaatagtaaacacccttttgaaacca

SEQ ID NO: 4961 - DNA, 2632 bp, Homo sapiens
ttgatgttttccagtcattccggctgacagcgttcaagttggaatcctggaggggaggtgtttttcctgtcgtacgtgggacaggccacgctgtccgtccgcagtaccgacgcctgcaggtcagagcttcggggagaaaagtgaagagcaagacggaactgacggggagaaaggctgggaaccagggtgtcgactttgactgaaatttgagacggagggcaccggagggcgagcactcgcctgtgattggcccgtgggcgtcgtcgaggtcccacgcagctgctcaattggttggtgttgcaattgttgtggcggcggcggcggcgattttgcccacgtacttccgagtaaggggcggggctgtgccctggcgcgcgtgcgcagcgccccggggccccacccggtagtgcaagaacctgcgagggggcggagcgaagaggtgcttgttttggttctgtttcctttgaagcagaaggccggaacaagcgtagcaataaacttgctggacttggagagaaggctaagacaaactcgccgcactgccttcatcttggactttacatccgggttctcctctcggcgtgacccgcgcgccgccaccgccgccgccgccgccgccgccgcctccgccgccgagggttctcgaaccggtgccgcgatccctttatccgggtctcgccgttcccgtcgtgcctcgcgcactacactagccccctcatccgggttctctcccggcgtgccccgcgccgggtttgttggggggtactcggcagtgcagccatgactatactccccaaaaagaagccgccgcctcccgacgccgaccccgccaacgagccgccgccgcccgggccgatgcccccggcgccgcggcgcggcggaggtgtgggcgtgggcggcggcggcacgggcgtgggcggcggcgatcgcgaccgtgactccggcgtcgtgggggcccgtccgcgagcttcgccaccgcctcaaggcccgctaccaggaccgccgggcgctcttcatcgctgggcgctggccgtgccgcctggtgcagtggcgggtccccggccacaacaggcttctccacctccttgcgggggcccaggtggtcccggcggcggtcccggcgacgcgctgggcgcagcggcggcgggtgtgggtgccgcgggcgtggtggtgggtgtgggtggtgccgtaggcgtgggcggctgctgctccgggcctgggcacagcaagcggcgacgtcaagctcccggggttggcgcggttggcgggggcagtcccgagcgtgaggaggtcggcgcaggctacaacagtgaggacgagtatgaggcggctgcagcacgcatcgaggctatggaccctgccactgtcgagcagcaggagcattggtttgaaaaggccctacgagacaagaagggcttcatcatcaagcagatgaaggaggatggcgcctgtctcttccgggctgtagctgaccaggtgtatggagaccaggacatgcatgaggttgtgcgaaagcattgcatggactatctgatgaagaatgccgactacttctccaactatgtcacagaggactttaccacctacattaacaggaagcggaaaaacaattgccatggcaaccacattgagatgcaggccatggcagagatgtacaaccgtcctgtggaggtgtaccagtacagcacagaacccatcaacacattccatgggatacatcaaaacgaggacgaacccattcgtgttagctaccatcggaatatccactataattcagtggtgaatcctaacaaggccaccattggtgtggggctgggcctgccatcattcaaaccagggtttgcagagcagtctctgatgaagaatgccataaaaacatcggaggagtcatggattgaacagcagatgctagaagacaagaaacgggccacagactgggaggccacaaatgaagccatcgaggagcaggtggctcgggaatcctacctgcagtggttgcgggatcaggagaaacaggctcgccaggtccgaggccccagccagccccggaaagccagcgccacatgcagttcggccacagcagcagcctccagtggcctggaggagtggactagccggtccccgcggcagcggagttcagcctcgtcacctgagcaccctgagctgcatgctgaattgggcatgaagcccccttccccaggcactgttttagctcttgccaaacctccttcgccctgtgcgccaggtacaagcagtcagttctcggcaggggccgaccgggcaacttccccccttgtgtccctctaccctgctttggagtgccgggccctcattcagcagatgtccccctctgcctttggtctgaatgactgggaagatagacaagaggcacacagagacagaccaactggcagccaggcagccccagaggagagagacattcagacagaggaaagtctccctgcccctcattccttccaagatgagaaaaacttgccgccaccccccgacactgatgccagggaggtgggaggaagaagtgggaaatttcccttcccagtacccccaagaacgtctgagccttcaatgttgaattttttctttattaaaattacttttatcttataaaatc

SEQ ID NO: 4962 - DNA, 1061 bp, Homo sapiens
atgggtatctttcccggaataatcctaatttttctaagggtgaagtttgcaacggcggccgtgattcaccagaaaagtaccactgtaagtcatgagatgtctggtctgaattggaaaccctttgtatatggcggccttgcctctatcgtggctgagtttgggactttccctgtggaccttaccaaaacacgacttcaggttcaaggccaaagcattgatgcccgtttcaaagagataaaatatagagggatgttccatgcgctgtttcgcatctgtaaagaggaaggtgtattggctctctattcaggattgctcctgcgttgctaagacaagcatcatatggcaccattaaaattgggatttaccaaagcttgaagcgcttattcgtagaacgtttagaagatgaaactcttttaattaatatgatctgtggggtagtgtcaggagtgatatcttccactatagccaatcccaccgatgttctaaagattcgaatgcaggctcaaggaagcttgttccaagggagcatgattggaagctttatcgatatataccaacaagaaggcaccaggggtctgtggaggtgcttatgttcaaaagctgttaccggctgtgtgctgtggctcatgcctgtaatcccagcactttgggaggccaacgcgggtggatcacttgagggtgtggttccaactgctcagcgtgctgccatcgttgtaggagtagagctaccagtctatgatattactaagaagcatttaatattgtcaggaatgatgggcgatacaattttaactcacttcgtttccagctttacatgtggtttggctggggctctggcctccaacccggttgatgtggttcgaactcgcatgatgaaccagagggcaatcgtgggacatgtggatctctataagggcactgttgatggtattttaaagatgtggaaacatgagggcttttttgcactctataaaggattttggccaaactggcttcggcttggaccctggaacatcattttttttattacatacgagcagctaaagaggcttcaaatctaa

SEQ ID NO: 4963 - DNA, 1152 bp, Homo sapiens
caggctttgtcatggcggctgctgctgcacgctggaaccatgtgtgggtcggcaccgagactgggatcttgaaaggggtaaatcttcagcgaaaacaggcggcgaacttcacggccggaggacagccgcggcgcgaggaggcagtgagcgccctgtgttggggcaccggcggcgagacccagatgctggtgggctgcgcggacaggacggtgaagcacttcagcaccgaggatggcatattccagggtcagagacactgcccgggcggggagggcatgttccgtggcctcgcccaggccgacggcaccctcatcacatgtgtggattctgggattctcagagtctggcatgacaaggacaaggacacatcctctgacccactcctggaactgagagtgggccctggggtgtgtaggatgcgccaagacccagcacacccccatgtggttgccacaggtgggaaagagaatgctttgaagatatgggacctgcagggctctgaggaacctgtgttcagggccaagaacgtgcggaatgactggctggacttgcgggttcccatctgggaccaggacatacagtttctcccaggatcacagaagcttgtcacctgcacagggtaccaccaggtccgtgtttatgatccagcatccccccagcgccggccagtcctagagaccacctatggagagtacccactaacagccatgaccctcactccgggaggcaactcagtgattgtgggaaacactcatgggcagctggcagaaattgaccttcggcaagggcgtctactgggctgtctgaaggggctggcaggcagtgtgcgtgggttgcagtgccacccttcaaagcctctactagcctcctgtggcttggacagagtcttgaggatacacaggatccagaatccacggggtctggagcataaggatgagccccaagagcctcaagaacccaacaaggtgcccctagaagacacagagacagatgaactttgggcatccttggaggcagctgccaagcggaagctctcgggtttggagcagccccaaggagctctccaaacgagacggagaaagaagaagcggcctgggtccaccagcccctgacgcccctgtgcccactttgtaaataaactgctgaacaccc

SEQ ID NO: 4964 - DNA, 1429 bp, Homo sapiens
ggcggagcggccaacatggcggaacgcaggagacacaagaagcggatccaggaagttggtgaaccatctaaagaagagaaggctgtggccaagtatcttcgattcaactgtccaacaaagtccaccaatatgatgggtcaccgggttgattattttattgcttcaaaagcagtggactgtcttttggattcaaagtgggcaaaggccaagaaaggagaggaagctttatttacaaccagggagtctgtggttgactactgcaacaggcttttaaagaagcagttttttcaccgagccctaaaagtaatgaaaatgaaatatgataaagacataaagaaagaaaaagataaaggaaaagctgaaagtggaaaagaagaagataaaaagagcaagaaagaaaatataaaggatgagaagacaaaaaaagaaaaagagaaaaaaaaagatggtgaaaaggaagaatccaaaaaggaggaaactccaggaactcctaaaaagaaggaaactaagaaaaaattcaaacttgagccacatgatgatcaggtttttctggatggaaatgaggtgtatgtatggatctatgacccagttcactttaaaacatttgtcatgggattaattcttgtgattgcagtaatagcggccaccctcttccccctttggccagcagaaatgagagtaggtgtttattacctcagtgtgggtgcaggctgttttgtagccagtattcttctccttgctgttgctcgatgcattctatttctcatcatttggctcataactggaggaaggcaccacttttggttcttgccaaatctgactgctgatgtgggcttcattgactccttcaggcctctgtacacacatgaatacaaaggaccaaaagcagacttaaagaaagatgagaagtctgaaaccaaaaagcaacagaagtccgacagtgaggaaaagtcagacagtgagaaaaaggaagatgaggaggggaaagtaggaccaggaaatcatggaacagaaggctcggggggagaacggcattcagacacggacagtgacaggagggaagatgatcgatcccagcacagtagtggaaatggaaatgattttgaaatgataacaaaagaggaactggaacagcaaacagatggggattgtgaagaggatgaggaagaggaaaatgatggagaaacacctaaatcttcacatgaaaaatcataatctgactaattttgggactgaatgaataagtacaagaggaaatccacactgatttgtacgtctgactgagagaaagatggtcgtctccagcagagaaagtgaacagcatttgttggaaggtgatggctctccctcctccctccccatttcattggcgtaacgtaaagtgtattctgtacataatttacaaataaaacattttattttaattgtt

SEQ ID NO: 4965 - DNA, 1511 bp, Homo sapiens
tgcgttttgagtctcgggacccctgttggagagactatggcgctcaacaagaatcactcggagggcggcggagtgatcgtcaataacaccgagagcatcctaatgtcctatgatcacgtggaactcacattcaatgacatgaagaacgtgccagaagccttcaaagggaccaagaaaggcactgtctaccttaccccttaccgggtcatctttctgtccaagggcaaggatgccatgcagtccttcatgatgccattttatctcatgaaagactgtgagatcaagcagcccgtatttggtgcaaactacatcaagggaacagtgaaggcggaagcgggaggtggctgggaaggctctgcttcctacaagttgactttcacggcagggggcgccattgagttcggacagcggatgctccaggtggcatctcaagcctccagaggtgaagtccccagtggagcctatggctactcttacatgcccagcggggcctatgtctatcccccgccagtcgccaatggaatgtacccctgccctcctggctacccctatccaccgcccccacctgagttctatccaggaccccccatgatggacggggccatgggatacgtgcagcccccaccaccgccctaccctgggcccatggaacctccggtcagcggccccgatgtcccctccactcctgcagccgaagccaaggccgcagaagcagccgccagcgcctattacaacccaggcaatcctcacaacgtctacatgcccacgagccagccgccgccacctccctactacccaccggaagataagaagacccagtaggccctcctgcctccctgcctcccaccctcatctctctaccctacccctcccatcggggctgtgctggggcttggggaggggagggggcgccttgttctccctccaggtctgatcataaacaattaccaggaactagcattgtgggacattagggcccccggcctcgggagaggtgccgcccagcttcccatgccagcccggagcccacagtgctgcccagcgtacctccctcaccgtctggggctcttctgggagcacggagcatcccctgttcctgtttcactctcagcttctcccctcgaagggactctctggccacctcctccaccgcagtccagctccctcagtctggcacccactgctacactcagcctcatgagccacttcagaccagccagaaggagcttcctgactggaaccagagaatgcatgtctgtccacttggtggctgctgggtggggccgggaacaagggcccctgaccctgtgtgctggccgggacctgccaccagccccccagcctgcttcttccccttaagctttgtgcccctggatgcgctaacattcactcttgtttgtccctggactggccatgaagtgaggagatggttatttaaagagaattccctatttatttgacaaaaaatccagttaatatattaatgtgaaataaaccctgtttgcacctcg

SEQ ID NO: 4966 - DNA, 3392 bp, Homo sapiens
agatgagttcctgtccagtctggagagctatgagatcgccttccccacccgcgtggaccacaacggggcactgctggccttctcgccacctcctccccggaggcagcgccgcggcacgggggccacagccgagtcccgcctcttctacaaagtggcctcgcccagcacccacttcctgctgaacctgacccgcagctcccgtctactggcagggcacgtctccgtggagtactggacacgggagggcctggcctggcagagggcggcccggccccactgcctctacgctggtcacctgcagggccaggccagcacctcccatgtggccatcagcacctgtggaggcctgcacggcctgatcgtggcagacgaggaagagtacctgattgagcccctgcacggtgggcccaagggttctcggagcccggaggaaagtggaccacatgtggtgtacaagcgttcctctctgcgtcacccccacctggacacagcctgtggagtgagagatgagaaaccgtggaaagggcggccatggtggctgcggaccttgaagccaccgcctgccaggcccctggggaatgaaacagagcgtggccagccaggcctgaagcgatcggtcagccgagagcgctacgtggagaccctggtggtggctgacaagatgatggtggcctatcacgggcgccgggatgtggagcagtatgtcctggccatcatgaacattgttgccaaacttttccaggactcgagtctgggaagcaccgttaacatcctcgtaactcgcctcatcctgctcacggaggaccagcccactctggagatcacccaccatgccgggaagtccctggacagcttctgtaagtggcagaaatccatcgtgaaccacagcggccatggcaatgccattccagagaacggtgtggctaaccatgacacagcagtgctcatcacacgctatgacatctgcatctacaagaacaaaccctgcggcacactaggcctggccccggtgggcggaatgtgtgagcgcgagagaagctgcagcgtcaatgaggacattggcctggccacagcgttcaccattgcccacgagatcgggcacacattcggcatgaaccatgacggcgtgggaaacagctgtggggcccgtggtcaggacccagccaagctcatggctgcccacattaccatgaagaccaacccattcgtgtggtcatcctgcagccgtgactacatcaccagctttctagactcgggcctggggctctgcctgaacaaccggccccccagacaggactttgtgtacccgacagtggcaccgggccaagcctacgatgcagatgagcaatgccgctttcagcatggagtcaaatcgcgtcagtgtaaatacggggaggtctgcagcgagctgtggtgtctgagcaagagcaaccggtgcatcaccaacagcatcccggccgccgagggcacgctgtgccagacgcacaccatcgacaaggggtggtgctacaaacgggtctgtgtcccctttgggtcgcgcccagagggtgtggacggagcctgggggccgtggactccatggggcgactgcagccggacctgtggcggcggcgtgtcctcttctagccgtcactgcgacagccccaggccaaccatcgggggcaagtactgtctgggtgagagaaggcggcaccgctcctgcaacacggatgactgtccccctggctcccaggacttcagagaagtgcagtgttctgaatttgacagcatccctttccgtgggaaattctacaagtggaaaacgtaccggggagggggcgtgaaggcctgctcgctcacgtgcctagcggaaggcttcaacttctacacggagagggcggcagccgtggtggacgggacaccctgccgtccagacacggtggacatttgcgtcagtggcgaatgcaagcacgtgggctgcgaccgagtcctgggctccgacctgcgggaggacaagtgccgagtgtgtggcggtgacggcagtgcctgcgagaccatcgagggcgtcttcagcccagcctcacctggggccgggtacgaggatgtcgtctggattcccaaaggctccgtccacatcttcatccaggatctgaacctctctctcagtcacttggccctgaagggagaccaggagtccctgctgctggaggggctgcctgggaccccccagccccaccgtctgcctctagctgggaccacctttcaactgcgacaggggccagaccaggtccagagcctcgaagccctgggaccgattaatgcatctctcatcgtcatggtgctggcccggaccgagctgcctgccctccgctaccgcttcaatgcccccatcgcccgtgactcgctgcccccctactcctggcactatgcgccctggaccaagtgctcggcccagtgtgcaggcggtagccaggtgcaggcggtggagtgccgcaaccagctggacagctccgcggtcgccccccactactgcagtgcccacagcaagctgcccaaaaggcagcgcgcctgcaacacggagccttgccctccagactgggttgtagggaactggtcgctctgcagccgcagctgcgatgcaggcgtgcgcagccgctcggtcgtgtgccagcgccgcgtctctgccgcggaggagaaggcgctggacgacagcgcatgcccgcagccgcgcccacctgtactggaggcctgccacggccccacttgccctccggagtgggcggccctcgactggtctgagtgcacccccagctgcgggccgggcctccgccaccgcgtggtcctttgcaagagcgcagaccaccgcgccacgctgcccccggcgcactgctcacccgccgccaagccaccggccaccatgcgctgcaacttgcgccgctgccccccggcccgctgggtggctggcgagtggggtgagtgctctgcacagtgcggcgtcgggcagcggcagcgctcggtgcgctgcaccagccacacgggccaggcgtcgcacgagtgcacggaggccctgcggccgcccaccacgcagcagtgtgaggccaagtgcgacagcccaacccccggggacggccctgaagagtgcaaggatgtgaacaaggtcgcctactgccccctggtgctcaaatttcagttctgcagccgagcctacttccgccagatgtgctgcaaaacctgccatggccactagggggcgcgcggcacccggagccacagctggcggggtctccgccgccagccctgcagcgggccggccagagggggccccgggggggcgggaactgggagggaagggtgagacggagccggaagttatttattgggaacccctgcagggccctggctggggggatgga

SEQ ID NO: 4967 - DNA, 5119 bp, Homo sapiens
agatttaatccagagactgacttcactatagaacccacagttgtatcaatggttggggaaagatagtggcaacaggcaaaggagaaacagctctgacatacaaagaaaatgagtatgctaaagccaagtgggcttaaggcccccaccaagatcctgaagcctggaagcacagctctgaagacacctacggctgttgtagctccagtagaaaaaaccatatccagtgaaaaagcatcaagcactccatcatctgagactcaggaggaatttgtggatgactttcgagttggggagcgagtttgggtgaatggaaataagcctggatttatccagtttcttggagaaacccagtttgcaccaggccagtgggctggaattgttttagatgaacccataggcaagaacgatggttcggtggcaggagttcggtatttccagtgtgaacctttaaagggcatatttacccgaccttcaaagttaacaaggaaggtgcaagcagaagatgaagctaatggcctgcagacaacgcccgcctcccgagctacttcaccgctgtgcacttctacggccagcatggtgtcttcctccccctccaccccttcaaacatccctcagaaaccatcacagccagcagcaaaggaaccttcagctacgcctccgatcagcaaccttacaaaaactgccagtgaatctatctccaacctttcagaggctggctcaatcaagaaaggagaaagagagctcaaaatcggagacagagtattggttggtggcactaaggctggtgtagtccggtttcttggggagaccgactttgccaagggggagtggtgtggcgtggagttagatgagccacttgggaagaatgatggcgctgttgctggaacaaggtattttcagtgtcaacccaaatatggcttgttcgctcctgtccacaaagttaccaagattggcttcccttccactacaccagccaaagccaaggccaacgcagtgaggcgagtgatggcgaccacgtccgccagcctgaagcgcagcccttctgcctcttccctcagctccatgagctcagtggcctcctctgtgagcagcaggcccagtcggacaggactattgactgaaacctcctcccgttacgccaggaagatctccggtaccactgccctccaggaggccctgaaggagaagcagcagcacattgagcagctgctggcggaacgggatctggagagggcggaggtggccaaggccacgagccacgtgggggagatagagcaggagctagctctggcccgggacggacatgaccagcatgtcctggaattggaagccaaaatggaccagctgcgaacaatggtggaagctgctgacagggagaaggtggagcttctcaaccagcttgaagaggagaaaaggaaggttgaggaccttcagttccgggttgaagaagaatcaattaccaaaggtgatcttgaggtggctacagtttcagaaaagtcacgtataatggaactggagaaagacctagcattgagagtacaggaagtagctgagctccgaagaaggctagagtccaataagcctgctggggatgtggacatgtcactttcccttttgcaagagataagctctttgcaagaaaagttagaagtcacccgtactgaccaccagagagaaataacttctctgaaggagcattttggagcccgggaagaaactcatcagaaggagataaaggctctgtataccgccacggaaaagctttccaaagagaacgagtcattgaaaagcaagctggagcatgccaacaaagagaactcagatgtgatagctctatggaagtccaaactggagactgccatcgcatcccaccagcaggcgatggaagaactgaaggtatctttcagcaaagggcttggaacagagacggcagaatttgctgaactaaaaacacaaatagagaaaatgagactagattaccaacacgaaatagaaaatttgcagaatcaacaagactctgaacgggctgcccatgctaaagagatggaagccttgagggctaaactgatgaaagttattaaagaaaaggaaaacagtctggaagccatcaggtcgaaactggacaaagcagaagaccagcatctcgtagaaatggaagacacgttaaacaaattacaggaagctgaaataaaggtaaaggagctagaggtactgcaagccaaatgcaatgaacaaaccaaggttattgataattttacatcacagctcaaggctactgaagaaaagctcttggatcttgatgcacttcggaaagccagttccgaaggtaaatcggaaatgaagaaacttagacagcagcttgaggcagctgagaaacagattaaacatttagagattgaaaagaatgctgaaagtagcaaggctagtagcattaccagagagctccaggggagagagctaaagcttactaaccttcaggaaaatttgagtgaagtcagtcaagtgaaagagactttggaaaaagaacttcagattttgaaagaaaagtttgctgaagcttcagaggaggcagtctctgttcagagaagtatgcaagaaactgtaaataagttacaccaaaaggaggaacagtttaacatgctgtcttctgacttggagaagctgagagaaaacttagcagatatggaggcaaaatttagagagaaagatgagagagaagagcagctgataaaggcaaaggaaaaactggaaaatgacattgcagaaataatgaagatgtcaggagataactcttctcagctgacaaaaatgaacgatgaattacgtctgaaagaaagagatgtagaagaattacagctaaaacttacaaaggctaatgaaaatgcaagttttctgcaaaaaagtattgaggacatgactgtcaaagctgaacagagccagcaagaagcagctaaaaagcatgaggaagaaaagaaagaattggagaggaaattgtcggacctggaaaagaaaatggaaacaagccacaaccagtgtcaggagctgaaagccaggtatgagagagccacttctgagacaaaaaccaagcatgaagaaatcctacagaacctccagaagacgctgctggacacagaggacaagctgaagggcgcacgggaggagaacagtggcttgctgcaggagctggaggagctgagaaagcaagccgacaaagccaaagctgctcaaacagcggaagatgccatgcagataatggaacagatgaccaaagagaagactgagactctggcctccttggaggacaccaagcaaacaaatgcaaaactacagaatgaattggacacacttaaagaaaacaacttgaaaaatgtggaagagctgaacaaatcaaaagaactcctgactgtagagaatcaaaaaatggaagaatttaggaaagaaatagaaaccctaaagcaggcagcagctcagaagtcccagcagctttcagcgttgcaagaagagaacgttaaacttgctgaggagctggggagaagcagggacgaagtcacaagtcatcaaaagctggaagaagaaagatctgtgctcaataatcagttgttagaaatgaaaaaaagagaatccaagttcataaaagacgcagatgaagagaaagcttccttgcagaaatccatcagtataactagtgccttactcacagaaaaggatgccgagctggagaaactgagaaatgaggtcacagtgctcaggggagaaaacgcctctgccaagtccttgcattcagttgttcagactctagagtctgataaggtgaagctcgagctcaaggtaaagaacttggagcttcaactcaaagaaaacaagaggcagctcagcagctcctcaggtaatacagacactcaggcagacgaggatgaaagagcccaggagagtcagattgatttcctaaattcagtaatagtggaccttcaaaggaagaatcaagacctcaagatgaaggtggagatgatgtcagaagcagccctgaatgggaacggggatgacctaaacaattatgacagtgatgatcaggagaaacagtccaagaagaaacctcgcctcttctgtgacatttgtgactgctttgatctccacgacacagaggattgtcctacccaggcacagatgtcagaggaccctccccattccacacaccatggcagtcggggtgaggaacgcccatactgtgaaatctgtgagatgtttggacactgggccaccaactgcaatgacgacgaaaccttctgatgaagcctccagtggagaactgggcttgctcagacgcactcgcattgacacaacgtaacaccagcattgtgtgtgcagacttcaggagaactcatgttattttttaaccccgtcaacaaatctaggaaaatattttgatcttcaacaaattgccctttagtctccccgtatgagttagaataataaatatttagtaggtgagttttcacctcgaattttgttttcttgatttttacgtttgaagacattgcaccagatgccattacatttattggccccccgaccttgtagaaaaacccctaccctcacaataccttatttaagtaactttaaattatgccgttacttttcatatttgcactaagatatttccaggctgcatttgtatatttagattttttggttaagctttgacactggaatgagttgaaaaaatgtgccattttgcattttcatctactcatttaaagtattttattcttattcaaagaaatatctgagctctttgcactacctgttatcagtagtgcctttacttcaggcttgataatacttaggtgtgattataaaatcatgaagcaggtaaagggaggggcaagcccccaaactgctgtggggacattttataatctatatgctgcacccacttaatctactgtggtgttttgtttattagttttgcataatttcagcttctatatattgtatgtatatattttttaaaaatctatattttgggaaaaaaacatacacaatgtgtctttctttttggacatttacctttttgaaaaagaaaacacttaaaatgatcattaggacataacagactagg

SEQ ID NO: 4968 - DNA, 1182 bp, Homo sapiens
  misc_feature (721)..(778): n is a, c, g, or t
ggatggaagctccggccgcggagtgatggtggcctcagcgaagatgggccgggcagggaccatggcagtggcagcagaggtggcaggggcggggcggctggcggtagaggaggctgtggtcctcagggggctgtaggtggaggtatggctcgggccagcagcaggaacggcagcgaggaggcctggggggcacttcgggcgctgcaacagcagcttcgagagctgtgcccaggagtgaacaaccagccctacctctgtgagagtggtcactgctgcagggagactggctgctgcacctactactatgagctctggtggttctggctgctctggactgtcctcatcctctttagctgctgttgggccttccgccaccgacgagctaaactcaggctgcaacaacagcagcggcagcgtgaaatcaacttgttggcctatcatggggcatgccatggggctggtcctttccctaccggttcactgcttgaccttcgcctcctcagcaccttcaagcccccagcctacgaggatgtggttcaccgcccaggcaccaccccccgccccccgcctccgtgccttatactgtcgccccaggccgccccttgactgcttccagtgaacaaacctgctgttcctcctcatccagctgccctgcccattttgaaggaacaaatgtggaaggtgtttcctcccaccagagtgccctccctcatcaggaggnnnnnnnnnnnnnnnnnnnnnnnnnnnnnnnnnnnnnnnnnnnnnnnnnnnnnnnnnntttaactggcgactccggtattaagctctgcccttgtcctgcctccggtgaggctgagccagtcaaggaggtgagggttagtgccaccctgccagatctggaggactactccccgtgtgcactgcccccagattctgtaccgcaggtctttcccatggggctgtcttccagtgaaggggacatcccatacgtagttttgagagggtggatgggttacttgcccaccagaaacagccctagtcccaactccttgcgttccttttggcccctccctgcctacctagaatctgcctgaaagggctggagccctgaggagaggggcagtattgggggactgtgctagctttacccccgcaagacatacacaggagcctttgatctcattaaagagacgtgaaccagct

SEQ ID NO: 4969 - DNA, 1583 bp, Homo sapiens
agctgattcatagccccggcccgggccgcctctgcacgtccgccccggagcccgcacccgcgccccacgcgccgccgaggactcggcccggctcgtggagcccttcgcccgcggcaaaaccagaactgatggctctatttgcagtctttcagacaacattcttcttaacattgctgtccttgaggacttaccagagtgaagtcttggctgaacgtttaccattgactcctgtatcacttaaagtttccaccaattctacgcgtcagagtttgcacttacaatggactgtccacaaccttccttatcatcaggaattgaaaatggtatttcagatccagatcagtaggattgaaacatccaatgtcatctgggtggggaattacagcaccactgtgaagtggaaccaggttctgcattggagctgggaatctgagctccctttggaatgtgccacacactttgtaagaataaagagtttggtggacgatgccaagttccctgagccaaatttctggagcaactggagttcctgggaggaagtcagtgtacaagattctactggacaggatatattgttcgttttccctaaagataagctggtggaagaaggcaccaatgttaccatttgttacgtttctaggaacattcaaaataatgtatcctgttatttggaagggaaacagattcatggagaacaacttgatccacatgtaactgcattcaacttgaatagtgtgcctttcattaggaataaagggacaaatatctattgtgaggcaagtcaaggaaatgtcagtgaaggcatgaaaggcatcgttctttttgtctcaaaagtacttgaggagcccaaggacttttcttgtgaaaccgaggacttcaagactttgcactgtacttgggatcctgggacggacactgccttggggtggtctaaacaaccttcccaaagctacactttatttgaatcattttctggggaaaagaaactttgtacacacaaaaactggtgtaattggcaaataactcaagactcacaagaaacctataacttcacactcatagctgaaaattacttaaggaagagaagtgtcaatatcctttttaacctgactcatcgaggtgagactagagttgtcacagcccaccgtggccactaacgtgtctttgtttcacagactgtgtgatcaagtaaatgtgctgtagatctttgcctcattcacagcggaggtgagagttagaatttatacctattgttcatgccacgtttctcctcatggatgcacgcatcccctattatttgtttcttttaataatgtcacgagcaccaatgagcttactacccaacttcaaaactaggactctaacaataacttctgtcatatctcatcctgtaacgcccccaccttcgctccttccgccaagataattatcactttaaattgtgtgcgtgtgtattctcatttcttatgtgatggtaaaaatgcctttattttgtttggttttaatgcatagaaaggacatcaagctgtatgtaataattcagtaattatgtttatataatattaaattgctaatatttgccc

SEQ ID NO: 4970 - DNA, 1428 bp, Homo sapiens
cggctgagtggcacttaagcgggccatgccatgcaaccttgggcgctgccaaccgtgggcgagctctgggtgtgcgggcggcctggcgcggcgctccgctgtgtcagcgtgttatgatgccgtcccgtaccaacctggctactggaatccccagtagtaaagtgaaatattcaaggctctccagcacagacgatggctacattgaccttcagtttaagaaaacccctcctaagatcccttataaggccatcgcacttgccactgtgctgtttttgattggcgcctttctcattattataggctccctcctgctgtcaggctacatcagcaaagggggggcagaccgggccgttccagtgctgatcattggcattctggtgttcctacccggattttaccacctgcgcatcgcttactatgcatccaaaggctaccgtggttactcctatgatgacattccagactttgatgactagcacccaccccatagctgaggaggagtcacagtggaactgtcccagctttaagatatctagcagaaactatagctgaggactaaggaattctgcagcttgcagatgtttaagaaaataatggccagattttttgggtccttcccaaagatgttaagtgaacctacagttagctaattaggacaagctctatttttcatccctgggccctgacaagtttttccacaggaatatgtatcatggaagaatagaggttattctgtaatggaaaagtgttgcctgccaccaccctctgtagagctgagcatttcttttaaatagtcttcattgccaatttgttcttgtagcaaatggaacaatgtggtatggctaatttcttattattaagtaatttattttaaaaatatctgagtatattatcctgtacacttatccctaccttcatgttccagtggaagaccttagtaaaatcaaagatcagtgagttcatctgtaatattttttttacttgctttcttactgacagcaaccaggaatttttttatcctgcagagcaagttttcaaaatgtaaatacttcctctgtttaacagtccttggaccattctgatccagttcaccagtaggttggacagcatataatttgcatcattttgtcccttgtaaatcaagatgttctgcagattattcctttaacggccggacttttggctgtttcctaatgaaacatgtagtggttattatttagagtttatagccgtattgctagcaccttgtagtatgtcatcattctgctcatgattccaaggatcagcctggatgcctagaggactagatcaccttagtttgattctattttttagcttgcaaaaagtgacttatattccaaagaaattaaaatgttgaaatccaaatcctagaaataaaatgagttaacttcaaacatttcagaaaac

SEQ ID NO: 4971 - DNA, 2739 bp, Homo sapiens
ttcaacatggcggcgggagtgtccgcggtggtggcggtgcaagagagctgagggaggcgcgagggcgcggagttccaggtcgagcagttaggccgcgagcgactgcggcgccgagccggccgcaccgagtccccggcaccatgtttgggaagaggaagaagcgggtggagatctccgcgccgtccaacttcgagcaccgcgtgcacacgggcttcgaccagcacgagcagaagttcacggggctgccccgccagtggcagagcctgatcgaggagtcggctcgccggcccaagcccctcgtcgaccccgcctgcatcacctccatccagcccggggcccccaagaccatcgtgcggggcagcaaaggtgccaaagatggggccctcacgctgctgctggacgagtttgagaacatgtcggtgacacgctccaactccctgcggagagacagcccgccgccgcccgcccgtgcccgccaggaaaatgggatgccagaggagccggccaccacggccagagggggcccagggaaggcaggcagccgaggccggttcgccggtcacagcgaggcgggtggcggcagtggtgacaggcgacgggcggggccagagaagaggcccaagtcttccagggagggctcagggggtccccaggagtcctcccgggacaaacgccccctctccgggcctgatgtcggcaccccccagcctgctggtctggccagtggggcgaaactggcagctggccggccctttaacacctacccgagggctgacacggaccacccatcccggggtgcccagggggagcctcatgacgtggcccctaacgggccatcagcggggggcctggccatcccccagtcctcctcctcctcctcccggcctcccacccgagcccgaggtgcccccagccctggagtgctgggaccccacgcctcagagccccagctggcccctccagcctgcacccccgccgcccctgctgttcctgggccccctggcccccgctcaccacagcgggagccacagcgagtatcccatgagcagttccgggctgccctgcagctggtggtggacccaggcgacccccgctcctacctggacaacttcatcaagattggcgagggctccacgggcatcgtgtgcatcgccaccgtgcgcagctcgggcaagctggtggccgtcaagaagatggacctgcgcaagcagcagaggcgcgagctgctcttcaacgaggtggtaatcatgagggactaccagcacgagaatgtggtggagatgtacaacagctacctggtgggggacgagctctgggtggtcatggagttcctggaaggaggcgccctcaccgacatcgtcacccacaccaggatgaacgaggagcagatcgcggccgtgtgccttgcagtgctgcaggccctgtcggtgctccacgcccagggcgtcatccaccgggacatcaagagcgactcgatcctgctgacccatgatggcagggtgaagctgtcagactttgggttctgcgcccaggtgagcaaggaagtgccccgaaggaagtcgctggtcggcacgccctactggatggccccagagctcatctcccgccttccctacgggccagaggtagacatctggtcgctggggataatggtgattgagatggtggacggagagcccccctacttcaacgagccacccctcaaagccatgaagatgattcgggacaacctgccaccccgactgaagaacctgcacaaggtgtcgccatccctgaagggcttcctggaccgcctgctggtgcgagaccctgcccagcgggccacggcagccgagctgctgaagcacccattcctggccaaggcagggccgcctgccagcatcgtgcccctcatgcgccagaaccgcaccagatgaggcccagcgcccttcccctcaaccaaagagccccccgggtcacccccgccccactgaggccagtagggggccaggcctcccactcctcccagcccgggagatgctccgcgtggcaccaccctccttgctgggggtagatgagaccctactactgaactccagttttgatctcgtgacttttagaaaaacacagggactcgtgggagcaagcgaggctcccaggacccccaccctctgggacaggccctcccccatgttcttctgtctccaggaagggcagcggccctcccatcactggaagtctgcagtgggggtcgctgggggtggagagaacactaagaggtgaacatgtatgagtgtgtgcacgcgtgtgagtgtgcatgtgtgtgtgtgcaaaggtccagccaccccgtcctccagcctgcaaggggtgtctggcgccttgcctgacacccagccccctctccccctgagccattgtgggggtcgatcatgaatgtccgaagagtggccttttcccgtagccctgcgccccctttctgtggctggatggggagacaggtcagggccccccaccctctccagcccctgcagcaaatgactactgcacctggacagcctcctcttttctagaagtctatttatattgtcattttataacactctagcccctgcccttattgggggacagatggtccctgtcctgcggggtggccctggcagaaccactgcctgaagaaccaggttcctgcccggtcagcgcagccccagcccgcccacccctgcctcgagttagttttacaattaaaacattgtcttgttt

SEQ ID NO: 4972 - DNA, 1723 bp, Homo sapiens
gcgcgggcggctgggacgcagctgcccccgctcggcgcccgctgcacccttagcagccactgccacctgggcccggagcctccacgatctcgcccggcgattgtgggcaggggcgcctccggatcgatcttctgaaattcaagttttcaagatgaagtttttattgacaactgcctttttaattttaatttccttgtgggtggaagaagcctattctaaggaaaagtcttcaaagaaagggaaggggaaaaagaagcagtatctatgcccatctcagcagtcagcagaggaccttgcccgagtacctgccaactccactagcaatatcttgaacaggttattggtcagttatgatcccaggataagaccaaacttcaaaggcattcctgttgatgtagtagtcaacatttttattaacagttttggatccattcaagaaacaacaatggactatagagttaacatcttcctgagacaaaaatggaatgaccccaggctgaagctccccagtgattttaggggttcagatgcactgacagtggatccaacaatgtacaagtgtttatggaaacctgatttattttttgcaaatgaaaaaagtgccaattttcatgatgtgacccaggaaaacatcctcctctttatttttcgtgatggagatgtccttgtcagcatgaggttatctattactctttcatgccctttggacttgacattgtttcccatggatacacaacgttgcaagatgcaactggagagctttggttacacaactgatgatttacgatttatctggcagtcaggagatcctgtgcaattagaaaaaattgccttgcctcaatttgatatcaaaaaggaagatattgaatatggtaactgtacaaaatactataaaggcacgggctactacacatgcgtggaagtcatcttcaccctgaggaggcaggtcggcttttacatgatgggggtctacgccccaactctgctcattgttgttctctcctggctttccttctggatcaacccggacgcgagtgctgccagagtgcccctgggtatcttctcagtcctcagcttggcctctgagtgcacaacccttgccgctgagcttcccaaagtttcctatgtgaaggctcttgatgtttggcttattgcttgccttctctttgggtttgcttccctggtggagtatgcagttgtccaggtgatgctgaacaaccccaaaagggttgaagctgaaaaagccagaattgctaaggctgagcaagcagatggaaaaggtggaaatgtggctaaaaagaatactgtgaatggaacagggactcctgttcatattagcactttgcaggttggtgagaccagatgcaaaaaagtttgtacttctaagtctgatctgagatctaatgacttcagcattgttggaagcttaccaagagattttgaactatccaattatgactgctatggaaaacccattgaagttaacaacggacttgggaaatctcaggctaagaacaacaagaagcctccccctgcgaaacctgttattccaacagcagcaaagcgaattgatctttatgcaagagcattgtttcctttctgcttcttgttcttcaatgttatatattggtctatatatttatgataaatcttttccatttgtacaaaataaaattccatttcattgtgacctactcctttcataaatgccaatctgtgagaa

SEQ ID NO: 4973 - DNA, 3013 bp, Homo sapiens
ggtaagagaagactggaagcatgtcggagttttggttaatttctgcccctggcgataaggaaaatttgcaagctctggagaggatgaatactgtaacctccaagtccaacctgtcttataataccaaattcgctattcctgacttcaaggtggggaccttggattccctggttggcctctctgatgagttggggaaactcgacacctttgctgaaagcctcataaggagaatggctcagagcgtggtggaagtcatggaggactcaaaggggaaggtccaggagcacctcctggcaaacggagttgacttaacatcctttgtgacccactttgaatgggacatggccaaatatcctgtcaagcagccgctcgtgagtgtggtggacacaatagccaagcaactggcgcagatcgagatggacctgaagtcccgaacggccgcctacaacactctgaagacaaacctggagaacctggaaaagaaatccatggggaacctcttcacccggacactgagtgatattgtgagcaaagaggacttcgtgctggattctgaatatctcgtcacacttctggtcatcgtccccaaaccaaactactcacaatggcaaaaaacctacgaatctctctcagacatggtggtccctcgatcaaccaaactcattactgaggacaaggaagggggccttttcactgtgactctgtttcgaaaagtgattgaagatttcaaaaccaaggccaaagaaaacaagttcactgttcgtgaattttactatgatgagaaggaaattgaaagggaaagggaggagatggccagattgctgtctgataagaagcaacagtatggccccctgctgcgctggctcaaggtgaacttcagtgaagccttcattgcctggatccacatcaaggccctgagagtgtttgtggagtccgtgctcaggtatggactaccagtgaacttccaggcagtgctcctgcagccgcataagaagtcatccaccaagcgtttaagagaggttctaaactctgtcttccgacatctggatgaagtagccgctacaagtatactggatgcatctgtggagatcccgggactgcaactcaataaccaagactattttccttatgtctacttccatattgaccttagtcttcttgactagaaaggccagctggcacctctgtctcatgttcgtgcagattattacagacacctctttcctttagccagagaatggttcaaatgtcttacagaactaagatctttttcagagaaattgctcacaaaagttagtgacagttgtatttatttttttaagttacaataaaatgctctcaagtcctttgaatgttccaacaaattcaaaacttcattttctgaatgttttacataaatgcgaactacctgttcgcattggtaacctgctgctgtatttcatgtcttaacggctattttgaggttcattaacaacatagaaagccttgaactgtataaccagctagattccttaataattagtcactagagacagcccaaagacaaatattgggcaggaaatcagttctcactgagcccggtttccatgtaaaatctctgttgtggtgggcataggtggcaccatctaaagaaaagaggtcttgttttttgtttaaaaaagtttgtggggaggaaagacatctgtgtatcacttcaaaatattgatttactgctaaacatcactctgaatttatgatgtggatactaacttcatacatttatcggcattgtccaaaatattttattctttaatggaaaaagccattaatattcaaatgaagggatcacattaaaaaaaacccatacataagaaacagcctccaagaacattcaagcagcagtcagagagaaaaatgtttcgacagccaagttttcttcaaaatattatgtgacagaatacgactcaattcaccggctacaacaattcatagaatttttcaatgttttcttgagatgcaaaagttcactgttgcagtgttttcaaatgaccaatcaagtactacttcttggttaaaaggccactggtagagtcatctgagtgtagagaatgtcccttcactgctggaaaaatccactggctcccaagaaaagaaaatggtctgaagcctctgttgtggctctcacaactcatctttccctaagtcatcaagctccacatcactgaggtcaatgtcatcctccacgggaagctgggagacgacagaaagccactgttagatctgcagaaggggacaccctggaaggtcaacatctcattttatggaagagcgactctctggagctactcctgctacaatccaggttctcctcagtctgactcctaccctgaccttcgtacctatgattatacggatggaaaagctcagaactcaggtgaaacatttcaacatcacatcactcaccattttaacactggaagccacttgaacgtgtccttttgaggagggtgggacacaacagtacagaaataagtgctaatttcaaagctatcattttctatttttctaagataaagtaaatgaattccaggttaaatgttcactttaaggtaataatcaggaaagcaaccttactactgaaatgtatcttggctgtcaagagtatcaaatgccatgcagcacttaaacttgtgataaggaagatgaagggtcttcagagaagaacctcttaaaaggcccacgggtgcaccagggctgaggtctgatgggaaggacttgactccaggtgcagagatgcacaggctcaagagagtaaaccaggactgctgcccgcacagcttccctcccgggcactcacctcgccatccctgccgtcccaaggctctctctcaacgatggtagggaaagccccgcctcctacaggtgccgtggagccacgcccaaaagagagctcccttagggaaaaatgaccaaaacacacacacacatttacaatggactgctggtgcagaagaataaacaactttaaaaataa

SEQ ID NO: 4974 - DNA, 2398 bp, Homo sapiens
gagaggctgtttaccagaacagcataacaagggcaggtctgactgcaaggctgggactgggaggcagagccgccgccaagggggcctcggttaaacactggtcgttcaatcacctgcaagacgaaggaggcaaggatgctgttggcctgggtacaagcattcctcgtcagcaacatgctcctagcagaagcctatggatctggaggctgtttctgggacaacggccacctgtaccgggaggaccagacctcccccgcgccgggcctccgctgcctcaactggctggacgcgcagagcgggctggcctcggcccccgtgtcgggggccggcaatcacagttactgccgaaacccggacgaggacccgcgcgggccctggtgctacgtcagtggcgaggccggcgtccctgagaaacggccttgcgaggacctgcgctgtccagagaccacctcccaggccctgccagccttcacgacagaaatccaggaagcgtctgaagggccaggtgcagatgaggtgcaggtgttcgctcctgccaacgccctgcccgctcggagtgaggcggcagctgtgcagccagtgattgggatcagccagcgggtgcggatgaactccaaggagaaaaaggacctgggaactctgggctacgtgctgggcattaccatgatggtgatcatcattgccatcggagctggcatcatcttgggctactcctacaagagggggaaggatttgaaagaacagcatgatcagaaagtatgtgagagggagatgcagcgaatcactctgcccttgtctgccttcaccaaccccacctgtgagattgtggatgagaagactgtcgtggtccacaccagccagactccagttgaccctcaggagggcaccaccccccttatgggccaggccgggactcctggggcctgagcccccccagtgggcaggagcccatgcagacactggtgcaggacagcccaccctcctacagctaggaggaactaccactttgtgttctggttaaaaccctaccactcccccgcttttttggcgaatcctagtaagagtgacagaagcaggtggccctgtgggctgagggtaaggctgggtagggtcctaacagtgctccttgtccatcccttggagcagattttgtctgtggatggagacagtggcagctcccacagtgatgctgctgctaagggcttccaaacattgcctgcacccctggaactgaaccagggatagacggggagctcccccaggctcctctgtgctttactaagatggcctcagtctccactgtgggcttgagtggcatacactgttattcatggttaaggtaaagcaggtcaagggatggcattgaaaaaatatatttagtttttaaaatatttgggatggaactccctactgacctctgagaactggaaacgagtttgtacagaagtcagaactttgggttgggaatgagatctaggttgtggctgctggtatgcttcagcttgctggcaatgatgtgccttgacaaccgtgggccaggcctgggcccagggactcttcctgtttcataaggaaaggaagaattgcactgagcattccacttaggaagaggatagagaaggatctgctccgcctttggccacaggagcagaggcagacctgggatgccccagtttctcttcagggatggatagtgacctgtcttcattttgcacaggtaagagagtagttagctaacctatgggaattatactgtggggccttgtgagctgcttctaagaggctaacctggaaactaagctcagaggcaaggtaataaagcacttcagggcttgctccccaagtgggcctgatttagcaggtggtcctgcgggcgtccaggtcagcaccttcctgtagggcactggggctagggtcacagcccctaactcataaagcaatcaaagaaccattagaaagggctcattaagccttttggacacaggaccccagagaggaaaaagtgacttgcccaaggtcgtaagcaagctactggcatggcaagagcccagcttcctgacggagcgcaacatttctccactgcactgtgctagcagctcagcagggcctctaacctgtgatgtcacactcaagaggccttggcagctcctagccatagagcttcctttccagaacccttccactgcccaatgtggagacgggttagtggggctttctatggagccatctgctttggggacctagacctcaggtggtctcttggtgttagtgatgctggagaagagaatattactggtttctacttttctataaaggcatttctctatatacatgttttatatacctcattctgacacctgcatatagtgtgggaaattgctctgcatttgacttaatt

SEQ ID NO: 4975 - DNA, 3778 bp, Homo sapiens
ggagggggcggggaggtaagcggaggctccgagctctaggccggccggcggtggcggcggcgaggccgggactcgggcttagggcctgctgtggaggcagcggcggacgccgagctaagcagtttctctggaaacccccctggtaagtgtggaggaggcgggacactctgacccaagacgaaaggcctgtagctccagccaaagaaaataaaccttaggagggagaaggaaaaaaaaaatccatcagctgttcctgagaacagcctgcattggaatctacagagaggacaactaatgtgagtgaggaagtgactgtatgtggactgtggagaaagtaagtcacgtgggcccttgaggacctggactgggttaggaacagttgtactttcagaggtgaggtgtcgagaagggaaagtgaatgtggtctggagtgtgtccttggccttggctccacagggtgtgctttcctctggggccgtcagggagctcatcccttgtgttctgccagggtggggtacggggtttgacactgaggagggtaacctgctggctggagcggcagagcagtggccttgatttgtcttttggaagattttaaaaaccaaaaagcataaacattctggtccttcagcaatgctttctctgaagaaatacttaacggaaggacttctccagttcaccattctgctgagtttgattggggtacgggtggacgtggatacttacctgacctcacagcttcccccactccgggagatcatcctggggcccagttctgcctatactcagacccagttccacaacctgaggaataccttggatggctatggtatccaccccaagagcatagacctggacaattacttcactgcccggcggctcctcagtcaggtgagggccctggacaggttccaggtgccaaccactgaggtaaatgcctggctggttcaccgagacccagaggggtctgtctctggcagtcagcccaactcaggcctcgccctcgagagttccagtggcctccaagatgtgacaggcccagacaacggggtgcgagaaagcgaaacggagcagggattcggtgaagatttggaggatttgggggctgtagcccccccagtcagtggagacttaaccaaagaggacatagatctgattgacatcctttggcgacaggatattgatctgggggctgggcgtgaggtttttgactatagtcaccgccagaaggagcaggatgtggagaaggagctgcgagatggaggcgagcaggacacctgggcaggcgagggcgcggaagctctggcacggaacctgctagtggatggagagactggggagagcttccctgcacagtttccagcagacatttccagcataacagaagcagtgcctagtgagagtgagccccctgctcttcaaaacaacctcttgtctcctcttctgaccgggacagagtcaccatttgatttggaacagcagtggcaagatctcatgtccatcatggaaatgcaggccatggaagtgaacacatcagcaagtgaaatcctgtacagtgcccctcctggagacccactgagcaccaactacagccttgcccccaacactcccatcaatcagaatgtcagcctgcatcaggcgtccctggggggctgcagccaggacttcttactcttcagccccgaggtggaaagcctgcctgtggccagtagctccacgctgctcccgttggcccccagcaattctaccagcctcaactccaccttcggctccaccaacctgacagggctcttctttccaccccagctcaatggcacagccaatgacacagcaggcccagagctgcctgaccctttggggggtctgttagatgaagctatgttggatgagatcagccttatggacctggccattgaagaaggctttaaccctgtgcaggcctcccagctggaggaggaatttgactctgactcaggcctttccttagactcgagccatagcccttcttccctaagcagctctgaaggcagttcttcctcttcttcctcctcctcttcctcttcttcctctgcttcttcctctgcctcttcctccttttctgaggaaggtgcggttggctacagctctgactctgagaccctggatctggaagaggccgagggtgctgtgggctaccagcctgagtattccaagttctgccgcatgagctaccaggatccagctcagctctcatgcctgccctacctggagcacgtgggccacaaccacacatacaacatggcacccagtgccctggactcagccgacctgccaccacccagtgccctcaagaaaggcagcaaggagaagcaggctgacttcctggacaagcagatgagccgggatgagcaccgagcccgagccatgaagatccctttcaccaatgacaaaatcatcaacctgcctgtggaggagttcaatgaactgctgtccaaataccagttgagtgaagcccagctgagcctcatccgagacatccggcgccggggcaagaacaagatggcggcgcagaactgccgcaagcgcaagctggacaccatcctgaatctggagcgtgatgtggaggacctgcagcgtgacaaagcccggctgctgcgggagaaagtggagttcctgcgctccctgcgacagatgaagcagaaggtccagagcctgtaccaggaggtgtttgggcggctgcgagatgagaacggacgaccctactcgcccagtcagtatgcgctccagtacgccggggacggcagtgtcctcctcatcccccgcacgatggccgaccagcaggcccggcggcaggagaggaagccaaaggaccggagaaagtgagcctggggaagaagggggtttgaagcccaccaagaccgaaactggagaagggctggacctggacctggacctggacctacagcggggacttaaatgccttcttatccaatatatcttctcagatgggatgactgcgggtcagtgtacaggaagaggcaggcactggctggctcagctccactcgggtggagtggaagtggccagaccatttagacggacagggtcctcaccctacccctttcctgtgaggcaggggtggtggtggagttgctggaggtagaggagctatgtggagcaaaggccgacagaggggaaggaatggacctgtgagaggaagggaaggtggcagaaagtctcatttcaggaaggacggtgttaactctttctgctccttgcattttgacatccctgaaggggagctcttggatatcattggccatgtttcaatcgaatggagccactgggccccaacactggctttgagatttagagtcaaagggtagagtgaacaggaaagggtcacgtggtcccatgttgcaacagccccaacatcacgcatgtcattcactgccttgccactccatctccctccgtgctccagccacccctgagctgaggctcccattgtctccatcagagcctgcatgtgtatgccgtcctcccctggtccggtgtttgtgttccccacccctcacagactgcctgagctcttctgtaagctggggtagggtgatggcagtgctccgggaactgggcctgcagccttcctcttctgggactgctgtgaggcagaggaatgatggagaatctagtgtagcagcctccaggcaggattcagcacaacactggggagtcacccttccctcgggcctctgcctaccaacaactgggcttatcactgggaaaacacaaaaaa

SEQ ID NO: 4976 - DNA, 1461 bp, Homo sapiens
cgaggctaaatcggctgcgttcctctcggaacgcgccgcagaaggggtcctggtgacgagtcccgcgttctctccttgaatccactcgccagcccgccgccctctgccgccgcaccctgcacacccgcccctctcctgtgccaggaacttgctactaccagcaccatgccctaccaatatccagcactgaccccggagcagaagaaggagctgtctgacatcgctcaccgcatcgtggcacctggcaagggcatcctggctgcagatgagtccactgggagcattgccaagcggctgcagtccattggcaccgagaacaccgaggagaaccggcgcttctaccgccagctgctgctgacagctgacgaccgcgtgaacccctgcattgggggtgtcatcctcttccatgagacactctaccagaaggcggatgatgggcgtcccttcccccaagttatcaaatccaagggcggtgttgtgggcatcaaggtagacaagggcgtggtccccctggcagggacaaatggcgagactaccacccaagggttggatgggctgtctgagcgctgtgcccagtacaagaaggacggagctgacttcgccaagtggcgttgtgtgctgaagattggggaacacaccccctcagccctcgccatcatggaaaatgccaatgttctggcccgttatgccagtatctgccagcagaatggcattgtgcccatcgtggagcctgagatcctccctgatggggaccatgacttgaagcgctgccagtatgtgaccgagaaggtgctggctgctgtctacaaggctctgagtgaccaccacatctacctggaaggcaccttgctgaagcccaacatggtcaccccaggccatgcttgcactcagaagttttctcatgaggagattgccatggcgaccgtcacagcgctgcgccgcacagtgccccccgctgtcactgggatcaccttcctgtctggaggccagagtgaggaggaggcgtccatcaacctcaatgccattaacaagtgccccctgctgaagccctgggccctgaccttctcctacggccgagccctgcaggcctctgccctgaaggcctggggcgggaagaaggagaacctgaaggctgcgcaggaggagtatgtcaagcgagccctggccaacagccttgcctgtcaaggaaagtacactccgagcggtcaggctggggctgctgccagcgagtccctcttcgtctctaaccacgcctattaagcggaggtgttcccaggctgcccccaacactccaggccctgccccctcccactcttgaagaggaggccgcctcctcggggctccaggctggcttgcccgcgctctttcttccctcgtgacagtggtgtgtggtgtcgtctgtgaatgctaagtccatcaccctttccggcacactgccaaataaacagctatttaaggggg

SEQ ID NO: 4977 - DNA, 1287 bp, Homo sapiens
tctctctgggtttcttgttcactaaggagtaacacagaggtcaggcagagaatgggggtctcgcaggctagggacctcagggagaggcctctgttgcccttttcagcaaggctggaaatgggatatgggcaggggacgtcttctctgacttcaccctagaccttctggctccaaatggggcccatggccttgagcacctgggaccagctctttccaccacagggcattgggcactgggcactttcttatcgagatagtcactcccacgtctggttcgtgatgggcttggccctccagctcagcacaactgcaagaatggattttgtattctctagacggacactgtccaagatggtagccattggccacatgcgacacatttttaatgaattaaaattaatcaagactggaaatgtcggccaggcctggtggctcatgcctgtaatcccagcactttgggaggccatagagggcggatgacttgaggtcaggagtttaagaccagcctggccaacatggtgaaacccatttctactaaaaacacaaaaattagctgggcatggtggtgtgttcctgtaatcccagctgcttgggaggctgaggcaggagaatcgcttgaacccaggaggcagagattggagtgagctgagatcatgccactgccctccagtggccaccacatccggcaaggcagatgggaccatttccttcatccagaacgttctgtggacatcactgctctaggttcctcccttatggagtctcacaagactgtctagccagcaagatctcttttccaaccaggccaggagcacctctccacccactgctgctggtctgaccgccttcctggaagtccctcttgaggcaggccctggagttagaagctgggcagaggcacccacagccttatcctttgccaatctctgactcaatgccacggccactgtagtgagctgaaccacctccagcagtcccctggcagaagcacctggaaaacatgcaatgggaaccttcaccctgaggccaggcccttcccatgctacccaacagtagacaggacaccctgtgttgttggctgcaccggggtgctgggatctgtggatccctggggcctggaagccactctcagcacatacagccactgtgttccgaggtccagtcagctggccgggaaggaattcaacacagccaaggacagaggtccatatgatgacgggtggatgctcgtgtgactttgctgaccttttatgttttctatgggcaataaaggccaagagagctccc

SEQ ID NO: 4978 - DNA, 2189 bp, Homo sapiens
cattttttgtttgttcatttatttttacaggttcgaatgcaagcactgaaatgtttctcagttttagcttttgaaaacccccaggtatcgatgaccctggtaaatggtaggctggagctttcagtggcacctacatgatttaattgatgaactttttagatttaaagaatttccttaatcattgttgtttgttttatttctagttttggttgatggagaattgttaccacagatttttgtgaagatgttacagagggataagcctattgagatgcagctcacatcagcaaaatgtttaacttacatgtgtagagctggagcaattcggacagatgataactgtattgtattaaagacattaccttgtttggttcgaatgtgcagtaaggagagattactagaggagagagttgaaggagctgagacacttgcctatctgattgaaccagatgttgagctacagagaatcgctagcataactgatcacctcattgccatgcttgctgattatttcaagtatcccagctcagtgagtgccatcactgatattaaaaggcttgatcatgatttaaaacatgctcacgaactccgccaggctgcattcaagctctatgcctctcttggagcaaatgatgaagacatccggaagaagatcattgagactgaaaatatgatggaccgaattgtgactggcttgtctgagtctagtgtcaaggtgcggttagctgccgtcagatgtttgcacagtttatccagatctgtgcagcagcttcgaaccagtttccaggatcatgctgtttggaaacctttaatgaaggttttacaaaatgcaccagatgaaatcctagtggtagcatcttccatgctgtgtaatcttcttcttgaattttctccaagcaaagagccaattttggaatcaggagccgtagagctactttgtggattaactcagagtgaaaatcctgctttacgagtgaatggaatttgggctttaatgaatatggcatttcaggctgaacaaaaaataaaagcagatattttacgaagcttgagtactgaacagctattccggttattatcagattcagatttgaatgtgctgatgaagacattgggacttcttagaaatctcctctccactcgtcctcatatagataaaataatgagtactcatggaaagcaaattatgcaagccgtcactcttattctagaaggggaacataacattgaggtcaaagagcagacactgtgcatcttagccaacatagcggatgggacaacagcaaaagatcttattatgaccaatgatgatatcctacagaaaatcaagtattacatgggccattcacatgttaaactgcagcttgcagccatgttttgtatatcaaacctcatatggaatgaagaggaaggttcacaagaacgccaggataaattacgagacatgggcatcgtagatattctacacaaactgagtcagtcaccagattcaaacctttgtgacaaggcaaagatggcactgcagcagtacctggcatgatgggagtgcccctgggcacctgcgagcatcccacctccttgtttaaggaagtacaggaaccagcctcatttgattccttctatttgcacaagtcaccttggactgcagggagctgttttgcaaaagcagtttagtaggcttagatctcaaattcatcttgagaacatttttttgaggtagtaatttcctcagaagactcttgtgttttgttttggtttttttttctgagctactcggactctttattagaacaatcaatcattttcctttggacctacaatttttgcctatgctgcagccactttgtgagtgagaatgaatatgtctgtgtgaacacacaggcatgcgtgtgtatgtgcacgtacatgggccagaatgaatggatgtgtgtgtgtgagggatacctcagatttttcttttcttattttgtgtgaaaatctcttttctacagattttccagggtttaagcattgcttgctgtataaaaaactttactgaattatatacagtttgaatgaaatgttattttaaaaacaaaacaattgttaagtgttccataaaggttatgttgaattttggtcagatgaatatttgtaagtaaaaaatatatgcatttctgaacctcaacttacatagattttctttatat

SEQ ID NO: 4979 - DNA, 2522 bp, Homo sapiens
agacatgaaaaatgctgtaattggaaacaacaagcagaaagccaatctcattgttttaggagctgttccaagattgttgtacttgcttcagcaagaaacctcaagcacagagctgaaaactgaatgtgcagtggtgttgggaagtcttgctatgggtactgaaaacaatgtcaagtctctactggactgccatattatccctgccttattgcaaggactactgtccccagacctgaagtttattgaagcttgcctccgatgcctgcgtacctcttcccagtcctgtcctccagaggagctactgtatacagatgccacagtgataccacacctcatggcactgcttagcaggtcccgctatacccaggagtacatctgtcagatcttctcacactgctgtaaagggccagatcatcaaacaattttatttaaccacggtgcagttcagaatattgctcacctactaacctcactgtcctacaaagttcgaatgcaagcactgaaatgtttctcagttttagcttttgaaaacccccaggtatcgatgaccctggtaaatgttttggttgatggagaattgttaccacagatttttgtgaagatgttacagagggataagcctattgagatgcagctcacatcagcaaaatgtttaacttacatgtgtagagctggagcaattcggacagatgataactgtattgtattaaagacattaccttgtttggttcgaatgtgcagtaaggagagattactagaggagagagttgaaggagctgagacacttgcctatctgattgaaccagatgttgagctacagagaatcgctagcataactgatcacctcattgccatgcttgctgattatttcaagtatcccagctcagtgagtgccatcactgatattaaaaggcttgatcatgatttaaaacatgctcacgaactccgccaggctgcattcaagctctatgcctctcttggagcaaatgatgaagacatccggaagaagatcattgagactgaaaatatgatggaccgaattgtgactggcttgtctgagtctagtgtcaaggtgcggttagctgccgtcagatgtttgcacagtttatccagatctgtgcagcagcttcgaaccagtttccaggatcatgctgtttggaaacctttaatgaaggttttacaaaatgcaccagatgaaatcctagtggtagcatcttccatgctgtgtaatcttcttcttgaattttctccaagcaaagagccaattttggaatcaggagccgtagagctactttgtggattaactcagagtgaaaatcctgctttacgagtgaatggaatttgggctttaatgaatatggcatttcaggctgaacaaaaaataaaagcagatattttacgaagcttgagtactgaacagctattccggttattatcagattcagatttgaatgtgctgatgaagacattgggacttcttagaaatctcctctccactcgtcctcatatagataaaataatgagtactcatggaaagcaaattatgcaagccgtcactcttattctagaaggggaacataacattgaggtcaaagagcagacactgtgcatcttagccaacatagcggatgggacaacagcaaaagatcttattatgaccaatgatgatatcctacagaaaatcaagtattacatgggccattcacatgttaaactgcagcttgcagccatgttttgtatatcaaacctcatatggaatgaagaggaaggttcacaagaacgccaggataaattacgagacatgggcatcgtagatattctacacaaactgagtcagtcaccagattcaaacctttgtgacaaggcaaagatggcactgcagcagtacctggcatgatgggagtgcccctgggcacctgcgagcatcccacctccttgtttaaggaagtacaggaaccagcctcatttgattccttctatttgcacaagtcaccttggactgcagggagctgttttgcaaaagcagtttagtaggcttagatctcaaattcatcttgagaacatttttttgaggtagtaatttcctcagaagactcttgtgttttgttttggtttttttttctgagctactcggactctttattagaacaatcaatcattttcctttggacctacaatttttgcctatgctgcagccactttgtgagtgagaatgaatatgtctgtgtgaacacacaggcatgcgtgtgtatgtgcacgtacatgggccagaatgaatggatgtgtgtgtgtgagggatacctcagatttttcttttcttattttgtgtgaaaatctcttttctacagattttccagggtttaagcattgcttgctgtataaaaaactttactgaattatatacagtttgaatgaaatgttattttaaaaacaaaacaattgttaagtgttccataaaggttatgttgaattttggtcagatgaatatttgtaagtaaaaaatatatgcatttctgaacctc

SEQ ID NO: 4980 - DNA, 2971 bp, Homo sapiens
gctcaagatggcgtgcttgttggagaccccaatccgcatgagcgtcctttcgtttttttaaagaaaaagacgactttcacctttcactatgttgctcttgaaccaggaccaggaatgaaagttactgggagataacttcgaaggattttgcaacaaattcgagctgtccgactctgagaatggaagtaacagctagcagtcgccactatgttgacaggctatttgaccctgatccccagaaagttctacaaggtgtcatagacatgaaaaatgctgtaattggaaacaacaagcagaaagccaatctcattgttttaggagctgttccaagattgttgtacttgcttcagcaagaaacctcaagcacagagctgaaaactgaatgtgcagtggtgttgggaagtcttgctatgggtactgaaaacaatgtcaagtctctactggactgccatattatccctgccttattgcaaggactactgtccccagacctgaagtttattgaagcttgcctccgatgcctgcgtacctcttcccagtcctgtcctccagaggagctactgtatacagatgccacagtgataccacacctcatggcactgcttagcaggtcccgctatacccaggagtacatctgtcagatcttctcacactgctgtaaagggccagatcatcaaacaattttatttaaccacggtgcagttcagaatattgctcacctactaacctcactgtcctacaaagttcgaatgcaagcactgaaatgtttctcagttttagcttttgaaaacccccaggtatcgatgaccctggtaaatgttttggttgatggagaattgttaccacagatttttgtgaagatgttacagagggataagcctattgagatgcagctcacatcagcaaaatgtttaacttacatgtgtagagctggagcaattcggacagatgataactgtattgtattaaagacattaccttgtttggttcgaatgtgcagtaaggagagattactagaggagagagttgaaggagctgagacacttgcctatctgattgaaccagatgttgagctacagagaatcgctagcataactgatcacctcattgccatgcttgctgattatttcaagtatcccagctcagtgagtgccatcactgatattaaaaggcttgatcatgatttaaaacatgctcacgaactccgccaggctgcattcaagctctatgcctctcttggagcaaatgatgaagacatccggaagaaggtgagtctgggagaggggcgtcccccagtcctgacagccagcaggcagggagtgacgtcaacctgaaagtcgtggtgaagagcactaacagtgactgtttgaatataataaagcagagtgactaaaggcataattgaagaatgaatgggacccggatttggggggttgtttgtttgtttttagaacatagagtggcatggccgtgctggaatgacaaataactggcgtgctttttttttgtgtcattaatatgaattattatgttgcacatttttgcatgtgttctgataaaaatcaattctagcactgtgaagcttcagacaccttgaaagtcctaacattagaattgtaaatgttatttatggaaataccttccaatgctattgagaaattcaaatctctattgtatattgttctttgatatgtggcttagttttatgttttgattttttttgctactgtgcaagtttaatgtgaataaaatctttgtggaatgatgattttatgtttagtgagtggtcatctgaattttccagctccccagaaaatgtatgcactggtatagcacccttatgttactaaagcctagtctaacactgaactcatgttcttgatgagaatacttctagatgaggagtatagtggtaagtaagctctgacttggctccttccacaaaccaaaaagctggaacttaccactcaaaaacatgtataacctaataaattctacacaaggctttcaagaccatcagagagcaaaaccacatgttctgtcttgaggagccatagcagaaagagcaaattagtcattatttactgaacatgatgatttactaaatctctccatctgcattagtattttaaggagcactgtgagagaaatcacaaagtattagagtttaccatgattcagagaagttcttcaggcctgtagaaagaggagtatggaccagccttacatttgttgaaataacttgaaaaggacccatttcttgaagaaactgaagtaatagcaataagatttgatgtgtgagtagctttgatttaaaatcaatgcaaaaagcacaactaataaattgaatgtttccatgtacctcactttatttcagttaacaagatactttgacttgaagtgtttttagtgtatccctatgaaaatcatttttggtacatctaagttttcacttataaactgttatttcaaagcaaacatactagtgatatatatatgatttatggatgttgacgccaatgttcagtttgggtacgttggtgtattgcaaggggagaggcttttataacaatagatttgaacatttttaaaaaattggactgtgtaacttaaatacacaattatttggtttaggatggttattagggcccattagaaacaggagaagtattttacccattcttaaagctctaaaaaaccatctcatggactgaaaggtagatagacagatggaccacaatgggaaataggatgtccatttgtacttctttgtacttttttgttaataaactgttttggaattaatggcttaatttgtgatatcatgttctagaaatacctgcaacatgacagtctaatcagtagtctattaaaacttgtattcataatgtgtataatttcctggtaaggctaactcctgatcgtttctgtagaaagatgacaaataaagaaaaagttataattattaatt

SEQ ID NO: 4981 - DNA, 2522 bp, Homo sapiens
agtccgctccggcagcgcgctctgcccggcttcctcagtctcctcgccgggagcgtccgggagcagctccgaggccgcggcgaaaccaggtggagtccgaggttcggaggagtatcagaggttaggggaaggccggagaatgggctgggaggctgcgtttcggagcttagggttctgtccctgcgatcgccgcgtctccctcccttggtgggcgcggctcccgggaagcggctcgtctcgtctcccctcacaggccgggttcccgttctggaccttcgccctcggaacacagtgctgttggccgggactccttcccgaggtggacggctccctgttcttattcctggctctgccagaactgtaggaagtgctcagtacactttagggcatgcatggcactccctgggagacagtgctttagggccagaggaaagatcttccctgaaggcaaacgcccgcggagcccacaagtccgggccgcactgaacaagtcaggatgttgccatcggcaattctgcagaaggcagtaacccatctgagagaaagagccgctgtcataaggtctcttgcttgagctgctgggttgagaatggagctggaagagggaactgatctcggagctccttggggatcttggttatgtctgacccttttactttcagggagcagggattggatcaagtcattgcatctagagtacgggggaacgaagaaatcatggagagagtttgccccaggagagaggcgagcgttatgtaacctaggatctggggtgggtaacagtctgtgcagtgtcaatgtgagaggagaaaacacccaacgtgagggaatggtcaggtaagaaaggaccagaagttccggttctaccatagcaaggacctaagttgctaatttaggttctttaatgcagacctggtctttcagaacttctttctcttccctagccttgtcatttcagcattctggccttccctatgaggaggaagatcaacgaagtcacagggcccttctagcccaatccagagctgtaccatggcagagacaagagaagaggagacagtgtcagcagaagcctcagggttctcagacttgagtgactcagagttcctggagtttctggacctagaagatgcccaagagtcaaaggctttagttaacatgcctggcccatcttctgaatcccttgggaaggatgacaaacccataagcttacaaaactggaaaagaggattggatatattatcacccatggagagattccaccttaaatatttatatgtcactgacctggctactcagaactggtgtgaactgcaaacagcatatgggaaggagcttcctggtttcttggcacctgagaaggcagctgtgttggacactggtgccagcatacacctagctagagaactagaacttcatgatcttgtgactgtcccagtcaccactaaagaagatgcttgggcaattaagtttctgaacatacttttgctgattcctaccctgcagtcagaagggcacatcagagagtttccagtgtttggggaaggggagggtgtacttcttgttggagtgattgatgagctgcactatacagccaagggggaactggagctggcggaactcaagacacgcaggcgccctatgctccctctggaagctcagaagaagaaagactgttttcaagtcagcctatacaaatatatctttgatgccatggtacaaggaaaagtgacccctgctagcctaatccaccacacaaagttgtgtctagaaaagccactggggccatcagtgctgaggcatgcccagcagggaggcttctctgtgaagtctttgggtgacctcatggaacttgtcttcttgtctctaacactgtcagacctcccagttattgatatcttgaagattgagtatatccaccaagagactgccactgtgctgggtactgagattgtagccttcaaagagaaggaggtgagagccaaggtgcagcattatatggcctactggatgggccaccgagagccccagggagttgacgtggaggaggcttggaagtgccggacgtgtacctatgcagacatttgtgagtggagaaagggcagtggagtgctcagctctacactggcgccccaagtcaaaaaagccaaatgaatagaaggtatgctttcaagaatgttgatccttcctgctcctgttgtacctaagcaaaagaggaccagtctctgagcttggcttttatggagagtgttcttattttggttcttttttttatttccacaacctctaaccacattcagtccaggaccaaggctcagggatgagtgggagagatgggttatactgtccctggagcttcatcatgattgcctgagaagacagatgctcatcatggctggaatgaaggtatccttcagtaaactttgctttcctaagaaaattcttcagtttctgataagtcatccctatttttatcttgatcaaggctttctacagttacataataaaatgaaatgctgtcc

SEQ ID NO: 4982 - DNA, 871 bp, Homo sapiens
ggtaaccgtttcccgcgcgcccggccccgactccggggtaaagagccccggagcggagcagcgctggccgcgtgccgcctccggagccggcagcccccatggctgggggttatggagtgatgggtgacgatggttctattgattatactgttcacgaagcctggaatgaagccaccaatgtttacttgatagttatccttgttagcttcggtctcttcatgtatgccaaaaggaacaaaaggagaattatgaggatattcagtgtgccacctacagaggaaactttgtcagagcccaacttttatgacacgataagcaagattcgtttaagacaacaactggaaatgtattccatttcaagaaagtacgactatcagcagccacaaaaccaagctgacagtgtgcaactctcattggaatgaaacctcagaaaaagagcaacagaagtaattgtttcaagctcctgattctttctactaaatcatgaacagctttaaaaacatttctgtctgcataaaattattttacttgtaacttttccccaattgttctgtgcattgttttgcctttttaaattacatctccaagtggctcaaaaggccttgacacagggaacctgcacatatccaggatatgtgtaaccagcgatggtgacttgaccttgccaagacctgtgattccttcaggatacaatcagtgagaaataaaaacacatcttgggaagtgggaatcctggagtttatgccatttgcaatattaaaaaataaaaatgcaagttattatttcaataataacttcctgtttcattgtattctgtgagtgataagtgtcagatcaataacagattaatttgttgttaacagctcttttt

SEQ ID NO: 4983 - DNA, 4325 bp, Homo sapiens
agggtgtgagatggcagacaggtttgcaggaaaccctcagaaagggggctggaggatttagccactctgtcctccccttccggcagtccagggcctcctcccgagcacagcggcgctatggactctccaggatacaactgcttcgtggacaaagacaagatggacgctgccatccaggacctggggcccaaggagctgagctgcactgaactgcaggaactgaagcagctggcgcgccagggctactgggcccaaagccacgccctgcggggaaaggtgtaccagcgcctgatccgggacattccctgccgcacggtcacgcctgacgccagcgtgtacagcgacatcgtgggcaagatcgtgggcaagcacagcagcagctgcctgccgctgcccgagttcgtggacaacacgcaggtgcccagctactgcctgaatgcacgcggcgagggggccgtgcgcaagatcctcctgtgcctggccaaccagttccccgacatctccttctgccccgccctgccggccgtggtggccctgctgctgcactacagcatcgacgaggccgagtgcttcgagaaggcctgccgcatcctggcctgcaatgaccccggcaggaggctgatcgaccagagcttcctggcctttgagtcgtcctgcatgacgtttggggacctggtgaacaagtactgccaggcggcccacaagctgatggtggccgtgtcggaggatgtcctgcaggtctatgcggactggcagcgctggctgtttggggagctgcccctctgctacttcgcccgggtctttgacgtcttcctggtggagggctacaaggtgctgtaccgcgtggcgctggccatcctcaagttcttccacaaggtgagggccgggcagccgctggagtcggacagcgtgaagcaggacatccgcacgttcgtcagagacatcgcgaagacggtgtcccctgagaagctgctggagaaagcgttcgccatccgcctcttctcccgcaaggagatccagctcctgcagatggccaatgagaaagccctgaagcagaagggcatcaccgtgaagcagaagagtgtgtcactttctaaaaggcagtttgtacacttggccgtccatgcagagaacttccgctcggagatcgtcagcgtgagggagatgagagacatctggtcctgggtccccgagcgctttgccctgtgccagccccttctgctgttctcctccctgcagcacgggtacagcctggccaggttctacttccagtgtgaaggacatgagcctaccctcttgctcatcaagaccatgcagaaggaggtgtgtggtgcttacctgtccacagactggagtgagagaaataagtttggaggcaaactgggcttctttgggaccggagaatgctttgtgtttaggctgcagcctgaggtgcagcgctacgagtgggtggtgatcaagcaccccgagctgaccaagcccccacccttgatggctgccgagcccaccgccccactcagccactccgcctcctcagaccccgctgaccgcctctcgcccttcctggccgctcgccacttcaacctgccctccaagaccgagtccatgttcatggcggggggcagcgactgcctcatcgtcgggggaggaggcggccaggcgctctacatcgatggggacctgaaccggggccgcacaagccactgcgacaccttcaacaaccagcccctctgctccgagaacttcctcattgctgccgtggaggcctggggcttccaggaccctgacacccagtgacggcctgtgccacggtgactgagccgtggtggggcggtgggccgaggctgggctgccgcctcgggcagcagagagcagatgaaacccccatgtggtaggcagggttgggggacggcaggaccccatggccaagcctggcgttgcctggacctgctgctgcctctacctggggtttgggctgggcttccccagtccacctgcatctgggtcagagctggagggcctgctgtgcccccagccccacccagagctggcataggaagtaccttcctcctccgtggaggcttccatagcccaaggccttgggagtgtctgggtcttgctgcccctgagcctctctaggcagcctgagcccctggggtgggagtacaacggcagtgggaacgtgcagctaagggtgggcctgtggtgccccctgctggtgccgcatagcatcgcgccctcctgagcagggccctgcagcctggctggctggcgactgaatcccagcgtagatcccgagaacagactggcacccttgggcctgccccctggcggaccccagccccctgtcctgggcgtttgccccagttccctccccaggcctcctgggccacctctcacattaacccttcttggctgcctctgaggctcccctgggctgcgtttgggagctgctgggtgggaggaggagggtgggatttgtgctgggctccacccccagggagggtgggagctggagggggatgtcacatgtccttgtgtttctgcagagcctgaagcttttgctgggcctccctgcgtgttcccatctgaagaggtagccccgggagaggccctcagggaccgacccagaccagcaagctccatttccaggggtctgcccagagaagcctggacccagggggcttctcagctcccctcccttccagcccaggcctccttgagctcctgtagcctctgcagctgcccatttcacctctttgtcattgcaatgacctggggcccagggtcacgcccaagcccctctttgtggcatgctcatctcagtgcagccccaactgcttctctgcaccaggccccgtgccctcccctggccctggccacacagcacctccttggccaccttgcatggatgcatgtcctccctctgtccctcttgtggtgctgtggctggccacgtgtcagggttttctgtgagcctctcaccttacagcctttgggcccctgggcccctgccctgcctgagccctgcgctggccagacgcaggtaggtgccaggggaggccttgcctctgggcactatagggggcagccccctgccttgtgacctccctccatgccccatgacctccttcaactcgtcttgagggtctggtcaccacggaggggagaagggagacacagaggcccaagtggctgttctgggaccatggaagcctgggtcacagaggcaggtaccagcagtcctgcccccacccccgtccctgctggcctccagccagtgccacttggagtcccctgcaccgtgccactttccatccccacaccattgcctgctcctcccatggggctttagcctcccctgaccatctgctcatgtagcctctgactgggcgcacagtggtgcaggaggaaggaccgggaaccctgtgtggctttgggcaagctgacaaacccgtctggaactcagtttccccagctgtgaaatggggccagtccccatgccctgctgtcctcctcacaggactgttgagaggctcgcagggggatggggtgaatccctctcacggggagaggtatgggagggaagtcgccactcatctcagcccaccgcagccctccaggcccccgcctgagcccctgaggccctcatctgtaccgccagctttggtgttcattaaacatggtcttgctgcatcaactccagggctccaagctgagtctgatctcttcagccagaggggcctccgggggcttcctgggcctacagccaagcaggtgtgggaggctgcccgctgtagtgctcacccacattctatgactggaatgctgcaagcctcttccagagggagccctccaggagcagggaagtcatatccgtggaccatttgtaggtttccctctgcaaacttcctgaactgggtggtgatttttctggcgagttaagtccagcaggttctgcgtggctgcccccagggggccccacccgggccttccagtgatctggaccaggaagacggattgctgctgggtcatgatttccacatcatgagcgaagttctttgttttttgtgtgcatgcaaaatattgtttctttaaatttaatatcttttcctaacttttctactaacctagaaggtatgtgtgattattatcttttttattcttatcactgtacttgttagtatctgatattaggtattcccaaatagaacataatttattttgttaatgttctctatttcttcttgattatttattagctttggatgttaaaaattagccaaaagtggctgctctgcctatgaagtagccattctttgttt
